United States Patent Application Publication US 2025/0297208 A1 - sequence listing, part 7

SEQ ID NO: 1109 - DNA, 142581 bp, Xanthophyllomyces dendrorhous
  misc_feature (139256)..(139265): n is a, c, g, or t
aaaaaaaaaaagagggtcggccttggatgtgtgggagatgaaagagaaaaggatgagcgaagttccaatggaggacgatcggcaacggcagccggcttgacggtccgacggtccggagtcggcaccgatcacacatcatgaataacatacacctcacccacagcgaccacagcaaccaaagcactcacgacaatacgcaagatgttggactcacagaacacgctgatctttctgtgtgatatccagacgacgttcggtgagttctcgaatgtgtctttgtattgtggttctttttttctctttttcttctcgaagtgtttcaagactaatcgatgggatctctatctcttgtcccttcacctgtccatcttgctactctccgccatctcgtgatcaatatatcatttgcgttctcttccttcgatcaacctattcaaataacccagcaaaggcaatcgatggatgggataatgtgatccacaccgccaggaaactcgttcgattcgcacaggttcgtaagagatccctcgtttcatgacacatactctttctatccatcggcggtactaacccccacgttctatccactttgcagatcctggaaatccccgttttagcaactgaacagaatccgaaaggtagactcgaatactcgtttcccctcttgatgacgtctgactgatctcgaccgggcttcggacacatctgccactcaaagctcttggtccgacggatccttcgttagacctggaatcactctctccagagcagtttctaggatgttttccaaagacaaaggtaatgattatttctattcatccctgatatctgattgtagtccctctcctgatcgatcgcttcattcacctccgtagttctcgatggtcatcccagagaccatgcagatcatccaggaacgaaagatttcaaacatcatacttgtaggaatcgaatctcacatctgcatccttcaaaccgctctcgagctgcttgccgccagattcgcagcccaaccgattgaggtatacgtcttggctgatggagtgtcgagctgtcatcctcaagaggttcctgttgcgctcgccgtcagttttttttcctacgtctttgagcttccttcattgtttgttgtggctgactggatccggttgacgtggcacactcttcgttcgtggggaaaatctgatagaggcttgcaaaggcaggagcgatggtgacaacctccgagtccatcttgttccaacttcaagccgacgcggcaagaccgacgttcaagtcgtttgcaaagcaggtcaaggaggagaaggacggaacgagaagagcgttggatggattggccaaaaattcttctaggctctagctcttttctctgtggcatcagttttgatagcagtgttctcgtaagtactatatatatatacgtgtaatacatcaggcaagagaaatgaaacaaaggtcgcaacaggaaagttggtgcgtcgtctcttcatgagaaatcctcttagttgagaaactcgaggtccaacacaacttctgctccggttattaactttgcatgggaagctaaatctagccaggaagttcccgcatctggtggacctgctagtctttcccatcctcctggaggagggagccacgagagaaaacattcgtcatctgttggaccaacattggatcgaaagcagagagaaagattaatgcgcgcaagaatcactcaccatctcccttggcgccctctaggtctcctctttcaaaccaacaagccaaccaaaaggaaatccacgatcagtactatgctttcgaacgataagaaaaaagatcaccggacaagacaattggtactcacgttccccatagaacttccaagtcggctttcaagttgcccgtcttgggtgtatacgttcctgtgcatgaaagtgtcaacgtacccgttcgacgaccgatctggcccacaaacaatgtctgtcctgtgaagaccgacggtctgccgaccatttcagttgttgggtgagacctgtcgagaatcatagatggacggagagatatcagagatgaagtcgatggagaacgatactttcagtgaaagccagcaacgaaggggaagacgtgtctgaccaggttagatgggtgaccgcttgaccttgcattcctggctcgtggccctgggccttatgaaactcggcttcagacttgacggacgtcatccttgggatttctgtggttgtgctcggtctgtcgagaggagcttcgacccatgttttgtggtctaaaactgcgtaggttgctacagagttatgggtgtgtgcatgagacggtgatcctgtcagtatcagttcggatctcaggtcaagaccatggccaaacgataatggcgataacaaaagacgaacaaagggtatacatgactgatagtttggaagcaaaagagagagagtggagatgtgcgatatgcttgtggaagaagccaccgatgcaagttgtcgaagaagttggaagtcgaccgaacgttgcgcgcggaaagtgacatcacccgtgaatgaattcgacccgggtgagtattttccctgttagacctcacccatctcatcccatccatccttctttcggacaacacgaaggaggtggctctgttgggagtctgtctggccgactaacaccagccagaatcagctgaatgtctggagaagattcccatgatctcctttatctatggccaggcttgacagaacgtgtggatgatgaatccctcaggttttcttgcctagcgaaaaaagaccgtatcctttgtttccaccggactgttcgatactctctcactcgactgcttgaccatacgttctccttcctccaacagagtcgactgactggacgggttctctagaatataaatgagtagaacgaatcagaaggtgaaccccaaatggaaccgctttatcctctctggccaccggtagaccggctgcaggatattatcttgttgttgatgacttgcccaaagtggcgccgactgacgactaacgagcccgaaagagcgtgttcccaacgatgtcaacccggctaaccccaataccaaggtgagggctgatagaacatgttgcttatatgaatcttggcctcttgcgtctcccatccttctagacatcctctgtgagcttgagttcacccctatccggttgtagtggcatcgacgacgacaccactcacacagacttgctcactgatcgatctcgacagcaacaaggccctaaaaaagcttatctttccagtgtttcgtccgccccccatccggtatctcttgcaactccagggctgaaaaaaaaaggaagaaaaactttccatccccattgttttcaccaccgttcaaacctctttccttctctctccctttccttctctctttctttccttctctccttgtctctctttcgacctcctttccattctatgaaaatggctcccttaaagaacttgccttgggatatcgtcgtccagatcatctactactctgatcaacaaacccttgccgcatggtgcaggacgtccttcgaagtcctcctcgacgccggacctctactctatcaggatatccagctcaactcattgacttccttgttttccttgtttctcacggtaagcttgcaacttttctcgactgttcttgttttccacatggaagtttccggcaaggtagtcttggtagaaaacgtcaatcaaccttgattaacccagcccttgtaatactggttcctgaaaacagcctagtcatatctctccggggtctcgtcttcggtcgtctgccaacctgagtcacctccgaacgctttccattagactctccgactctactttatccacgtcccttcctctggacttccagtctctagccggctcgatccatagctctgaacatgaaatgcttcggacgcttgttcctgatgatccacaatggctagccgcgccctcctggcggtcgacccctcggaatcgagcagagtcgtcccctctactgatctcaactctagacattcatctcgacattcctccggccgctgctatcaaaggcagttcgggccttctcggtagcagtcgaccggtcgagatcgattgcacgttgttccatgtgcttcgaccgatcgtttcaccagcacgtctgacatacacgtcgacctcgacgttaaactacttgacctcccgctcgctcgctcagtgtatccgtcgttggagtacactcgaaagcgtctcgctttctggaagtgtctttgccctggacggttctctctcggcctttatcagaggtcttccccgatggccgctcgggactcggccgtcgcttcagctcagaatcgacctgtcagacatctcgctcggaaaaccgacgtggcacttcaaaaaggacctgggtgaatggacaagatcacctgtgttttcatcctacgaacacgtgttgtacacgttcaggaaacaaggtgttttcaattcggttcatgtcggcctcctggtcaaggatctcatggaacgggatgagctggacaggatcgcggtcgagacactctctgaagccgagagagatcgattcaaagctggaatcgttgtgaaaacgggttgagtcgcatccaattgaacagccgtgtttgtttgaaaaccattgatatcactttccttccccttctctccgctagtcttgtctttgtttctttactccgtttttcgtcttcatacactccaagtcatctctcttctacgcatccatagataaaccggttagatttaagtttattctgttctccatcttcttgttctctctcctgtctttcccttttattttatctcatcctagagagtactcgctctagattcgttgttgtacactccatagattctaatctaagttttttccatctgtcttgtctaccccatcccatgtcttcaactgcaactctcgtcacttttcgattaggaactcggttatgtacgacatgaccatatcatttcgcaaacaagataggatagctagcccggcaaataacaaaaggaaagatgatgatgacagacaaagtattcgtgaacgaaacaaattgtaccgcggaaaaggaggcgaagagaacgggtagaagaggagaaggagagaacgttaaaaaatgctttccaatactgatttacaattctatcaaaccgaaacgaagtaaaaacgaaggacagcggccatatcaacgacatccgagaaagatgggcaggcgacaatggcgaaaatcatgaagggacatcatgcgtccgtccgcttattctacattaacagtaaggaagtctccttttgtttcttttcgggttgattcactcttttagagcaggcctttgcgctgtcgttctttgatcgattggatagcagccgtgcacttcagcgtcactccgttttgtagagaatattttccggtctgaatcaggttggttggtttggttcaaccgagattcgaagaaagagtcagcttctcatattgttcttgaactaaacacaggaagaaatatcaacgaaccgccttgttgaggtcagcctcggcgtgtttgccagaaaggacaaggttgtaatgctgtagcgcttcatcaatacggccttgtctgtcgtagatccctccgatttcgtaatgggtgaaaaagacgatccaatggtcgagtaccaattttcggccgttctgtcaacgatgcaaggatcgacccccagaacgcaagatccgataaagacagataaggaatgagattgccatgaataagaatagactcatcaaaaacaacaagtacgaaagtaagaataatggaaggacatacgtcgagaaccatctgcagttccgccaaggcttccaccgcgagcgccgcttcatccacgggttctgcaggtggatcgtccggcgagacgaccctatccgggttaggaagtgcgatgagcccaagagcgacacccctcaacatatgagccagtgcaaaatctaccagattggatggcgtgtgtgtatgtttatgaacacaccaggcgcatcagctttgtgttccaagagatgcatcatgcaaagacatgaaaacgcaccgtcccaatatccctctcctcccttgtaagtctctggcgttgtagcctcgagttcatcgatgactagttgaatcctgggaagagtcttctgctggaatgcccacacgggcgtatgctgatacaacccaaacacataactctaaacgcatggtgaaggagatagacaaacaaccatcagacttgttcagtattcttcagatgaaaggttgagaagcgcacaagttcgacacccgggatggccaaccgtccctgtgccaagaatttcctagactttcgcgaaacatatttctattcatccaacaaaaccagagacccagacttttgagtaagaagatggcgagcagatgaatgaaagacgataagacgactgacctcgacaggcagggatttaccaacaacctaagagatagagcagggaaggccaaaagttgaagtctcattatatcacgatctcagcctcgagtagaacaagacgcttaccttcttgatgcttttgggtaccaaggtcatgtactcggtgattttttcaatatctggcttttcaacctcacacatagcagccgccgttgaactgtacccgtaggaatgcgcacaagtccagtagcaaggtacgatcagtccgggtgtagaaacatcaagagaatgggactggacaaagcgcttactagagataagtagccttggaccaattcgagccgagatacaacgtgtcgaaacactcagccgcgaattggaaatcgttaagagctagggcgttggtccctatatcccatcgcgaaagtaatctacagacagagggaacaactcagcccaaagcatcacaaggagtaaatgagttcagcagaaacgtactgcagctggatgtaactgtatgtttcgtcggtgtgacccaagaaggaagaaagtagacgagtaaatatagattgatgacatagaatattgaggctgatggaagtgaagcagactgactcgtgttgggcttctatcgctttatgtaaaacaatactagatttatgaggttgatcttgcatgacatgtaaccgtgcctggaagactacgtgaacaacagaaggaaagaagacattcagcctcgatacgaagggaacgattattaagttgagatagactccacctacataaagagaaaacgcctcgaggaaatctctcaacgttgtaccacatgatcttctctccaaatttgacatcgacatcggtcactagtaatgaagatgtacggggcaataatctgtatcaggacaggattaatacttccaatgatagaatgagaagaacatgacgtacctggtaacaaactcgaaataaccagatggaataacattagacacatatctgacaacggccgtctgacaccttcctgatccttcaagaccgctggccgatccgaatcgctggtccaaccaccggactcggctaatttgtcaagagcatatcgacgagacccttgaaagccaaagacttcggcaatctgaaaactcgaaacagagcatgagccgagttcactcaagtcttcatcgacatcgagggaggaagacaaaccttgacgacttttccaggcatcatactgagcatcaacgcactcattcctgttcccaactcaacccctgatctgagatctcgatcaatcgttggatcgtggccaccatgacttttatcggcagcttcgatatatgtgttcagagttcggtagattccctgagaagttcgcatgttcatggcttctttgattaatgccaaccactaattcaagttaaacgatattgaggtaagttaaatcccttttgttctgtaacagtatcgaaagctgaacgtacttctcctccgacgatgattccgagcatggatttcatcaacaaagtctctgcatacatgagttcagcctaagtcaaagaaatttgcagccaagacgagcaaggcacggcaagaaaaatgagtcaatggtctggttggtgatacatgttcatatgaaagagaacaggtggtactctccagagaacaagaagtagtgtgaggtaaaatcctaagacatacatgtttctcaatatctgtcatcgatttgatcagtgctactcctcctcccttgaatagacgggtggtcaacgatgaggctggctttcggtaagaggatctgttggcaattcagaacaagagagagcggtatacacaacattcggatgaactcgagattggttgtgcgctcaagacagatgcgtattaatggatggacggtctaagataggacttacactagatctgtcacatatttcgtcacagcttgggcgtgttgtaaatccgaaggctcaaaagtcataagaccctatcaaagtcgacaccaccaagcagggttagcaagcgatattttgttaaagtgacagatcaactacttgccttgagcgcgctggatgtgacaataaacatgcatggctcagcgtcaggttttgcgcgtatgtatcatcttcgttacgcgtgggcgcgcccaatggaaacacacacatacctgagaatgcagtcagcgatctggagatacaatctctctcgctttgggtcactctcctgaacaattttctcggcttccttgatgtgcgaagacaggaactgatcgattccacgcgaacgcgcaaacacatcgtttgaatatcagacaatgcgctagctagatcgatgattgaaattgaaaacgaaaacagaactcgagttggctcactagattcataactctatgacaggtttgaaggtcctcctttaacacctggtcttggtccttctctctcaaccgaggcagctctttggggatcggattgataggtacacccctatctgaaagtttccctccggtaacactagtgtcaaccaaactcgtaggcgcctccactggatttgaatctttggcatgtacgtgtgaggggctaggcttggtcatagctacatgcttggtatccactgtgtcctccaagtcggactcctcgcccacctcagacaagccttcatccggggtagcgaatccgtcgttctcgtcttctgaatcgtcttcatcctcggactgatatgtccaaactgactcgcctgtttgaggctcggctgtttgggcagatccggctaaatcagatcctgatgtggaggctgcaaggctggccggattgacaagttgagcagcaagtaaaggtttttctggttttacagaggaaacagtggaaggctcaacatcttctcttagaagcgacgtgccaacaggcgctgtcactccatccatcgactttcttccgatctccttgccgttacctccagagaaggcggcattcatccgatgagctagcacgtcttcttcatcatctgagtctggagaggattcttttgatccatgttggtcgagaggcgacttgctagcaccattgtccagcgagtgggaggcaacactggccgagggaggaggtttagatctgttggaactaagagaggtagtggacggcgaagcagagattgaacaggattcatgatccttgccggagaagcctagtcgcttgaagagcgaagtcttcctcctggattgatttatgttacccaagtcagataaagatgaagaggaattgagatgaagaaggaaaagaattggtcagccaaccggccggccgggtatccctgaacattcgcatcctcgctctcatccgaaccaacaaaagatgatgaatttcaagaaaaagaggagagaagcggacactgacttgactcctgcaccttttccctctacatccaaaggaatcgagccttcgaagctggatttacttgatctcaccggtgttcgagtgggagaattggagaccgatgccgaagctgccgcggcattagcgaaaggtggtgaaggcttggatttctccggaacgtttgagatcgtcgtatacgctgggtcttgagcaagagcggacagattggaagaatctctgcgtttgaacaaaccgggtgccatggttgatgcaaacacgaagccgggaggaaggatagagggagatcgaagtcgatgatggtggaaggatgaggaaacgagaataaatgtaccgaaagcgggaaggctatgaaagtggggcgagtgagtgtgagcagcaggatccgagtacacttcctgctacggcatcttccccgttggaaccgacctctttctcattatattttatgtggtctcgttgaaagtctttctgtagtctagcttggttataccatgagtacatcgagagcatgtaaagagcgtgtgtctgaatatatgtatgcgcccatatgtaggaatcgtttgtgatgtacataaaccctccgattggagacataaaattgagttttcatcgagaacaatttatcataatttacacttgttgaccctctacccatccaatcttctcaaagcagcagaaaatgagatcgtagccttcaaactcgtatccgattctagagtattgcggtcagatcaagatgatgtaagtcagcatacccgtgtgtgtatgtatgtagagtatgtgcgaaccgccctatgtgcccaaagaagagtcaagcagtggaaagaaggagcgacaaatgtggaactaacctatctttcctcctgtatccagggaccaagcctttgcttcctagaatgtttgctgtctttccccacccttcttcttcttcctcctcatcctcatcttcttccaaggactccttgttggtctccacaaagagcgtgatggagaaccgaccaggctcgaaaatcccgaccaccttcctcactaaggtcaacaagtttggaaactcgctgtccctgatcacagaagaccctgctagcgatgaatgggttgacaacacaagagacgacgcaagggagttagctccgctaccgagaggcagggagatgtttgtctcgaacgaagcaaaagaatggtcggcctccggagtaacatgaacggtccagtaaccttcttgaccttttgacaaagacgatgaagatgacgataacgacgatgacgaaaaggttggcgctcgaacgagagcgttagcggaataaccacatggcgagaacgcgtaagaatctagagtctgcagtgaagacggaaagatggttgacagctcagagacatccctgttgaggaaaaataaaatgagtatgagaaaacttcgataagtatagctcacgtttgaacaaacagccaaacagatatggagacacgtacgacatgagctttcctccctcgtagccttcctctgcaggaggctgaccgtcctctgcctttggcgggtaaaactggttccgtcccttctcgctaagatgggtcatcaagatttccagtgtctgatctcctacggctgccgggtcgctcccattctttcggaccctgaagttcttctcgctctccaccacctcggctggctttgtgtgattttgaggcggaggcagctgggcgttctcggatgatggcgacttgggagatgctggtcggagatgcatcgctgctgaggagattgcgtcggagagaacggaggcatcggcagcataggatgcaccctttggtgatgatgtttgaggagaagtcgagtttcggggggcagtcacgtaaagcagccagtggtcgccattcataggtccaactgtgtaggcagatccgttatctaattgatgccggtacagccaacaagagcgtcgtctcagtcgaacggatggaaaataagattcgaagcaagatcaaacggcgagagaacacataccaaagacaccatcaaggaaggcaacctcgcctcgccagccggacgcgtggacgcccttctgtcgttcagggaacatgaagctctttcgggagtagaagcatcggtagacctcgttgaacccagcgtactctcgcgcgatcgacaagattcgaggaagaccaagtaagttaagcgtggtaccgcatgtcttgagaatgagtcggttggacgagacgatcaaggaagattctctaaagatatgtacgcagcatgacgaatgagagctcgacaaaacgtcagcttggacggtacaaagaatgtttgggttgcaacaggagagcaagacagacgtacgagagcaggtaggtatcaatctcctccccttccacaaagctgaggatcttacacttgacgaggtctagcatttcttcccaaacctctcgaggcactcgccgaaggcctgaccattgaagctcagggttaggatgaggtggtcggaccacggacgagggtccactggtgctggcactagcagagggaagaaggtcatgagcgttgggagagaaccagatctcgagaagttctgacggaccaagtcagaaagaatcgagtcatagccattagtgggtgttgctatgaagtatgctgtgaagaatgaggatagtgaactacgtactctccggcccttcgaaaggaccgtccgaagacgaagagtcagacgacatcaatcttgactattgctttgaatcactcgaacgaataccgaagaaaggcctagataacagagctcaagtcggtatgagagcacgagaagcaaagcagcaagaagcagaacgaggtttgagcgagagcttgggcggaagcttgagagaggcaaaaaagaggaaaagaaaggatgagcaatgaaaaatgaaaccgaataattatcatgtcagtttgacatcaggctgagacttctcctcagtatatgtccaccatgcacacagagcagcgagaggcatggacaagggctcagtggatggtgtcggttgggaggttggtggagatagcatgagcatgggcaggtagcgttcttgtgtgtgtgcgagatgatggatgcttgatcggtagctgttatgggcggccgggtgaacgtcctctcatgaggtttcgttgaaggatccagtagttacatcgtctgacggagggcgcatcggtcttccgtcctctttctttctagccatcactctgtcctctctgtcttacctactgttcgcttacttctctctttgtatcgcccacatggcagaaaagccaacgtccagttcgggtcctctgaagataaaggttcttccagatccgtttatttagttgtttactatgagtgtccgaaggctgatcagttccaatcaaaaacatttcctacgcctcagctccgattcaactctgcacctaactcgtccgtttcgtcttcctcggccctcacaccttccaaccaatccagacggacgcctagtttcagctcggattctagctcctctctgcagccagaggcagaatccggaaatgaggaagacaacgagcatgaatctgaacacaagcaaaagcctgaacatgggtcggagtcaaagaaagaatcacccgtccaacccgtagaggctccagagagcgagccaaaagaccagtcagacggacagcattcatccgaaaaaccccagaagcgaagggaccgaaatgtggagaagacgtcaaagcgaaaacgcaagaagagcatggactttacctctagtccttccgcatcacccgagcaagtcaatcaacaatcgaggcagcaccatctcgctcatgaccgtcatccttcgttctcgtcggcctcgtcaattgtgcccgatcagccagccggtctcggctccaatctttacgctcaccactcggaaagccatcctctaggtcatcactcgcaagcctctcatggcactatgcctcaaccaaccgactctgcttacagtcagcaaaatcccatccaatcagctcagcatccgttccagcaatcacctcttccttcaatctctacacaactgtttccctcaaatcattcggatcgatcctcttcgagcgctaccgcaccatatacctctgtaggaggaacccatcctcctgggacgacttcagcatatcaatactattcccccgttgccagccttacacaggttcctccaacaggaaactcagatgataactcggctcaaccccagagtccatatgtccaacagcaatatcaaacccccgggctccttgataaggtagctccagctcaaatccctctttctaccgcttcagaaacccagccacacccacatcacccgcttcaatccgaggccagtctgtcgaggagggcatcggtagacagtgcagcagaatcagaagggcccaaggaatcaacagaagtaccggatgtaccggatgtggtaactgaagggctctctggaagagctctggttgaaaagaagaggaggtggagaaaacaggaaggcgtgcccggtccaggcaagaagtgagtttaggccttctatcctgacggaaatctgttctttatatacgcttaccgggtctcgatactttttgtgaacagctggaggaagggaaaggggaaggcatcaagaagaggaacgcccgttggatctgatcatcagcctagtctatcattgggatctagtatgttcatctgcaaactataaccatccgtcattgggacccaacaccttgtttctcacattccctgggatgtcccatcttttcttccaggtccgcctcctacagactcccgattcaactcaccgctcccgaatcgatcaggctataattctccgtccacctacccattcacccatcatcctcagcctttccaaaatccgtactccaagcccccgcctatactcccttctctctcaacgataagctctgcgaatgccgtcacgactgctgtaaaccagtccgcagtggcaacagttgtcgagccgtactttcccaatcagatgaatctatacaaaaaaggcttccatcttgtcacatctgctccggctcctaaagtatcggctggatatgtcgtggcagaacctttgatgaacaaaggaaagggcaaggagctcaaagtcaggaagtggaagattgggttcagatcggtcaggagtatcaccgggaaaggctggcttgccggaggtggttggatgggaggtatgttttcttcaaagcactcatcagatgttccaacacaggctcaaatgcatgtgtacttgatcgattcgaatcttaacttctttttctcttgctttgtttgctttgtcaacctatgcgacagaacaaacgtctgagctgtccacctatctagctgaagaacgtagggtggccgccgaggaagcagtagcagtttctgccgctgcagatgctagctcccggcctgaagaatcagccgacccaaatcttctcccctcaactgccgaccttttacctgccgcttctgcttctaagcgatccaaaaagttgtccaaattgacagacgattcggctctacctgcgaatagtgatcgagaactttctgtacctgtatcggttgctaccacatcggccatggtagaacaaggaccgacgacacctttggaagttcccggagggtccagatctggatcggtctctgcatctgggcagactcctggaggaagcgaggagccgaggtagttggacccaatctctagttattcttcgtttctcacacgctcattagttttatcacatgttcctatcatatctttctttcgatgtgttcttcacgatgagtccagagctaattgattggatctgtgtatattgatcgggtgtctcatctttttctcactcttacgttaaggtgtatgcgccttcagttgtaaggagaatgctaacttgaatgcatgctgtcatctggctgacaggattgatcatcccttgaatctttcttatttcatctcgagtatatatgagcccctctctctcataaccttgtcaacacttgtctttcctgaaacattcaacatgacttgtccagtatctccatctgtcctatcaacaacccaaggactcttggattcttgggaatctaatctcgcttcgcctacttcgccttctttgctcattgacatgtctgtcgatttccaacctctatttcctgacaatgatattcaagcttctccttcaacatcaccttcgcaatctgattgtgaaatcacgtctcttctcgaacttaatcggcctgcgaacaagttcggtttgggtccaagatgtcttgaagaagatgtggacctgattgataaagcagactcgtccgttagactcgatatggacagttttagttcactggacggattcagcactggttacgaggaggaagattatgaaggcgaaagtatgaatgagagtagagatgatgatgatgatgaggaggaggaggataattggttccagacgggttttgtcacagaggtcaacctcgaacaatccgagcaggaaggtttggatatcagttcttaccttcgacctatcaaagttgaagatgaggccttgaagctggaatcagatgacgacgaagaccatagagacgacgatgatgagagcgaagagtggagtgaggatgagcacgagatgtataatccttctgctcagtatcttttggaaaaggcgcaacgtcggtaagtcgaccgtgtatacagctcgaaacgttttgctgtgtacacttatgtatgacttcgttgatcattgtatacttacaactctgcgggaggatttggttgtttctaatagaacagcagcaatgaattacgtggaaaatgtcatgacttcgttcctctcccagctggcttcttcgatgttgcatccttccacactctcgagcgctccttcatcacgatctatccggccagagccaacatccaggcaaaatcttacttcttccaaacctgatgcttcccagcccatgccggaactctcgtacttcacgtctgatgatgaagaggctcaagtcgttcagcagacaaaaaacacgacaggtcggattgaacttatatgcgcggcaaataaatccagacggttcatctggccggtcagaacgattaataatactgtcagactaggtaagcaatgagttccctcggctcaatgatttggggctgatatcagtcacaatttcgctaacaatggagagcattggtccgatcgagcgactagcttgcctatggaaagtgctaagtctgatctatgaggcgttggaagaagacatcatcgttacgaagaggtgggcgcatgccttttcgtactatatttgggttattatctaagctgcatacctctcacttgaaaccagggatatctactacaaggatcccaagcttttcactagccagcagaaagtcaatatggtaagatagaaagaagattataacttggcatctttttcgttgagagcacgttagttaatcgaacatcgtctggacgaccaacattgtttctgggccgaagatcgtgaacgatcttgtagtctcgtcaaacttcaagaggtccgacttcaacgtagtccgttctcttcgcttacgtgtccagagactaagcctgttgagatttaaccccttcctctcgtgccttcatgctgttttcgcctgttgattcaaacagcgcgcatctccgaaaggcctttttgcctcatctgtacttctcatccacttccatgaacaagttcctgtccaaagtgtgtttcagtcgacattaattccccctgtagagactatatcgtccatacagttcaacagtaaagtagaagacggcgagataggtcttcttcagggcccgagtggggtcaagggtccaaaatggattctagtcatagagaaagatgtaggtttcaatctgatacaaaacattcagctgttttagaagctgactagctgaggttatattttcgtgggcgcttgaattttcgcaggccatattccagagtctttgttccgttcgttttggactagaccaaggaggggtcatgatcacggtctgtatgcatctgtgttatgtcatcttaagtgctgtcctaacgttcatcctgttttgtagggcaaaggctacccagatcatacaacccaagagtttctgtgcttactttcgcgtaactttcctcggtaagcatcgtacatgtcttttcgaacttttagatatcaactgatcagatcgaggtcacccgtccaaactcgggctgaatttatatcaatagtacgccaatcgctgttttggtcgacggagatcccgatgggattgaaatcctctcagtttataagtttggttcgcaatcgcaggtaggctaacaatctcatgcgcacattatcttgacaaaaggaatgactcactctttgccgttgacatgatcggagtgtagccgaagctggctgtgcctagggttgagtggcttggagtgaaggcgcgtgaatggagcaggtgaactctcgctttatttctccactctctcttagatcaacgatgacagtgtaagtaacttgtaatgatcttcaattaagttcaggctgaacatcgactacgagcaacttattccattgacacctcgagatgtcactaaggtttgtgtctaatatctccgatttgtttaaggatttttgaccggatgcattgacccgatcgggttcttttgcacgctttctactatattaattaaatctgaacaaatcatcgtagacattcaaaatgattggacgatcgacgacaaggatgccgaaggaatggaagtaagtttttcttgtcattccccgaagcattctttgttgtttcagcctcagctttggtaatcgtcatcttcttcggtgaaatttaaatgacgttctcttggtcatcttagacaagaactcgcgtgcatgcttcatctacggtgtaaagcagagattcaactcttgaccgcaccccctgtctcccacagcggtgtcgcctcttccagcgagagatcaactgaccacagcgcatgccgagacatctggtcgacacccgttcatgaaaattcaacgaattttgcagggcaacaagaacatgtacatagaagaactggaggtatcaataggctggtggcctatctgcaggaaagactcgacgagctgggaccagtcgaatgtgaaggataagattgaatggatgtgaattggcacaatgaaggggagggaagaaaaacagaaaccaatcagggtaattatacgatgaacgaaatatgcagtcttcgttcaagaagcgatttgatattctcgacttgattttattcgttctgccaagacctggaacgttgagttgatctcagctagatactctgctgtgttttcgtcccgcatgtttccttgaagaaatccatattgaatagatggattgttatctcttctgcaacgataaatagcatgtcttagggctgaggaacgaaaaagacagcaacatacctaagtgtacttccatatcaaattgaggttcaaataaacagtagtcttcatcatgcgtgaaagcatcatcttgaatcagtgtatccgcagacaagcatctgcctaaggccgctgcggtacacgaggcgtaggctctagctgcatttgcatggttgtatccacctacagatcacagggttaagagaggaggagaaaacagcaagaaatcaaaggcttataatctttttcctgggcggttgacgatatgagattggaagactaaccacctcctaggagaacgataggaatgttccaatcaagggcccgatcaacacaccacgtaagacctccttcctccttcaagcctagattccaaacgcctttgggatcgccttttgaaagaaacaggagaaaagtgttcaatccaattaatcttctaacgctttgggcagagcaaaacgaagtagggaagacacatacctgccaaaccatccactccgacgcagacaaccacatagtccggttcccacgcttttttgataggttctatacttccctcccacacggacttcatcgaccatccagatgctccagctttcaacggaatggatagcgtatgtggactctttgtgtctggctgagtcaaggcagagagcggaccaggaggaaagaatcctggggaggcatgatgaactgataatgttaccactgcaggaggtctagaccgcgcggaagagaaggtttgaaaggcttgcgcaggaccatcgccgtgatggatatcgaggtcaaggtagaggattctgggtttcctcgtccgtgtgggtgcttgttcaggctcagggaagtttgtcaaagggaggaaagtgggcttgggcggttgaacaggaagaccttgagaagctaaagagagaatgcaaagaacaggatcatttacataacagaatcctgcaggtaacgaaaagttggtgtgagtgttcgtgatcccgaatcttatggagaggagaagagaaaaaatcgaagacaaaccagaagccccgcttctcagcgcatgatgtctgcctccgtcccaacagattcccacgtccgcccgaccgtcagcgacttctttgacggctgcaagactggctccagcaacctggagcacatattggtcgagatttttgaaaggaggcgagtcatctgtcaaattgaacttttccaatcgacggatttttcgggacggtgggttaggtttctggcgtttggtagctggaggggagtcggatgaggacgatgataattcgccttcagagtctgattgatcatctatttcaaaatggccgttgccagttgtgttgaaactcaacaaagcatctgattttgagagcatacacaaaccaaggtcaaacaagatgtccagaccggttgggctcatgcgacacgtattacttcgatcaacttgccgacataatccaagtcatgagctcttcctatctctctccttccgatcttgagaggacgaactatcttcgcttttctgatcacaagggattttctaaccataacctgatctcctccaatatcagcttcgtcatcactttgcccatcgctcttgtcctcatccaagaggcctatcgaagtgattagctgatggaggattctcgacctgttagggttagagggcagttgggacgaaacatgggccaaggtatccgaatatacataggctactctgagttgaacaggcgaggaggatggcaggtctcccgacatgaaacttgttgagcaattggatggtgttttataatgatgaggccaagcttgaaatgttggtcgatgagatgatcaaacaatggacgcgtctgtatctggctgtgcgacgcgtgttgatttatcgtaaatgtggacctaaataacgatgatggtcatcttctctttcgaaccagcatcgccaagacatcgatacaacatatctatgatgattgagatcatgttgaaggtactgaataggcctaacatgaacaatgatcttcgttcttgattgagtggttagaactgaatgaaaataaccgaaaagtttacagtacagcgtctgcagccttgtctgttgtccgaaaggtcggtcgagctcctccttatgaagtattgagcccaccatgagcacaaaggagatcaatgtttcagagggaagaaacaatgtctatttggttcgtaggcttgacttttctcgttgtatatgcttattagagtacaaaataaagattaagctaacaagggcgctcccgggagatcttgcgttgtacacaactccaaaatgaatagatggggtctttataaaaagtttgtttctgttttgtgtctgtttttctagccacgcgtctctctttctctcctaactctagaaccgaacaggatggggtgcttaagaaaaccaaaagactacaatcctctcgtatactttagattgaacgtcgaaaagtgggacgactggccttgcatgtttgtttctttgaacatttatattgtccgcttgattacacccggtctgtaaatgtatatgatgaaggtcgctctgatcttcaatacggcaacgctgataacttatgttagcggggagggaaggctgtcccattgaccaagacacccgcgccggaagagataaacttcggcttcttttttctttctttcttcttgtgttttctatcttctgtccatgtccctcgaaagtcggtatgcttatttgttctcggtatatgtcagatcctgtcagatacccgttcgtttgaattgactgagcagaatgattcaacctgatctcgttgtctcttgctttgctgaacatatgtttcgtctatctgttaaaatcctttgcctctggacttttcttgcccgtttgtgtcgccctgccacttttcttcatttacgcctacacaagtcttactagaacgaagttgtttctgaacggatccgatcatagtggtctccatcgaggcttacgattcgcgagagagaatagagagacaaagtaagacgaggcttggaaaagcctttttgaaaagaattgatggccaagtctcgaatgttgtgttgttatttatcttgctctcttctctgtctccacttcttctctagccggatgtcacgattggaaatttgtacaaatcatcttcttatacatttcgttttgcgtgatcacttagagcgtgtaatcgtggttggatctagattgacaactgcgttagctctgccgttgagcatttgaagggtggttcggcagagggatgggagcctatatggccaataccttgtcttctacagccgcttccgagacaaacaaagtggccgtgatcggcgtgaacctgacgaaaacaacgatgacagatctgcgttgttcgatatgaactgcggacgatcattttcgcccctttatttttcctctttcttccttgttttggatacacgcgcctcttcggctttagagcagagagtggcacagtaacaagggatcagacatcccacgagggactccagttggttcagcttcgcgacgttttctgtgtgggctcaagattgcccgattggccctcggttgaacatctaaaaattccccctcccgaccttcacgtcattctggcgatcggcccggatgtgtagatgacttgctatcgcgtctcttgttcggatggatctatgtgtcattttctgtcgagcgaacccagagtggcgctgtttcatccggtggagttctatcctactgtatttcatgtctactggatgtgaacactattgcaacggtgtatgagtatatctgtgtccttttcgatcttctattctttgatatctaattttgtcagagttttttttttttttttcaaggcgacctaggtggagtaacaagtgatcgaagaagaattaatattaacgaaatagaaaacggaaccagcgcgagaaaaagaaagggaagaaaacaggtaacatgaaaaatgccggtcagtgattatgtttccacgtgtcgatcaaacagattctccttgaaccggtcgcttgaataagagctagttctttgatcccgatctctgagaaaggtggtgaacgggtggagaagcagtcagccaggcagcggctgggcaggtactcaggtacagtatccctcgagcacccaagcacccgcatacccacatacccaggcactcaggttctcaggcacttaggtagtacaccacacttccagagtcaacctttccagagactcattcttccgctcaaagactcatctctcttttctcccctaaatccttctcgtgctctttgtttcctcttctttttgttccctcttcgttctttcccttctcgtcgtcctgctcttcttttagtctagttccatttgacactgtcttctccctatcggttcggctcaacaatccagctaccgaggcttcccctgagatataagaatacgaacgactggcacaaattccatttgtttcagaatcctccgtcttttatgtacatggggtgcacgctctcgatcgatctcgtctctctcttcctatcttcctcttgtacacccctgtagaatctgatagttcactatcaagtctcttcctctagacggccaaccatctcggaccacaacagaacagatctctcctcatctctccatctttttttttctttttcattttcacttcccatctctcttctcttgccctccccgttcttgatctcatccagccgcgcacctcaggatgtcccgggatccgtcgatggacatgcaggcgagtaaccacatgatgaagaacacaaaaaagggaagacccttcatacaggtctgttcttcttaactcgtcttcactgggagaggatccgagctcgatcctgttttgcttcttgatcaattgagagacgatagcaagaccaagttacctatttccttctcgtacagccctttctgacgtttcggtctcgttcaaatgaccaacaaaacataggacctccacgatctgttctccactctcatcgtttcccttaacctaggaactcaccgtcagtttttcaagcaataccataatgcgttcacaacgtacgtctttacttcttctttttcttcttcctcttcttctctcttgtcttttcttatcgtcaattcattctttctgacgatttctgaatattcttgctcgccatccctttccattattcttcatcgttatcatcatctcctatcgctctcgttcttctctcttgcgtttctccaacgcgttcacctctggcagagatggcgcctgtcaaaacttgtcgtcactcaaattcacccagtccagtcggtcggctgatccaaaggatcccaaccggatactcaccaccaccactaccaccacattcacgatgactcgggaactagcaaagggaatgtgccagcatttcatggacgcacatctgatcgaaaacgcagcggacccttcaagctcgaccttcaaggatagaggaatctacgtgtgtaccccaaaggggctccacatgtcagtccttctctagacacccctcttacgtcttacttggcttccttccactctcgcttctgctgacccatctgtttcccccatcatcttctgctcactagcctggaacgctttgtcgcaaagaatgggatcgctcaacaacagcgcctcaaggtgtttgcctcccagccgatatgcatgaagcttctccacctcgagcgaaaaccgtcggatgatgagctctgcacatcgaaagtggtggttgagatgctgtggagacggttcgctggtcgaaagccaaaccggatcgatccttctcaactcccctcttcttactccccctcctcctcgccctcatcatcagcatccactccgatctctaacgtccggcatacccgacaaaatcctccttcaggccagtcgaccgatatatttgatcaaacccatggcgccgctttccggaagcatcaagagaaggacaaaacaggcaagcttgaggtcgtgccgtatgcgattggtagttttcaagtcattggttggctactcgatcatactaccatggctcacaaggaagaagctatggaaatggccgcccgatttgtctggcttggtttcttagaactcatcagcgaaagaggcaaggtcaacaaagacatggctaccaagaccgtcgttcagggcaaagaagacggtccggtcaagtcatcaggcgagtttcgagcttctgagaaagcgatctacaaagtcaccgaacgaggcatgcaagccgcccgatggcccggttacggccgtgattcggttagccatcctttggtaactggttctcgatcggtagatacggaagaactgactcgagaagaacgaccgagtgtgaatcgagtactgttcggtcggtcaatcacggatcaaacacctttccgtcactctccttctccacatcaggttgaccagagtgaacttctatcacatacagacagcgctgagattgagcccagatcgtccccggaaggaggaggatctagcatgttcaaagagtcacacacgaccaaacttcagcagatcctggaggaaccatcgctcagaagtctcttcagagaatttcttcgctcatgtttttgtgaggaaaacctgagctattggttggatgttcaggagcttagaaaacggttttcgaccacttccagtgctgccgccgctgggcatgctcaaggacaaggccaaggaaagtcaaaggatgcggccaactctacgatggagagacatcagcaggaccttgtcgcggttgcactcaacatgtttgtttctcattcttccgtaactttttatcacgatttttgacaaccccttagaacggatgattgacgaatcgttgtccttgaaatcctacacaaatccaatagatataatacatatctcgccccacactctccttctgaacttaatattgatcataacctccgaggggatttggtgaactatgtatcgagaaacctacttgatcaagctgctatcgcctcgtccaatcttccttcaaccaacgccactggcatgcgagctttatcttcttcaccagactcaaaaccgaacgcaaccgcgaattcgaaaagagagaacgattcgatcgatccgagagcctatcagatggacgcaagcaatctacagtcgttgttgacagtgtacgaacagattcagagctacatattcagactcatggctacagattccgtcccaaaattctcaaaaagcgatctggtccgtccgaacatctcccgttttcctgcctctctaaaagaaacatctcaggggttgacatgctgactcttcttgttctatactcgtatgttgatagtttctctctagagggaaaccaccggtggaacggaaggttgactatgcgatcggaaaaccaatcctgcttggttcagcatacagtgttaacgagtctgccgatgaagaggacattcaagcaagagcatatcttacaatttctcaagtgagtttcgactgactttgttagaccaaactcaagccgagtactagggctgaacaatgtctcttattgaccggtgttgatgttctcctgctcgcttgaataggctgcgcgtgaaaagtatacaagttcaaaaagagcagcagcggcagcggcagctctctcttcttccccttctactgccccaagtttgccttcgactgtgtaacagtctggcattaccgacaattgcggagggctcgtgtctctgtatatcatctctacatctcatctccacttccttctctgtttctttttctgggatttggttttttcaccttcatgcctgcccctcttgtgtctttctattgtcgacttccacgatcaagaaccacgatcttcaatcaatgctttacttatccaccgcatctttttcaactctccttcattgccccttttgttttatcctctttcgttgtgttatttccgagctgtctttgctttctctttgtccggcactttcttcggccctcttccacctcctttatgtctcgatgccgctctaactatccacccatcagaaattctgatggcattttccccctcttctcttccatcttctccgtctttctatataagcatcaccgttgttgtctttcagccatcttgccaaagtcttactaccttatttgtttcccctttttcccttcctccctttcccataacctccttttcccaccaacaattatacaaagaaacgctcatccggagtggatccatatacacgttatatccccgttctctcttattccttcttttattccctatttaacgcctatatacatatgaaggttgctcatctgcgctctgacctcttttgcctggccgttctccttaaagattgtgtttggaaggaaagactgccttgagagaacgtacacgtgcatgcacttggacgtgctcaacacgcagggaacattacttagccctccacaaagtccggggagcacgaagagagcaagatctaacaaagatagagaacacacgagagacgatggacagcaagaaggacatctgtgtgatgtacgataggtcgagagattggacgagatggacagattgaatgagagtagaacataggttgaacaaacaaaggatcgggtttctattgccagggcaacttgattagacgaatcaactacagtttccatatgccggtgaaaagaagagatgcaaagaagaagggcagcctgtcgcatggtgatcacgaggtaagaacttatgtctgatgtgactttcagccgattcgaccttcgagcattgaaactcggtagcattctggacgttgatgcgccaaagccaaagtttgtgagaacttgtttttcttcgtacagatgctaatcgagaaaagaacgtatcaggcagttttacttataaccgtgtgcaatgatcttaatcgctcgacagttaaagacgttcaagatgttagcagaaagaaggggaaaatgaaggaaccgtttgaatatgagtttccttgttcgtgagttaatccgtggtagaagaacatttgtttccgtcgactttcactctatactaagtagatcgatgctcggcacatcgacagccatcaacaagatcacttttcctataatgcgctagagatccatcttgacccaagaggaaacgagggttagcatgttggatgtgatgtacacaggccctgttatcagatctagcccgaccgacagctgggtccgagtgaaatcttcgatgggtcaactgatgacaaacatcagccgagagaagaggcgacaacttgcgggtctgatacaaagagttacattttatctatcatgcgctctttagcaagttcttggtcctgatggcggctcggtttctggttttcaagaaagaaagcaacagatggataagactcgatgaatcttgttgattcgttacgcgcacgagcttcgggcttgcgctctttcttctctttctccttgatcgtgagatctcatgaaaagaaatgctctggagacgtacgcttttctaatggcccgtctctgttcattcgcttcccattcttgcccccggccatgaggaatcttgcctgcagcggccaacgccttgccctcgccgaccatggtccagagccaagacgggtactcttcgtctggcaacgcgaccggcacggcttgtgtcttgaacacgacgacttcaggcatgggagttccagccggagtggacgataccggtcggtaggtctgttgttcggacgtactggaggaaggtgtggaggactcagaggtcgaaggactggaagtggtggtggtgctctgggatcgacgaacgaggaaggaacctgggatcgaaatagaggggtttaacaggcagagcggtgtccgtctgatcgccggaattaaacgagagaggtttaaggacatgtcgggcgttctttggagactttgtgtgtaaccgactctgtatgttcttctgctttatctcagatggcgagggatgaaaaaggaacagtaagagccgatagattggtgagagttgacgaacagggaaacggaaaagaaagcagcgagagaaacattagagaaaagagggacgatcttgtagtcgaaccatcatgagagatcgtaatgaatggtccgaagaaattatcataggtgcttcgtagttcatcaatacgatcgctttgtagtctcttgtctatttactcggcaaatacaaatcagtcggctgtctgaatagagagttttgtagtctgtagcccgggtgaaaatcattaggaagcaaatctaatgggcactacgcggcccgtctattgaaaggcagcatttgagcctgacacgtaggtatgtgagcctgtgctagtctgatcacgtgatgttcaaagacactaatatctctctagttcctagggccggtagactagagaaaaatcgtagtgtgtgcggagttttaattgtaacgtgacagtgcctggatcgttgatgatttttttcctggcaggtcgacgttcgcacgtccgcacggaaatcgttggagacagcctcgcctttgtcctcgccatcctcaagatcaagcctatcgtacgtgtctgttttattatgtttcgtttcactgtcaaaggcagatcgaatgggtagctgttgtgcgtatgtgagtgtgtgtgatgtgtgcgagtttgcgggcaaaaccctcgtctctttttccttcgacaaagacgacttatcatcaaaaagggacatgaaaaacgacccaagttcttctcggaaaggaatcaacacaacgtttagaagggatggaggcctcaagcatgggagggtgaatggacggagagagctggacaaactaaaccaaagtcagaagagggaatgtaggaaaggttgagagaggagagattatagaaatccgcctggaaccctctacaactttttcctcgaccttgcaaacctgcttgcttcagaggaaaagggggaaagcttctccatcctcgatcacgctcgaaccaatcctatcctttgacacctcgtcttgccgaccgttcaacctagaaggaaaatttcaacggacaaaccaaccgaacagcaaactcgtatttccccgcatacacacacacacacacacacacacacacatatatacacacacacgccttgctttcgagagcttcaatcaatgtttcagagaactttccgaagaagactaacttcaactatttatctacacacttgaccggacacctctagatgggacgattcaccgaataccaagtcctcggacgaaagctccccactgaggctgagccctcccctaaggttggcccgcaaattcttcttaggattccttgttctttcaattgtcatattctgaacccacacacacccaacctatatattcccgtcgttttttctttccttttccccaactatagctcttccgaatgaggattttcgctcctaacgaggttgttgccaagtcccgattctggtacttccttcgacagctccacaaggtcaagaaggcctctggagagatcgtcgccgtcaacgtcatctccgagaagcgacctcttcaggtcaagaacttcggagtctggcttcgatacgactcccgatccggtacccacaagttagtttaggcttggtgtcgcatatgtatcagctatttcttcgtttcttgtactgatggtcattatcttttgattcacagcatgtacaaggagtaccgagatctctcccgaaccgactgcgtcgagtccctttaccaggacatggccgcccgacaccgagcccgattcagatcgatccacatccttcgagtcgctgagatcgagaagaaggaggacgtccgacgaccttacatcaagcagctcctcgagcccaagctccgattcccccttccccaccgacgacagacctccaagtcggtctttgccgccaagcgaccttccacctgggcttaaacaaagagtgttatctttttgcgctctttttgaaagtcgggattttccctttggttggacatgtgatcatgaaacttggacaaaagatatttggttactctggaagagcacacaagaaacaacccacagaaggagcgcatagcttggaacattctgacctggtcaaaaacgacagaacagacatagcactcatcggatcgagacaaacaaaaaaaacactaaaccatgatcaaaacgttgactgacaaaccagaagctggctgctcatgctcttctcacgaaagctgattgacgcttatcaatgccactaactcggctgtaccctggtgttttcaaccttgacgtttcttgttttgactttcatctcttttcgaaaagcagacgacgacctaactagttcttgctcgacttctgttcttgtcatccgcaactcgtgttcttctctacttacagtcggtattgtttcaacaaccactctgaaaggccgttctaccgtcggatgggacaggacgaaggagaacccccatccgggtatctatcctttaaatcgtgtgttcactcatacatcgtgaaacagttatacaacatgaattcgtacgatcgtgtatcccgttaaattagcaaggtaagcaccaagaagatgaaacaactgaacgcaatgcaatgcacaggtccagatgaggaagggtaagaaaggcaaattaaactagagggaaaggtagaacgaatacaacgcctagttccttcggacgtcggtcctcaactcgaagaacctccaatcatctgatcctctatgatcccatccccatctgactggtgtctctggctggatctggctgcagataggataaggcgagtcgaatagacctgcttgttgacctaggtctttcgtcgctcttctcacgacctcggttctgtcagtaggagagaatgaggtcggagaagggtgtcgatgggaagcaaagatgaggttgaaatcgacgtcgatggattgacaatcgatcgtaacttgatggccaaggaaagacgaataaatagctccaaccgtgaggatctcggttgatgaatcatcttcagaaggagaaaaggacagataagaggaaatggaggagggaatatgtggccaggtgaaagtatatgccgcaggaggcaatggaattgaaagtggggtcttagcgtaccgaacaacccggacggaaagagagatgcgttttggttgatatcagataggattttctctcataaaaaggaaaaggaagagaaagagtggacgaagtcactagagacgtacaggccaaacacaagtttcctttcctctcgtcatcaaacagagtcctctcatctctgaatctctattgaaccaaacttgttcgacccctcctatccatttgcttccacctccagatccagctccggaggtagtgctgatcccaacagaaccaagaacgctacctacaaatgctttcacgcttccccctcccgaggtgctatcgacgactacagacggagacgtcgagctcatttctgtcggcccttcagtggacgcgccgaatgatcgtcctctagctcggttctttcccttcacgctccaccgttccctggcggcttcccgttcatcagcgagagtttctctctgtgcacgaccatgtgacgtctgcgctgtcgatgtcgcgttggtagaaccgttcgaggtggtgatagtctttggaggggagggggacgcggacgacgtcggccaatcaagttcgatcaagtgggccgagtcgagatcgattaggtatgtctttccgcctgaaaagttgaacaatatcgctagagaactgatcgatgattcagccgaagatggagaggaaagagaagcgggtgatgcagatatatatgtgacgaatgatagtgcagagagtggttttggttgaggtggcagatagaattcctataagatccccatcccgcattcaaacggccaagtgtcagtcggactttgtctgatttcgtcagacatattaagagaagagcagagactcttaccctgaaaaatgcaagctcgagctcatctgttcttttgtacacacaggccgtccccttcccactgatagccactaaactctgtctctcggttgttccatcgttgtccacccaaacttcgatcaatcctggatcaaacattcccgccggtaggctcagcagctggaatggttttgcctgttggtctgatcctgtttcagatcctccttggctagaggtaccatttgtctccagtcctgctcgtccaggatagggtgaaacactttccgatcggggcggaaattcaggcacgtcgtcgctctgaacggtgaactcggagactttgtcatcgtggttgcgatgagaagactggatacggcgtttgatacttccagagatggaatggtgtatgtttaaaagtggaacgttggcatgttgagtgtgtagagcgccggcgagtgtccgcagaggttgaggaacggagagcgaaagcgaggaggtcgcagaggaggaggaagagggaatagatgatttaaacgatgaggatagagtggaggatgtagaaccaagcgggaaatcgaacggagttggcgagtcctaataccgtgtacccaggccaggctgtcagggcaagcgcggcaaagaaagagccgaaggaaaaagagtgaaagaattcttacaatcgatccagagatccacatggccatatcagtcaaatggtcccagtcccaaactcggacttcgcccttggcatcacctgctggactatggcagagcatgatgacctgatcccttcccaaagctttcatttgtctaacccctactccacaaaagacgcatctcgccggttcttctctcactggatcaaacacccagagtccttctttggtacctatcagtagaagagaggatgaagtggcgcccagaggaaagagacattggggtgcactagctgaagagggcagctgggagaggaatcttgattgtccaagaggtttatatactgcctgactgggagtcagaggaacaggagcgagtgaagaagtttgcgcagcttcgaatgaagaggaagaggcgacatgaccgaccgtagccgtggtcgtgatactttgaacggacggttggtttttaaggacatccgctgaagaagaatgctgtgacgagctttcgtggacttgagggtcggacgaaggtgccgaaggaggggagaagaaccctgcctcgatttctgcaggtagaagaggatccgagccactcctaggtagataattctagttggatttggtttccccagtaaagagacaaagagcagacacaatctttcagtttccatgagactgactggttcatagaagattgagcgaaagagaggagaatagatgaacgaacaccagcgccccatcccaagttgcttctccttctgttttctgccagttgatcctccaatgcatgttgctcatcaagatgcctctctccggcccttttctctctggtatgagcacgtaaaaagtatgaaacaggttcgcattgaatcagtagacaaaagctagacagaacaagtcgattctcacggtgatagactcacatccagcctttccatcttccgaatcgttgagaatctccgcttccttgcgacctctctgcctgttctctcagatggtcgtacgagggaagctctccgactatgtcgtctgttccctgttcgctatcgatcaagataccttgagtttctatggcatccaccgtgccctgttctgaagacgaggtgggctgtgcgatcgagccatccgttcgaggaggcaaggccggaggaatggcaggctgtgttatagctaactcaggtggcggaggaatctttcgcttcggattccgagtcggtcttcggggcgggagaggtggagcattactgaacgtagccggcagcggatctggatcaagtttgtgccaatgtggtgtggaagtcgagacatttcgcgggggaagcttcggtggagagacgatagaagacgggggaacagggagtggccgaagaggaatcgatggggaagcatggacaggaggagggggagcaggaggaggaagaggaggacgacccgaagacatgtgtacttgaggtagtgatcgttgagcaccaaaagatactcgaatgaaacccttgaggtttccagccacccttgacggacgacatgctttctatgtgcgcagggtggaaaggttgatgttgcgtgtgctgcttagctatgcctgccggtgctcactccgatctgcctctaccgctcttgctcggctcctcctctttctaagaactgcgagtcccaaggctggaacatctcatccaggatcaactccctcctcagatcgtatctctctcattctcttgcgctctctcttgagcgttccatcgtctctgggtgttgatgggattgtccgcttacgacatcacatctgccacgtgcgcgtcattccgcagcagctttccttcggactgcgcgcgaaagtgacatcagccggaatgttagaatttcaagaatacccggctacaaagtcaacggctcaatcacatccacacccgaccgggatctcatctatagggctcggcttgttctctggtttattctttcatgggtagtgtatcagatgatgatccgtctgtgcttggacagcagaaacaccagaaacatcggcggtcttcgcggctctcgagatacgatcaagaccattcagtacccacaatcaatcgatagtcagtgtgtctgttcgtgatgcccgccatcagcgctcatccctgctcatctattggtctcatttctgtctggtagcctggagaatagggagcgagagcacgaagacaattatgatggagctttgagtgaagacgaactccaggaggcaaaagaggaagaagtcaggagacaagaggatgaagaagaggatgacaaggatctcgtcaaaaaacggatgagaccttccagggagaaaaagacggatcaagtaagttcttctttttattggtctcttctttctttgagttatctgtctactcactttgattccgtcgctctccgtgtctcaccttgcttggtttggtttgcgtcgcaaaggtcaagaaacagaaggggattcgcacagtcaaggatcctacaactgggttcgcagttactatcaaagacgcgcatatgaaaggtcggcattccgcccacatgctctgcagtcaatatcatcagactgactcgaccggcgatcttctattctttttcctttctttctcttaccggccttgaacatgtaaccttctcatatattaaagactacccacgcccgtcgaaactgacatcaattcaacctccgccatccagggcagacacccatcactcccgcccatcacctaaccctgcacacccgaccaatatctctctcctcccgtatccttgcatgtcctctccggcactcgatcgtgtcacccaatatctcgactggttttcggtattcatcccgttttccctcgggttactctggattcttacatctcacactggtggctggcccgcttggacgttcaatacaatcgtgctatccatcatgggagcatcagggtggtatgccggacaagaggcaaaacagatggtggtaaaaggaagagccggcttgaacgaatttccgtcaagagaaaaaggggagtccttcataactccgttgcccgagagcaccgaatggcttaataggctagtcgctgcatgttggaaattgctcagctccggtttgtgtctcctccaatgacatatctgtctgtttcaacatagtaacagaccttggtttctttgcatcatgtattcatgcgcgcacgtccaactgcacagaactgttactgcctacagtttcggagattgaagatacaattatggaatctataccctttctagataattgccggttcggagacatcgatctcggtgagtagctatcactgatattcatcttcaagtcctctagtcttataccggctccggctgacaaatcacgtcaaatttattcaaggggatgttccgttaaggatacattccatcagaggtctatccgatacgccttctgacaaagcgtgtgtgctcgtgtttcctacgtatgcatttcatctgtgcacatttctaatccgacgatcattctttcctatcagatatccacgggatgattggataaacttgggcaacgctcagtacccattggccgaagcccaatccggagactatacaaacctggaggttgctttcgcctacagtggtagacagaagcaagagggagagctcagagtaaagaatattcaattcaccattgaatttgttactagagtaggttcttatacttaagggatgcggctcgagccatgaatgttactgatagcgttaggtctttgtcggtagtttttcaaaattttcagaattcctatccccatttggatcagactaaacagaatcgtaggaaaagctcgattccgaatgcagttcatcccaatatttccctacatccgaactgtggacatctgcatggtgcgccttcttgctcggtatcttcaactgttgacttcctttgacattgttgatctaaataaaataagattacatcccctctattctcatcattttctggttggcatattagatcggcgcaccagatgttgaccttgcggtatccctgacaaagtctcttcccaatatcctcgacctcccaatatgctccgcactgtttaatttaggagtaaacataggggcgagtacgctggcagccccaaggtcgatgaatttgaatatcaagaggatgttgaaccctggtgatttttcgtttcatgacatgtcatacaatcaactatctgattagatcagttgctgaagttacgactatcgatctgtgttcggatatatacctgatgctctgtcttatgaagctgctatccaggaagcgagagcattaggtgtattggtagtcacaattcatcacggagaatccctcagtgctcaagatcggaatgggctttccgatccttatatcatgtaagtccacctctactcatctttgattggcgactccgacgcttgctttggtctactgctgtcaaactgaccttgctgtgttgatatgcatgttcgtatacgggcaaacataaatcatagagtggcatttgccaagtttggtaaaccactgtattcaaccaggatcatactggaggagcttaacccggtgtttgaagagacttatttcctgttggtcaacccagatgatgtaaaagccgaagagtcgttaagtctctgtttgtgggattcagatagtcagccctcgtcctctcctttctctaacgccattccttatctaatttgtggctctccactaatctgcaatctcccctttctatgcttgcgatttagaattcaaatcggatgatctaatcggaagaggtatgcataactctcccaatcatcatcatctgtttaccaacctcgttacgtccgaatcatcacttatttgagacgtgtcttcctggcttcaacagtaaaccttcgcctcttggatataatgaagagtccaaacgtaatgcatgcccgggaagacgacttgatgggcttcgaaggcaagtccttcctctctcttctatgcagtgataacactgcaacatatagcggataccatagctcacctttgtaacaaatcaaatggacacatagacgcaaacgtcatgcaaggcaagcttcgttggtctgttggatattacgaacgagcgcaattattgaaatcgatggaaagacccgatgagcatccacccgcaccacagagaatgacactggtcgaaaaggagacgatgattccaggagagaaagccccgtttccagctgtaacacctccaccagtgcctgctcgctccacacgaacaccgtgagtcaaccccatctaccctcaagcgcacgtgttcttttatgttctatcatgaggataccgacactgaatctgaatgtatacataataggccgcatcctgattacaagtcgggtgttctgtcaatcatgttaaatcatatcaacggcgtccgaagaaaagaaaccgaagcctctgatgtgtgtccttcgattcttctcttccattgcagcgttgtggtagagcgctgatgttttgatgtttaaacagactgatctgacgccgcccagtccatatatcgaggtgtatatcaacggagaactaactgcaaagacgagagttcggcagttcacaaccatgcctttctatatggtccgttgggtatcatttgttggcccttcgcaaccttcttttggatgatttccagttgggttctcacacacataaattaacatgcttggttgttttcattcactgtacaggacttttcagaacattttgtgcgcgattggaagacatcggttgttcagttcgttgtcagggatgctgcttggtacgaacaagacccaatactaggcattgtggtcctaaaccttcaggatttgttcgagaagtctagtgagaccaccgagcttttccctgtacgtgtttcttctctgcccctcatctctttttgagcttacccgagaggatctgctgagcttggttcgatctgcatagatgcatgacggagagggatctggcagtaagtgtctacgatgtgctgttcttctcaaaaaaaattcccaggtatagtcctcacgattggttccttactctccatccaggtatacatgtctctctgcatttctctggattcaaaatggacctgcctgccaatctgtccgggttggaaaccggcagcgtctggttgtgctcccctattgttcttgacatctttccttctcatcaaggacttgtcaaagatcttaaattccttcggctagccacacatgatacgaccgaaaaactatccaagaaagaagctacggtggagggtacgaggataacgtgggacatagaatcgatccgattgccagtgttcaaccggttccagacgaacctctcatttcagttcttggaaagtcggagtttgggagtaggaaaaaagttaaatgggatttcctctctttggttgcaagagttggtggatagagaaacaaggcaagtcaggttgcctatcattattggagaaaacattgtccagcttcgacagaacgtgagttttcttgtcttctcctctcaaacgtggtcaaagatgactccgtactgacgacccggcatgttactgctcgttgagggaggaagtacttgaacgagttttgcgcgaaacatcatgagtatgagattgtcggttggttgagtacgaccgtccgatttgatcctggcttggacagggtatgttccatcgattctcctctttgtattttcttttttttctctcttttttgctttctctttttcaattaagaaaatcccccttgttgttcctaactgatggccttttcacgtcctcactggttgatggatttacattgacgtagcaacatgaaacgcaatgcaagacccaagctcaacgacatgcgtatgaggtttgggacaaactcttaagagccaattcgggagaagaaacgtcgataaattcgccctctagaaagattgctcgggtttgttcttctttccatcatcttttcttcttcgcttttgttttgatctattgacactcgaaacgattgaccgacggatcggatcggatcgatccatttgttgggtgagaaagtctgaaacaagagctcgtagagaaaaccgtgtgaggaaatctatggaaagcacccgatctggtcaaagaacacatgaggctcgcaagtcagtaccctcgctctactgttgttcttctgtgctgataaaccacgctgtgcttggactttgatgttggttagaccgatcgacaagttcatcgatagactaaagcacccaaggccctctaatcactagcatgagaactgcaacaagacggatgtttgcgcggcgcttcgctgccttctggtgactagatatacaacattgtatcaaaacatggattctgtatggtaaaataagggatagacaatgcttcgtaacttgatttttattcggtacctagcgaggtgaaggaattattttgttgtgtagaatatgaaagcgtaaaccagacaaacgcatgagaaagagagttgagatacagagggaaagaataggatgtcgtacaagaagactagttcacggcgaatttagaagttgctcttatgcgagctccgtatttatagaacacaaatgggagtggtctaaaattcaaagtaaggaaagatccgaagacgcacagaacaagataagctgaatttgtataaagccaagtttaaaacaaatagataaacagacagaaagacttacgctaacagggtcatgattccacccaacacacaaccagcacctacgattcctattcgatcatacatctgacttgcaaatagagggaatcctccagctagcgcacatctcataaaacagtttgcagacaaagctgatgctgcgaacggtcggtatgcgcttttaggtgaagagatcttattttagtttgggggttaaaatagagctacaaagagaagaaagggatcgacatactcgacgaggaaggtgaatacactagtgaagatcaaaacgagtccaaccccaaacggaatactgtatatacagaagaaaacagagacaggtcaacctagagtatctttatctctatcgatttgtaagactgatatgctcgtacctcattataataggaacgactacaaatgatccaaaaacgagaagaagtcagtctacatgtttgcaatccgagtgaaagagaagaaaccccagatacatactccaatgaacactcttgacggaagtaccagcgaacaagaaaagactgataggaacaaggatagcacctagcattccagagtagagccttgattccggtggtgcagaacccccatgggctgtttgatcccgtaagtacagcctagtcgtgagaggatacagaacaatcagatcgggcgatcgaagagagaagagagacgcgaaagagaaagaaaaagagaaataagatactaaccgtttccagataggtcctgtggcgctcgctccaagaattcctaatgcgataccgataaaactaagaccagactcctgctggctaaaatcatgaagctctccaaatacaataggaaacgagttgaactctaagtagagtactgcaagaagacaagaaacccagaggttgaggaggatcgccatgggttccatagtgttgagctctgaaaggaaaaggaaaacaagaataaaacgaaaaaggaaaagcaaacatttcagtattaagcgtaaagcgaggagaaaaataaaagtaaaaataaagaggcggaagtctagaatgcaactgactgaatgggatcaacacactcttgctcaatgaatgaatgaaacttttttcttctctttcagattgggcatagtacctgtcgtccccggtttgttttctgatccgggcggccttccatcggagaagcgtcgggccgtgtgtctccggtgcaaagattacgagagcaatgaattgtatgaatgaccactataaggtgtaaatttgacggatgtcgatgagcatttctcgagcaggaaacgccaaagcgcgagaagtacatacgatcataaccatatagtaagaccatcgccaggaagtgttttggttgatgaaacctcctatgaccggacccaggacgggtccaaagaatggactggtactataaactgccatcggggttcccagcttgttatttgggaacaagtcgctcacagttccacctgcgacactcaagaaggcagctccgacaaacccagagagaaatcggaagatgctagtggtattttaaagaggacgggtacaaggaaagactctcagggacgttctttgtagatggatgagatgacaccgacacacaaggaacacatacaaatgaacaggggcgttgttggcaaaagcgacaggaatgttaaacactgcatttgttgtgtattcgcgcgtcccggatttggtagacaaaatatatggtcagctgccttggtgttggatgaatgacagagtagaaagaagagaaacagagaacgaacgaaagaagcaaccaaacgctccgtagtaaactctgtttcggccttggaattctgatatcggaccaaggagcagcggacctaacctacgagaaacaggaacccaaacgcgcatattcactcagcagagaggtgggtagaggagataaaagaaaagacgagcaggagaagaaagttcaaacttacgctagaccgaacacaaacatagtaatactcaggattgcgacttctggggagagattcagatcccgttcgattccggcgtaggtggaggaccctatagagctcgtacaggtcctttgaaattgaagatgtgatagaaacaagccacatggacagactcgacagagagttagtagtgaagaaatctcgaacgactattgtgaacgattgagaaagacaagaaaggcatacacgcaagcagagctaccgctcacgatcaacacggccacccattttctccactgaggcaaattccatggatgatcggggtcgtcggtaccattaatttctactaggaacgggtccttcttgtcttctctttcattgttcgtaacatttagccttctatcgacggtgttcgtgggaggctgtttctccaagtcggataccatggtaggatttggaggagagccgggatatatgagctgtcgagatcgagagacatcgagtgtagtagatgagaccgaagaagacggggtgagtgagccgatacgagtgtccagctgaaattggcgttcgatcgtagtcataaggagagaccaggctttaattggcttgcgtgtgagttctctgataatggatgattctccgaggagagcgaaagtgacaaaggctgatgttaaaacagacttacctagctatgggtttagggtttatataactctctgttctccttcttctccttgtcgaccttgctgaagaaccaaaaaggagttctgtgagtcaacgagaagtaaaaacttcgattggacaaatacaaggatatggatgatcaagctgctactaaaaataagttggatgtatgattgatcagcgagccagtagaaaacccaacaaggaaggagtgtaggagccgaaagaagaggacctactgccgagttgaagcgaggaagtcagggagcaagcgagaacagatccgtctcctgttcttgatgaaacgtccagacgaccagctgctctttcagcacaacagaagaagaaatcctgatgtcggtattcattctaccccggccgagtcggtagtcccactcctccatcccccaaccgaccaacccatccctccgggccgccggaactgttcggagccaggctcccgactacagcggatcggctcggtctcttgctgacggtgatgccgagacgaatcggccccaggtgcccccaaatttgcccataatttccgtctcgcgtgtcacctgtgaggattatgccctgaatatcacatgcctgtaaactgtgactggtagtgtcaggtgttgagattcaggcctggaagggtaacggaaggtcacagcaatcgtaaccaggttgagaaggtggatagacaagagagaggtcataatctcgctgaaatactgtgcaaccaagaagacgatgcagggatcatttggagttgggcacaagattgtgaatcacaaggtacagggaataacaaaggatccaggcttgggagaatatgtaatgggtggcaaaggaaacctgtcttatatgtcatcctcaatatacaacagtgatgcataaatgaacagaaattagggtatgctagaaaacacctgcgcccgaaggatgtacacttgcaggtcaacgcatttataacagtaggagaaatagagaaggagctgaagagacgagacagtcgaaggttacagaaacgtaacgcttaggttacgtttctgtgatcgatgatatgtgactcacgtgcgtgtacacaaccctaacaatttcggtcctcgccggtttttgactcgacttttctttttttcttctttttttcccctccgataaagcgacaacagaaaagatagagagaagccactcactcactcgctcatccagccagctagacaacatgtcgtccccaacacaagtcctcgatatagaggcactccctgcatcacgtccgatcacgccttcagtcaatgaggagaaaaaagcgctaccatcagatcgacgccactcgatggacgatgaagaagaggaggacgaggacgaggacggttacccgatcggcaaaacaggctacagtatagaacaacaggccacccattgggattccaaatggggcgcactcggtaaagtgtttgcctttctaatcagacatggttgtgaggctagaggaatccaaccggtagctctccaggtgggtcttaatctttctctttcttcttcgacctcgcttgcgtttggtcttgaaaaatcctgacctgaacgggtttttttaggaccgagagaaagtgactccgttgagttatcttatccagaccaccgtacgtgttcccatgtggtttctctctttctttctctcgtgtttctctcgttgccagctacacgtttatgacagctcatatctttctttccttctgaagctctttgctacattgaacgccaacattctcactatctcggccggtgttcttgggccagaactcttcaacctgcctctcaaaagttgtgttgctaccatcctcgtcttcaatgcaatcgccgtccttcctgtcgcctatttgtgagttttgtctccgagacttctcttcccatcatcttgacgcgtgcatctgctggtctcgatttaattccgttggccttcactttagcgcgacgtttggtcccaaattaggactccgtcagatggttctctctagatacacctttggaaggtggccaaacctcgtaccagcagtccttaatgtttgcaccgctgttggtttcctctctctcacttctatcctcggtggccagctcctaagtctagccagtggcggaactctcagctggagtctaggaatcgtcctcgtcggtttgatcggaatccttgttagtctcttctcttgctcttttgtgtgtgccctattcaagtcaagtacaactaactgagatccttctgctttcgattttcctagccctcgttcctcggtcttcgagcaatccatctctactccctctctattctaccgatctctctcatcatccacatcgctatcgtcggtctctccgccccctcacttgcttatgtgtctgaaggagaacgtgttatgaatgcgactaccaccgccggttctgtgctcggctttggttccactatcattggtttcgccgcgacctacgcgtcgttcgcttcagacttcaccacctatcttcctcccaatacgtccgctcccatcctcgcaagttgtgtctggatcggcctttttgccccacttgtcctccttcagatcctcggtgcagcgttctatcttgtcgccatggctctgcccagctgggaccaagcactcgaagcgaatggagtcgctggtctggtagcagccgctgtgggaagtggtgcaggtgggaaatgtctactagtgctatcggcgttgattgtgaccggtaacggaagctgtacagtctacagtatcggtctaagtgctcaggcggctgctccctggttgatgcttagttcgtctttctctcttctttgtctgtgcatgtatatgtgcgccagatctgaacatctctctttttctgaccaatcagttcccagatacttcttggccttgcttgtcacgttcgtctatgtcccgatcgctttggctctgtcatcccacttctcgagctatcttagcaacttcctctacatcctttcctagtcagtccctctttcttcccgcttcttgcctacatatcctcttgttccgattgagtctgatacatcctgtcctttccttatctatagttggatctcgttgtacgtggctcctctagcgtgggagaacattctattccggaacccgatcactgtcggtcaaggagggacatacgatttgaccggttggtcggacaagaaaaagttgcctataggttatgcagcgatcgccagttgggtcgtcggcgtaccggctgtcacagctggaatttctcaactctggtgggtcggttgggcggcggcgaggatcgaaggtggaaagggtgacatcggcttcatcctgggcttctcggcctgttcccttgtgtttatccctgcgaggtatgttttcttctctttcgctgtccttttttttcggagcaagaaagacactgacgtggtatacatttggctgattcgcgcattcataggtacatagaaagacgatacatcggtcgttaacttatttcctctttcttctctctttctctgtttctcatttgagttggattcggggaagaacaaattgaacggaacgaggtttcctggacgagtcttgatcccttcttgccattatccttcttcttcgctttctgctgtttcttccttctcttgctttctctgttcttcatccttttcttattttcgctctgggttctttgttcttccatcttttcttcgacctttcgatctcgatttcaacatatcaaccttaaaagtaaattattaatgatctaaacatctcctactctgtcatcacacctcttctgttctctgatatctttgttctgtggtcttcttcctccttttctttttcttctcttcaccttcttatctctcggcttgtctcacgccaaggagacggaacgcggggcgatagaaatcctttctgttggcaaaagtcagaagggacatatagatgaagagtgcagcaagtatagcaagtgtagcaagtgtagcaatcagaggtagatgggcattgactcaaaagaaagaagaaaaaaaaaagaagacgaaaccgaatgagaagcgagtagagattaggataggacggatagatgcaaacacatagagaagacaaagactgaggtagagacaatggtgaatggagtgggaagactatagtgagtactaaatgagtcaacagttacgaacgattaatactcgtcagttgatagtcgataatttagtacctaagatttaaaagaaaagacgggcagaaggtcgaaagattgggcatgtgtgtcctcgctctcaagaagaataagagaggaggagggaaaagatacgaatacgaatccaaatgaggaagaaaagacatctaaaggtgaaataattgacatgaaagaatagaaagactatgggcagagagaattgaaggaaagatcagaagatacatatgtctccttgtttgattgaatggataattacagaaaccggacccaagggattggaatcaaagaaaccaatgaatcaaaagaaataagcacccatgaagaaagagacgaacaggaacagaaacaagaaggagagcagtagaaaaaggatgggaacagaagccagaatgtgattacgttagtgatggaggaaggagatcactataatggtccatcagttcggtaatcgatttgtccttcacaagctcgattttcggattgttaatctgaacgatcccctcaaaaattaatgatatgagctccggaagcaatttaaaccatcaaaaaaagagaaaggtgccaaagcagatgaagaaaacgtacggtggcctccaagtctcctctacctctacatagtgcaacccacaaggacgcttggaagctcgcctggtaggcacaatcatcctcaggatcggttgaggcgttagcgtacgcctgatgcatgttgtatatacagtccagctgttgttttccggcaaggatgtatgcaatgagaaaggataagagaaacatcaaaaggtcattggagatggatgataaaacgatactgaccacttcattctcgtacgcttcaggcaatcgggtaaagttctgatacacaatacggaaggagtcagcccgctttagaagaaagaagagaaagaagaagaagaagaagaagaagaagaagaaaggaataaaaaaggcgtactctcgcaagccaaacacaagtgcccatcaaaccggtgttgacgcaaccatgagaacagatcaacagatccttcatctctgtacacacgaacgccaacacgcccaatgcagactggatacattgtgtgaaagcgacgatgctctcgtttgagtttgaaactacagaacgtttactgctactcccattgctttgatgggacgaagtactttcccccagggacgatggagtaagtgcgttgtgtgatgtcgattcaggcttcaaagggaactcggcgagctcgattcctagagatatacagtcgatctcaaaggcgatcattctaaagatcgaaacaaagataacacatagaggagtcagcattcggctaagaacgaaagaagaaaagagaaggacttacagagaatagtatgtgaccatgattgaactcttcttcgtcagaggagtgttgattcggctggctgtaaataccccgaataaggtcagagaagaagactcagtggtcaacatcaatctactcaagtaacaagagaagaagcgcaaacgatcaacttactaaagtaacctctatcccacttcgtcttccagctcttcagcttgtcctttgcaaaagaaatcagcaactttctagccgccgtctctgtcgtactcttgagacaagcaaagtcaaggaagacctcgataagctggaagataatggcggcgtaaccatctgctgcacaaggtagatgcgcatgatcgagtggccagtccgcccaattcttgaactcgagcggtcgaacgaggccggaacatctgttatcgtccgagaggcaagagaaatacaccctgacgatcagtctgtgattgaaaagcaaagaggagagggagagaagggagaaggcagggaaagacacatacatagaggcctggagttccaagatgttgttatagcatatcaaggacaaccatgtcctttctcgatcctaaagggaacaagagagcactcgagatcagtttttatcagcgactcgagagaggggacgtctgtactgaagtagagaaatccttataatcgtagaaaggagaaagactaaccaggataagtctggcttcaaattcatcttctggcaacggtcggacatgagggccgtccagaccgagttcatatgccagttggatggctaatcatcaatcaaagagacagggcactgtttcagtatgactgagctctgcaaatgatcgaattatgaagaaaagaaggaatttaccatatccctgtgaatcaccattccaggttggagagacaagccacaatttaaggtatcaaacactactcagatggaaagaggatagaaaaaaggcataaagaaattcaaaagacatactatgaatctccacatgccaaacccgtggacgtccctatagaaacttccgatgcagagcgcctgaacgaacccaatctccctgactcctctggcaaaggcgattcctaaatctctctcgagcgcaagcgagagtgctgggtagagctctggcatgtataccttcgagacaacggtgaggatagtggtaaacaggatgggggacgacgcgtgtgtgaacacagcggtgtgtagcgatgggtcgaggagagcgatgagagaagtcatgttggcatgatacctaccaaggtgccaaggtatgaaaaggaaaggatcagtacacatacgtggtcatgatatactgagactcctgcgggaataggagaaagcatgagacacaagctcaaaaggaactaacgtgtcaaacaaccagacgacaacatcccaactgaccaaaccttcctcccaaggcgttctccaccctttagtgtttcccttcttctctctctccctcgcaatatctctgtgcagctttctcgatcctttaaccctaagggcggccatgcctgcaggcatggtcgaccgaggtggttccacatttagactcgtcgagtcccagatcatccttcgtttcgcgggcggtctggcttcagaatacgtgtcgttcacgttcccattagcgtatccgttaaggtgaccgttgtggattccgttcccgttactaattccattcgtctttgcatcctcattcatagaatcatcaacagcctccttcttgaattctctccatgttctgttggggttgtcatttccgttcccgttcccgtttccggttccatttaagttcgcagtcatattcccgtttgttggaccatcagagttcccacccgacggcgagctcggtaggatttttcgtttcgtactggatctatcggattcaaaggcggaaggtgacgggacggattgggctgacggcatgaacgtgccgttcttcgcaaacggcagcgactgatgagcctgattggttgactggtatatctggtcttgctgtgtggacgatggttggggatggggaagttgatgtgatgaagtgtactgagatcgagattgagacggcggccgagattgagaaggtggtggaaagtacgagctggaaggtgaatttgaagtcgagcgggtggagcctatcaatgtccacgattcttttgatgccccagatctgccggtcggaggaggagggaaatatcgatttgagctttggtttgagtatacgtgttcctgagtagacgagccggctggttctggtacactgccttgtggcgtgggcggtggatatgagatcgggccgactgttgaagtcatactgggagagcacttgtctgatgggaagagttgctgtggcatcgtttgatgatggttaggaaacgggggaggttggtgttggtgtattggctgctgttggttgtacggataatggaacgaaggaccagaaggagctggcatggacgggtcgagcgatgagggataaaaaccgtacatgttattcccatcttgatgtgtcgaagggtatccttgtagtggctgttgctgcccgtgagtggccgtattcggctgagtagaaatctgtgaagacaccggaaacttccatccgttcacgttcatcgacgaaggatacactgctcccatattatcctgacggttggtggaatgttgttgttgctgccggtcgagatcatgccgagggtaaagtccggccgagaacggatcagctgtagggggaggaaagaaatgggcaacgttcgcctcgactacctggggtggaggaaaggtggatgcggatggaaagtactcgtccctgggatactcatccgggcgagaagccgatggataatgtattggtggtggagttgatgaggatgagggttcgttgggaaacgacttgagagaatttaagtttggctcagggagcaggacatcttcattggaaggcacatctgactttgatctgtttgatctgggagtgaagacggaagcggaagcgggggtgacggatgaagaaggcgcgtaagcgaatgatgctcgaggcgttctatcggtataaacagaacaaggaaaggcaatgacggatcaagattggagaaaaaagaaagtaacctacatgtttctcagtccgggcttcctccctcgtttcttttggaaaaagacgcattcaagtttgagtttgatgcaccgggtgcagaccttggttgtcgaatcggacgcggatgaatcgaggtgacatttgatctgttgattccgtgtggacgcagggtttcaacggtaagaggaaagagagaaaagaaagaaaaggatgaggcaagaacgaggcgagagaagaagcgagaggtgagaccattgaaaacgacagaaagagaaggcgaaagagagagaggcctaccttcgcgactctgcaggctacacatgcttccggctgcggtgctttcgtcgtattcttcgccgatagcggggatggattgatcgacatggatctgtgttgacaatgagcgtatgtgtgtatgtgtgtgtacgtgtgtgtacgtgtgtgtacgtgtgagtacgtgtgagtacgtgtatatgttggcaagagtcagagtcaaagcgaaggagtggacagaaggtgaattcactggccgataaacgatggcactgatttgggtggggtgtaaccttggatgtatgtgtggctgtgtttggtaaccatgttcgtgcaaacacggcgaaacccatcaacgttcatgggtcatcgggcctatcctgtcgctcatctgttctgatttgctttgttcgtcgttagtcctctcccccgcttctcttctttttgttccttgccctcttcctctctttcatacctcctgtcgacaacacatctcctcctcaatcgttcaccatcagtagccgatttatcgaaaatttggaagaagagtgagaggattagaatatcaagatgatacaagcatggactctatcggccgtctgcaatttggaaaaatccatcgactacgccatcggcacggaaataaattctaaaatgtcgaggggcatttgacttcctcgacccggagaaaaggaactcgtgctttatgaaaatctgcgcagcgaaatttgacacttggcgagaattttcacgtgactgccgttggtacagctttccccgtgctcttcctccacacaccccatacagtcttgtacgcacacccccttcaccgccctcactcgctcgtccgatttctagcagaaagctaagtcgaaccgctcgaagagggtttttgcaaagagaaagtgcaagagcaagtccttcttctcttgagaacacatacatccaagcatacatctatacgagaacacaaggacttccatcgcgctctccttgatccttgtctttcccttaaaagtcaattctgtcggaagatcacacgatcataacacttccgtcatccacatcactcatcctttcgatagtctcacaacacatcatgcaagcgtacgtccgtcgtcactccctattttctttctgctcatatctgttccatgagccagaacttatggatagaatgttcctgctcaatcatcagcagttcatccacaaggcaacgcagaagacagttggacatgccatcaaccatcatcagatcggccccggcttcatcctcgttctcttccgcctcttcgctctctcaatcaccttcgtccctcccctctcgaaaatctcgaccatcccgctcctcattcaactcgacatcttcctcttcctcctcatcatccgtgactgctcacccacctgaatcatcggatcatgggtcaaaggacgatcccagatgggcaaagtcgtcttcagcccagatccaacacgcccgtcaacaacaaacgttcgcctcttcgtccggactgaatactaatcactcgaaccgggatctcgcttcagatgaagagtactctgaccacgacgaaagtgaaagcgacaccggaagagatcgatcggccaattaccacgatctccaagatgatgacaatgacgccaacaatgatgatctgatgtcagacccagagccaggtgcctttaacgaggtctcccaactgggaacaactcactatctcccactcgtatttgtcgctcttcctttgatcggcggagctcttgtcgggaaagcagattggtggagggatgtgttagtactcgttgttgtcgtttggtggatgtggttcctgatcaagagtgagtttgcgcttcagcctattgtcctcgcaagcaaaacttgagaaagatgttgaaaattattatctctgttttttcttccttttctcttcttctctctcttcccggatgtctcttctctcctcagcgccttgggaactctatcatgaatctctacatcactctcttctcatccaacacgagcccttgacggacatgaccgaggcggacagctcaacttaccttcttgcacagacatctcttggtcgactcaacaacttctaccttctcctcaccctactcgctcccgctttaggatccatcctgcttcatatgacaaggtccgcgttaaccgaaggcgaccagtacatcaattcattcaacatcagactcttcctcctcgcctcttccgtcaagccggtcttgaactttgtcgatattctcaaaaaccggaaccacgctctcaagaatgccctagggaagatcaaaccgaccgaagccgacaagctcaacaagcgaatcaaacagttagagacactcgtcagagatctcgaacatgaaaaggccggtaccaaggacgtcgccgagttgagggcagcgctagtcgacggaacgctcggtgacttgaacaaggctgtcaagaggcaggaaagaagaggcgagctcgtcaggctaacccttggagaagttagtgcctttactgttctctctcactctctctctttccttggaatcgaaaatagagctttccgatgttgatgcatgtatgcgtgtcctgactacgtccttctttcgttcttcttgcatcacgatagagagtcgaccttctctcggcctcgttggcttccgtacagaacgaactagcacaggtccaagctcaacggtcatctctctcttggcttcttcgtttacttcatctttcgtcatcttcctcctcggccgcccgctatcaacacctgtattacaccgccgctccgaagaagcttcagaccgacaagcctcagggtcccctgagccacctagaccgggccgagaccgaattgactggtcgatctcttaagatgccaagaacggtgtctgctaagagacactcttatgccgtctacggagacaattttcaggcaggctcaccctcaaatgggttgcacacgcaagcacgaaaaggtttcgtgcggtttctctgggacctaagtgtcagttttcctttagcgatcgtcaaatggcctttcggaataaccagcaggttctttggcctcgtcggtggcatgttaggaacgggaggcaggaggagagatgagtaaggcaaccttcccgttgtactgttccctgttaatcatagtacgatgtttgtagcaagccccctcgtcctttttattcttctctaccctatctctgtatctttctgttctttccgattggtttatctctagttcccgtctctttcatctctatttacatgctgtctcgtcctgtgaggttgtacttgtccattaaccgtcttcagtatcttgatctatataaaatcatgtcttctcatctaccttcctcgcgtgttctcttgagctacagctatcgctcttcccgccacagaagtgcaccgctttttcaaaactttggacatgcgacttcaactttccgctgcatttctttcggtccttctctcctactcatcccctctattcttcagctcttctcgtaacaggtcggaaagatgcccaaggataacaagaagaccggaaaaggtcgtttgtgagtttttgctagacgttttctcaagcttcgctgcattttcatccgattaacggcttacatcttcttcctgtttgcctcaaaattctcttccctcttctcctttccctcgaaaactctgttacattcatatagggataagtactataagcttgcgaaagagcaaggataccgagctcgatccgctttcaagcttgtccagttgaacaaaaaatatgatcttctaggaaacgcaaaggtctgtatcgatctttgtgcggctcccggtggttggttgcaggtggcggctagatacatgcctgttggaagtttgattctcggtaagtgtcctttctctcctttgggatccctttctctttcagcatgcatcgctgtatgatagaattaggggaaatcgaggatgaaatcaggctgggccctctgaacgggctcttcatatcttgtctgtttgagttagctaactgggttcctccttctctgtgcttcgcttgactgttcgatatgggatcatacaaaaacgaaaaggtgtcgatcttgacccgatcaaacctcttccttcttgcacaacattcgtgtcggacatcacctctgcccactgtcgaacgacccttcggtcgcacatgcacgactggaaggccgatttagtccttcacgatggagctcccaacgtcggtaccgcctgggtccacgacgcgtacggtcaatccgaattggtgctcatgagtttgaaactcgcggtagagtttttgaagaagggtggaacgttcgtcaccaaggtcttcagatctggagattataacagtttgatgtgggtgtttgggcagttattcggaaaagtagaggcgaccaagcctccttcatccaggtgcgtatttcttccttaatctgtccgaccctcgtttttgataggttaggtgcaagggggaaaagactggatgttgattatcagagctttcctttcctttctctctctctcctcacagaaacgtgtctgcagagattttcgttgtctgccgagagttcctcgccccgaactacattgatcccaagttccttgatcctcgacacgtattcaaagacctcgcgtcttccatcgtatcctccgtgaccggtacatccgctggaaacgtcaacgccaacgtattcgccccagagaagaagcgaagacagcgagaaggttacgaggagggaaactatacccaattcaaggaggttggcgttagtgagtttatcaagagtcccgatccggtcgcagtattgggttcggtaaacaggatgactttccgagagccggaggagaaggcgtacgtttcccttgttttctcctatccatgctttcttctctccgtgtgtatattcctttttcgctttaaatgctgacaaactgaggttcgtttcgataactcttcagttggctcaaactcgagtgcactaccggagacgtcaaagcgaattgtgatgatcttaaagtgctcggcaaaggagatttcaagacgctcattaagtggcgactcgctctccgggaagaggtaccgccacgtttctttccctcatatttcagacttttctgtctgtacaattagcttacgatgatctgtgctctttctctctccttcacaaaagatcggaattgacgtcaagacgaagcctctcgaggacagcaccgagactgctgaggtcgaagaggtcgacgaggatgagcaaatcgacaacgaggtatgtttcttcattcttttaatcaaacggagacagtgaaagactaattcatcctgttcggttttcgtcattcttgattgtccgggacagctctcccggttgaacaccgaggctgctaagcgaacgaagcaacaacgacgaaaagcccaggagaaaaagatgcgagcggtgacgaggatgcaactccggatgacggcgcccaccgctgatggactcgagcttcaagacggtgctctccagggagaagagttcttcgatcttggtgaaggagagcgtgtcctccgaggggacgctagcgggagaggtgatctgggtgacgtgttggatgaagaaggcatgtctggatcggagagtgatcttgagaactctgccggtggggcggctcaagacgaagaggatgcctacttggattccgaggacgaaagagaggcaaagctcaagtctctcgagaacgagctcgacgggatgtatgacgactatcaacaacagatgcaatcaaaggatcacaaataccgcgcaaaggaggccaggcggaaggacaagcaccgagaatcctggaagggtatcgagggaccaaagtcggatgacgaggatgaggatgagggtgaagatgaggtcggtggctatgagaaccgggatgagaaccgagcgaagatcggtgaagaggccgatagttcggatgatgaggacgacatggaggttgatgatggagctgtcttagtcgcccggtccggctcgaacaagaagaagggaggtgctttgttgacttcgttgagcaacaagcaagaggagatctctggagccgctcgggtctggttcgatcagcctgcgtttaagggactggaggactttgatgacctcgacgaggatgaggaggatgaggaggacgaggaggaaagtgaagctgaggatagcgaagaggaggaggagagtagctccgaagaagaggaggaggaggaggaggaggaggtaagtctctaatcatatccgccattccggcttccgctcatccgcccttcatcctgatcacttggattttgtttttatcagatgtctggttctgatgatgacttcgagatcgtcccgcaagacaaggatgacgacgaagctggtctttgggatgttgaagatgaagatcaggacgagatcaagaagaagcgtgtccaaggtgtgtctttttggctttctctttggccatacttgcgactcacttgtcgttctcgcttttttttaaatcggatctctacagatcgaggtcttatcaccgccgaagcttacaccctggcttctcaactggtgaaccgggagaagacactgtctcaattgatcgacgatggtttcaacaagcacaccttcgattcgaaggatgatctcccgacttggttcttggacgacgaagccaagttctacaagtccaacgtgccgattaccaaggaggctgtcgaggctctcaaggcgaagcagcgagcacttgatgctcgaccgattagaaagatcgcagaagccaaggctcgaaagcagcgacgggcggtggccaggatggagaaggcgctcaagaaggctgatggaattgtcaagtaagtttcttctgtgctttcacctttgagtttttgaatgttaccgtttttaacaaaccatcactcttttctttcttttcaaccatctttgtagcaacgaggatgtcactgagagacagaaggccggtcagatcgagaaggtcatgcgcaaaggagctgcaaaggatcaacgtaaacccatggcggtcgttgtcgctcgaggagctaacaagggaattaaaggagtgagtttcttcctctgaacttgctttctgagtcctatatgtttcactatttctgacggttgttctgtgaatgtttttcttcttcccgctctaaacagcgtcccaagggtgtcaagggacgatacaagatgttggattctagggatcgaaaggagcttagggcaaagaagcgaaaggagaaggcaaacaagccccgaggaggccgaaagaagaagaatgcttagaactagttttttgacgaactcactccttcttcttctcctttcttcttcctgattacctttttggatgccaatcccttctttctctttcggtttctttgcggatagagctttatctttcttgccttgcctagtgtttcaaccctctgcgatcgctctcactcttcggttcttcctcttccattcttcttcccttttcccattcttcccgtttgtaatatgtacgtgctttatagaaaggaacacgtttgaagtttagaaatcttatggaattcattcaagcagactgtagaagaaccttgaatgtatccagaccaagtgtaatccctgggtatagccattcttacataatcgtcatgaacttaaccctaaccacaccgtcatcgatggtccctctcaacatctcgtccgtctggaagttgtagagtcaccttactcgatacccaaagatagttaacaaagccatcatgaagatcacatttacgaccgctcagaactcgtttctcctagaagtcccagccgacatgactgtaggcgatctcaaggcttttgtggaagtagaggttcgtttttgtttctcttctcctccttttttgtctatcaaataggtgaccaacggtggcgatggccatgacggtgacgaagatgatggttgtttaaggacgtgtttctaaagctaaccgattctcttctggcatctggttcgtccgtcagtcatctatctcttccttggaccaacggtggaaagtgaactctggagaggtaaatgcgttagatacaacgacgctcgataaacttggctgggaggaggatacgatggtctctctagagaagaagagttcaagctcagcgtgagatttctcatttatctctccgtatctacataaggtgttatgacatgttgaacagttcaattcaaaatcaacctggtatcatcagtcttcaacaaacccctgcagggccatcggctggactaacaaacacgaatgcattgactccccagcaaatggaatactttaagaaagtaggctgtctatctgagtgtgttcttgaattacgagggctgatatgacaggtaactgacactttgtgggttcttcttaatctttctttacgaaaccagatgatggcagctaaacaaaaagaagaaacgttgtatcgcaagttggaagcaaacccctgggatgtggaggtaagttcatgaccctcctttcttctctttcttattcgctagctgtacgtcgtggcccaccggcttatctgatttaaatctgttggcaacaaagtctcagaaacgtatcgaggaaatcatcaaccaaaaggcaattgaggaagcgtttgatcatgctatggaacatcaagttagttcaatcccactcgtcacttctcatgctatcatcatgttgaacgcaatcgacgttttgcctttctagccagagttctttgcacaggttgatatgctatatatcgatgtagaactcaacgggacgaaaatccaggcgttcgtcgatagtggtgcacaaatgacagtgatgtcgccggaatgcgctgagaggtgtgggatgtgagtgatcgtctcggataagaataacatacacgcatctcttgtagtagtagtactagtaaaaacttactctctccctctccttcacttgtctgacagtatgaggatggtcgacaaacgttttagcggggaggcccgaggcgtgggaaccgccaagatcctaggtgagtgttctgtcaggtcagcttgatctgatgtccgtaagtttcttttggaaagactgattgatgtagaatgattcatatcttgacggttgctaggccgggtgcatactgcgcagatgaagttcaagcatgtgtatcttccggtgtcgatcacagtgatggagggtaaggatgtggatctgttacttggattagatatgctccggaggcatcaagcggtgatcgatctatcgggtgggcactctatgctcaagattcaaggggtggagtaagttatcatcatcaaacactcttgctttcgcataaaacgctcctttgaccttcgacgtcttttctttccctccttagacttccattcttgtcagagcatgagttgcgcgggaacgcttccaaatgggctcgagaagccgaggagaagcgaggagagccgtcgtcatcgtccatagttgaatcaaaggatatggggcagagcgaacggttccctggatctggtagtacgatgtaagtaatccgctgaatctacttccttgcgaggtgtaccggagaagagatataaggactgaagtatctcggtcgattttgcgttttatctcgctagttcaaagcctccgtcatcgatcatcccccctaccggtccgggagtatctggatctggatccggccccggatctaccactgtttcagctggaaaaaaggcggacggagagttcccagagaattcgatcgaggtccttgtcggactaggagccagccgacaggaagctattggactactccggatgtgtaacggcgatatcgagttggccgcgagcagtttattctgagcagttctgcaggacgaggagaaaggcggagagaaggggagttgtttgaatgaaaatggatggatggagtaactcacgggggctggtcacgtgcgtgtgtgtatgtggtggaaacgaggaccgggcagtcagcactcacttcttctgttctttcttcttgctcatctgccggggctaaatccaaaaaaaagaaatagaattcttcttcccattatcgtcactctcatttccttctcgccctttttactccaccagtcgttattcaaaaagaagaaaaaaagagaggaataaacagtctggtgctcgactggcagatacacatataaggtcaaccctaaaggaacggagaaactcaagaagcaagaaggacgctcagagcagatcgattctcctccctccgtcgttgtcatcttccactctttcttttccatcgctttatatccttcctccttaccctccctagtttacatacgaaatggccgacacaagcgaagtacctgaggttaacgacgagtgttccccgactgagtggtcaaacagcaaggtcggactccgagtcggagctatcttcatcattctcgtcactagtatggtcggtgagtggtcaatatctcactgaacgagagacgaatacgttggctagtttttctgatgctgacctttctttcgcttgtttcactttgcctctctttcggttgtcttgtttcttcacaggtgttctcatgcctatcgtcgctcgaaagatcccggctatgcgagttcccaacagtaagaccatccaccactgccgttcttaacattggtactcatcatcttggcgcaatccattcttccttttgtttctcctctaggtgtctttgactttgctaagtacgctggatctggtaggtttttgtctattcttgccaatatcgctcttgtttcgccgtgcctaatttgtaacctccctccgatcaggtgtcatcatcgctaccgctttcatccatcttctcactcctgctttcgatgcactctcttcggaatgtctcaccggcgcatggactgtatacgttagtgtctcttggccatccttttttgatgtatttacatacctgaagttcacgaaactgatgatcacgtgtgaaattaaactacgcgtctccagccctggcctgcggcgatcgccatgttttcaatctttgctctattcttcctcgagttcttctcgttccgaattggtatggccaaactcgaggctctcggcctagaacatacctacaaccatcatggtcacgatattgaggaggccgaaggcgaggccggcgcacacaccttccatggagtcgagagtaaccttgaccgatccaaagagatttcgaaggcaaaaaaccacaaggacgatgacagcatagagagtgcggagcgacaaggaagcgtcttggcccagctcatgggtatcgccatcctcgaatttggagtcgtgttccactcgatattcattggtttaactctggccacagacgaacagttcactattctgtttatcgtcatcatcttccatcaaatgttcgagggtcttggtctcggttcccgacttgctttccttcctttgcccgagcgacttaactgggtgcctatcatgggtggtattatctatgcatttatcaccccaatcggtatggccatcgggttgggcgctcgatacagctatcaaagcaacgccaacggcgctctcatcgccaatggtatcctcgattcaatctctgccggtattcttctttggaccggtcttgtagagctcatggcccacgagttcttgttcaaccagtccatgttgaaggctagtaacgggaaggtcctctacgctttctcttgcatgatcctcggttgtggagtcatggctcttcttggtagatgggcttaagttctgtcgcgtcatgcttctcctcttgtttctttattgcctttcattctcctttccgactcctctccatcttgcagattaacctgtcacttttcaattgtttgttcctattgcctacatctcatatagacgtttttcctacttcttcatctcctctctaacttctatctgtatctgccgaatgattctaaaagttatataattcatgatcaaatattatacgtccatctaacataatcgtattcatgggatcgaaagaagagggcgtggaagcaaaaatgaagaaagattcaaaggggcacaagtctttcatgcacaggctccgaagtttcgttcagccgcgatgacgagctcttccagtttcccactcttctctgccatcccccggaacacgccatccggtttggctagaagtgctctaggtgtatcactttttatcgtattccaaacaaaccccggttccaatgtcaaagggaaaaaaaaagaaaaaaaagtcctcctggtcaaaagaacgtaaacgacaaaagaattacgaagtgacgaatcaggaacgtacaattcaacaattcggccgttatccaaaacgagtaacctagtgtagtcgataacggaggataatcggtgggcaatcgtcaacacggttgccgagcctaattcttctctgatcgtagcttgaattaagtcgtccgtttcctttttttccagaaggtagttttttcaggaagaaaggaaaaaaagtagaaaatagaataaaggaagacgaagacgttagtcagggcttctcggaatgtttttggtaagaagagaagggaacgcgccatgtcgacactagccgttgcctagaatccatttcaaaaagcaaggatatcagatcatgaaaggagaaagcatcacacgtaagacgaagcacggcactcacctcatccatgatgatcagattgtttcctctcaacaaagctctggccatcgctaccaactgcctttgaccgaccgagagattcaatcctccagcggccacgacggaatccaacgtgagaacgaatttcttcgattccggttgaaaaattgtcgtctcagattgggaaatggatgaaggtgtaggtgctcgagttgttagaccgctagatcgatcggatgttaggtgcactcggagaaggatgtcgtctgttacatccaattttaatacgaggcacaacatggttagagttcgttttatatctaaatcgagtggaagaccgctcagaagtggcatctcgtcttaccaagttcagagtcagtgtggttcgagaacggatccaggttttgccgtactaccgaggtttcatgagaattgatatgaatcatgagcatgctgggttgaaaccaagaacaaaatagaagactcacaagttcccgaaaacaggacagcgtctaagagatacgattcagaacgacagatgagcgacttgacaaagattaaaagcaagtaaagaatgtttgaacaaaccttgagggatatgtgatcttttctcgaagatctatacgtgttggtaccatatgccgatatatcttagatacacactcaacagccgtttgtgcacgtttgatttcgacataccttgaacacccatcttgcaaatatctagtccatcaattcgaattgtaccggctacggggtcacagaatctgagaagggagagcgccagagctgacatcgaaacatttgagtccatcagtgaggatcacagagatcatgttgaacgaagagagttattagaactgaacacttactgctctttccactacctgttcgtccaatgagtccgatcttctcgcctgcgttgatagagaccgtaacaccatgaaggacagagggaagttcaggtgcatatttcatctcgaggttctcaatcctggtcaccacgaagaaacgaatcaaaagagaaatacagatccacgcatggccgtatatcagagacggaacaacagaagatggaagaagaacataggaagcagtctggtaggcttactcgatgaagggcttggaagtggaggcagaaggccaataggccgggggtctgtggccctcaatctcgtatggtgcctcttgaggcagatggaggtctgtattttgagaagttgtgaaacctaatgagttggtttctttatgataaaggatctagggcgaaaaaactcacaggtatctattctctccaccgcgttgaatgccatctccaaattggtaaggtttcggcagaggaagaacaatgctctgatgaatccttgggtggcaaggatggccaaagcagaggatccggcggaggcagagtaaaaaagagcaaaaaacatggataggaaagtggcgatagctccaagcgtgtcgaatctgtattcccgaaaagtcaaatatgagattacaagcaacctaaggagccaagacggtccatgtactcaccgaaccataagccatcgatctataaagcagagaacatagggagatatcagttcagattacttcgtcgtcgtcgtcgatggacaataaaaactcactagtcatattattccagtagatcttggacatcaacttatcaacgttcttctcaaagccagacaaaaatctgctctctctatatatgtcgaagaaggaggaggatattagttccttatatgtaactgtgccagtaatcatgtctaagaatacgtacccagagaatgcccgcacagtgacaattccatctaggagctctccaaagtcggaaaagagtggactgggatcgactcaacctgtgtcagctccttcggatatactgttcatacaaaagataacgaaaagaacggaagcataccttctatttgtagacaccattcgagtaatatctcgtcgagtacgagtatacacaatggagacgaggtagtagatgaccgagagaacagaggcaggaagcaggaaccaaggttctatatatttaccagtaaggccaatgtcagaaaacaacaaacaacatcgaacaaatatgatttgatgcttaccaacgacagcaaccaccacgacagaagagattccactagcgatatagagcatggcttgccgaagagacatcgtcaactgtccatcgagtgacgagacgtctgaagaaaacctgttcaagatccttccgccaggaacagtatcgaaccaacgagctgtttgtgaagtctaagatcaacacaccatctagaaaagattgttcaatagctagaagctgaactagacttacctggtgccttgattacactgaccaacatgccatcatgaagctcctgggctgctcgataacctgccacatagctcaacacattctgggtaatctgaatgaggagcgagacaatggagatcacagaatatgcaatgaggtagaagaaaggtcgatcctgcgctcggggaagttgagtatttagatagacaggggcacccttataagcctctccccactgaaagtagaacacatcagagtcaatatcggagcaatacaagatatatttgcagacgatagagaggaacgaacaatcttgagccagaagtcagaagcgaaggaggcacctcgatagaccaacaagacggcgatgatcgccacccatagggccggtcctgaagcaaggatataaagtttatagattctccattccagactcgctgaagatccagaaaggatacacggaaaaaattgtgtaagtaagtcagctcaaacgagagtagaatcgaaggttacgcacactcagacctctcttcttctgcgtgcaattttttgggcttcttagccttgaccgccgaaatatccttctgatcagcctcttcggtatccttatccacctcattctctttgacgggggcaacgaaagatgaagagtccttctcatcttcttctagcaaagcgggcaaaactccagaagcacgcagctcttcagttgttccgattgtctcaattttcccagcgagcatttgtatcagcatatgcgcgccaggcaggagaagatcgacgtggtgagataccaaaacctggaggacgtataaaaaattctgagtgttaaacgtgatgtcaaaagaaaacaacaagattgcaaagacgaaccacagttctgtctctaaggagaggacctcgtaagcagtgctcgaacagatgccgcgccgttccaacatccttcacagagcaaatcagatcggtcagacaaacaaacatgaatggttcagggaaaaaaggaaacaagagaaaacgaagacaacatgggcggactcacaacggcagccaagacatcatccaacaaaacagtcttgcttcgactgtatacagctcttgcgagtgcaactaatcaacagtcgagattaggtttagtctatgtgttttttgttacagttatacaaagtaaattgatctcacctcgagccttttgacctttatgaggtgggggatcaaactgattagtcaagcgtttgtagataaatctcgagacgccagtgaatcttacctccactcagcaccactccccgaacaccgatttccgtttctaaaataaaaataaataagtatcaatgcgaatatcaacaaaacattgatgaacgatacgtaccatcaccatcttctaagacctcaagatcatgctcaactaatgaatccaaaagataagtgagttgatttggtttccaagatttcattcatgttgatgatgagaaacgttgatcgaaacgtacgagcacaagcaactaatacatcgcgataccgggcttcgtcaaaggcactcccaaagatactagtgacacaaacaaagaccagtgtcagcggataaactagcatttatacaagaaaaagagacgtcctcacatattgtctttgattctatgtacacacgaggagtccgaatggaccaacgaaacggccgccaatttattaagtagctaaaccatgtgttttatgaatacgcagacaacggcagactcacgatctttgttgaaggaaagggttctgtgcgcaataactaacactagccagcgttccatgtttgggcaagagtactttaccactcacacattcgatctctcctaacagagcagaaagcaatgccgtctacggaccagtcggttcattcggatataaaaagcacattagccagctctctctatctacctctcacacggaggagaagagcggcagaaaagtcaagaaggatgacatgatgacgaacctttcctgatccaacgggaccgcttacgacggtcaacctcccctctggaaattcgacattgatctcccccaactggaacggagcggcttcctccgtaggttccgaaacaaccttttcggttgagttccagttgaatacaccgttctctatcgcaagtctataatcctggttgactccggcatctgtctttctaagggaagacacaaaatcgggtacttccgcttcatgaagcaagatgtgaagacagtcgatcgtcaattctatgcgaaaggggagagaaacatacatatgtgaattcgggtagacttacgttcatcgaaaaagttttcaatccgttcgaaggcaagcctcgcttgagcccaagtgatgagtaaattaggaattccattaagcggtccggacagcatcccgtagagtgacaaggatgtaaaggcgattgaaacagtaagttctccctttccaagggtgatgaagctaattttgtgtaatattaaatagaatataattcatatcagtgagcgttctcccttgcattgggatggcaacaattaaacaacgaaccatgcgaaggctgattccaaaaaagaaaaaaaatcgtataagcgaaacgtcagaacaacccaccacacttacacgcattggtcatttcggacgccaaaaacagcgatgagagagagaaatacacgtacaaacaagcatgaggatcaatggatagaggccccaaacgaacgtcgccaatgccatgttcgtccgtcctgcaatgatccacttgatttcttccattcgagcatccgtcgctttcttcatccactgtttctcccaagccaagaacttttcttacaggccacgtttagaagactcgatcagcatgtttgatcttaagaatacatgagaaatagctatcgagaaagaacaaaccttgattaggcggatagagaggacaatctcattcatgacggtcattctcttatcacgagcttcgacagttcccttgttaatctgtaaaacacagcaggagaagaagaagtagatcagcagatgctcgacatatctagcaagcaaggaattgactcacccggacagcccggttccttaattttgagctgacaggccagaggagaattaatgcggccactccagtaaaagcggaccagccgagcaattgatataagaaaacacaggcgatcaagatctctagtggaggagaatatatgtcggcaactcccgagatctggttggcaacccgctgaacatcaccagacatcatcgagacaattttctagagacgtatcatatatcagggtgacagcattagtcatggcggagacacaccagaaggagagaggtggactgcagaaacctcaccccaatatcagctcccgtagctttgggagctccctttccgtcttctaacgctgctccagacggcttggctcctctctttcctttcgaaaattccttcttcttctcctccttgccagatgggttgacaacccctgagaaatcttttcggacaagcgccttggcgtagatggcgctgcgaggacaattgaagaggtacgtcagtttttggataacatgatatgatggctgacaggatggaagaagacatacgccatgagagtcgatcgcgttctggtttctgttcgcgtatcaaacaacaggtatagagctgagcattcttgccaataaatgaaggaggaacagacaggaagtctctatcaaaagacatagaaagacagagtagagtctcaccagctgcagacatgattcttacgctcaagtttccgatgatcgctttcaagattccagcgaccatggccaagaacgcgtacaagtaagcagtagagacattctcgggcgtaggattatcgatagcgtccctatgagaaagcaagaggagaagaatacaaatatgagtgtttgaacaacatgtttgaagaatttgagaccagaggaagacatacaggattcgtttcaacaagtatggtgccgtgtaacttaaaagtacatacgataccgaactaaacagagcgcgtttgtaattgaatgacaaaaacagttgtcaggagacagaaataaaatatccgctcggcgtgaacgataaacactcacatcactaaatcagccaagagttctcttaaattcaacataacaatctttcgaagtatgctcgaacaactattcaaattcaaaatgccgaaccgaccaatcattagcgtcggccactgcggctaaggccgaagggaagaaagagaaagaggcggtgtaagaaagaccggaaggaaacaaagaccaacctatcctcttcccatttacgtctgttgatgcctgcccgtctaagtattccaacatcccagatttcgtcatcctccaatcgtttcccccaaccgagcttgaagagctcatccatatggccatatgtcaagtatttccaaagactgacatcctcctctgggcttcttcctccgattcctcttggcgaatcaaagatatctgccggaggtacagcgactggtagggaaagctgaatggcgatgatgaggaaggaggggagaaggggaaatgcgagagacagcatatcttcgtgtccagcggacgaaagcggaaagagaaacggaaggagaggggttggtaatcggagtgcttgaaagaagagcatggagtatgaaggagtaggagacctattccataggggagcaacgacagtagtaatggcctgaaggtatctcaaggcgaaaaacccgatccgatcacatgagctaggtgaattaagaacgagagatagaagcacaagatattgaaaggggactgacccaagcgaaggcgagtacccatgattgagatacaacccaagcaccctgaccgctcataagctcccggacaccactgtagaccaaccacgcaacttcgacaagaccgatataaaccatcaacccggtcttccacacgggcattccaacagccttcttatatttagctgtcgccatggtatcgtcatcggtcgtatgaacggaaggcaggtcgtcatacgtcaagaacggtttaaacacactgttcggcgagttgaaaagagaagacacagcagatacagaagaacacgccgccaaagcaggcagaacgatgttgaaagccgtataggccaggtaggaagagaccatgccggctcctagatggtcgttgaggttaacggggctttacaacatgtgtatgataattgagattagtcctggacttgcttacgtcacgcaactaaatagccgacaataacacgtgactacgccactcgggcattacttctgacaagaatttacaatgatccatattgtcagggatgtgatctgcgtgttacaccgggtaaccttctcctatttctatcattccttctgcttcgctattcctatgctcttccattacagcgcaggtgtttctagcattttctatgattcatcctcttatgcataatcgttggagtgaaggataatatataagacgggtctcctttaccacccatagtatagtctgctaagcctgaatcctctgtcctccttggtcccttagcactcttgtactctgtgacatcaatcttgttcttccaaatctcttcgcctcgcgccctagtcacagtcaccaagcaagagagcctgaacttcctctttgccctccatactccctgtctaaccacactcttgtaacctccccgttactctctgaactcggatcctgacacatatcatatctatgtggttggagaatacaaactcttgcccaagaaacaagagacaagttctggatatctttttgctgattcctgtagagttttagagccagaacaaaccatgtggagtgagtgtccaaagtgggagcttgattgatttcgttcttgagtcaggaatagaccgaagatagaaaggagaagaagaaagagatactacctttatctgtttgtaacctcgccgttgataccacattcgagtctgagaatcaagtccattttggtcgacagctgctgtgctgactgtgactacgtgagctttgaacaccgtcctatcttggttctctagggtatccatgatctacaggcattcaaaggaatgaaagaaaagagtaagggatatgaaaccacgggttgagagtacaggagctctgtaaatcaatagtatcttggtccttctgcgcggcgggaaccttgctgacttactgcattaccaattcctagaccttgaaattcttggtatacgaaaagaccggctaaaagagtagaaaccagttcagtcaacggattgcgtagattctcgcatgttcggatggggtctacaaacagatcattaccgttccggtctctgggttacatagatcgagatcctgcgcgtacgaatcaattttctcgatgacgccccttttaaaggtcagattttaatcccagatagtttgaaaagtgcaaacatggtcaatcacatgaatagctttatgttttgatcaaagtaaacggcatacattccgatatcggtattcgtttctgcatcttcaaatatatatatgccaacctctcccacggcggcctgctggatgcgaacggagacgtattctgaccagcagaaggagaggtagattcacaaatgaaggataccaaggaagagattaggaagcataagaacaaacctgcgccccatccacaagctagtcgcaactccgtcagtgggggcttatcctcctctgagcaagcacatctcagtcaacgcctgcaacctcttctgttgatcatcagctgataacgcgcgccattcggatccgattcgtttccttctcagatgagaatctgaagatgatatcgataccggcgaaacggtctgttcaggcaggtccatcgttgtctgcacaccggtatgaaacgcaagattgctgttgcactgttgatctttgtagccgaaattcaccgcaagggattattgtcaagtactagacgtcaatctcgatgtgttgtctactcgttcaagcgttgctttcacctgatatacctgattaacttgtcgagacccttacagacgactgtttaaacaggctgtccttccaacttcttacccaaaaaacggatccatcgattgtgaccagtgctcaagttcttatggtttcctgatacttagttcacaaaaccagccctaaacaaagtcgatcaataaaaggcggaacgaatttctcatgctccactaatttccctttccctaacaaacccttcagtctggccatgtctttctgaactgccccgaagggatcaacttctgtcatagtgagtcttcaatcattccataccatcttggtattttgctttgttttccatttttccttctccttccttcgagtgacgatacattagttatccctgtccaaatcacaatttgtcgacgaaaattcctgaatcgtggttgattctctatctctgacacctacacttcgttttgctcatccttaaatatattcatcgttcttggttcttgtactgactccattcttctttttcgtttttgtaatgaattggtcgagcaggcttcttttatatgtaccgttagatatgacgactgattagaatgtgtttagaaatacaaaattgaaagaaacacggaaacgacagacaaatagaaaagaatggccagaaagcaacgctagcagctacatcgtacataccatcctgtagcaacttgatatgatacaccgcgggcccagtaaagacacgtttatcaccccggtagtgaaatcatcctctgacggccgagactgcccggcctccaggttggtcgtccgtgggtctcttgatctacacgtggaaaacaattggaactagatcactttctcttcatcattctcttctccccgacattatttctctttaccttgctcttttaatatgctattgacgttgaccggcgcacaacctccgtcacatgaataagactggatcatgttcagacaaaccccggcgatagtttttgtttgacattgatgaaacggcttctcgttcagccataccagtcacataatatagtcgtctttcagacgattcgttcttgtatctctctggcccgtcgttgaggaagattgtacattcatctccattcataccagatgcggtgacttgggtggtggtcgcaaggatctggctctaaggaaatggacggtttgggatattatatcccactcgaacaatacttggaccgagcggccgggatgcagaagctcctactcacttagaaggagttcaaacgagacatgtgttggccatcatggacgaacttgataaatatttcttaaggcagggtaaagatctacggtgatatatgtttgactacgacaacgaacgaaccatgcacatcagaggattttgattcattctttccgttattgctttctccgtttcatctatcttcttgttcgagacaaccactgcttctgttcttctggaaactcgcatatcgatgtatacgaagtgtcttaccttgatcgatgctgtatcgctctagcttggaactgggttcgttggttcctctgggagggccagtgcgttccatcctcaaattcacccaccttgattctccgttcgcaatcatctccatcagagtctcaacgaatcgaaggaaacaaaaacccgcttcaccaattacatatatagatatcttcaagtaggttaccaaaagtcatcgtcgctcgattcatctccattcgacgatttaatcttcttctctttctgaacaccataacctgcttcttcagtgaaaagagaatcgtaagatttagcagccttcgctgcttctctcatccttgaggcttctagttgagcgttcttctttatatgtgttttcacgaaaggtgaaagagagatggcgcgagaacgaaacaacaatcagccaagagaacaggtagaagagttcagggagaagagggggatcaagaagaaaatgaaattggacgaactagttcgttagctttcaactttttaaatttcccttcctcttttaaccgttcgatcctttcatgctcgtggtccacctcttttacaacttttgtctttacgagtcgattgacaatcgcattatctcttgtagagatgtatactcgcttgacccgcttgtcggagtggaaagagaccgccccggtcgccatatcacccgttttctttcatgcgagaagacaaccaacaaaggcaaagagaagggaggcaatgagtaggtaagaaattgagtgaaagcttgatcggaacgaagaaagctcttgcaaaacggagatggacagacgataccttgagattatcccatggtgtatatatgatcgtgatattgttcttcttatttccttcgcgcatttatttatttagagcgaagaatggagttcagcctataggtttagccgttcgacaaatgtatcttttctaaccttctatgctgttggctttgacgagttgacctaagtcaattaacagcttttcgggcaggttgtcccagtctccatatggtaagctcgaagggatccggaggtaaacgtgtgctgacgaaagctgtagccaaagagacacagtgtggtcagtatactgtgaagctgaccaggccagaaagaaacttgggaacaaactttatcaacatggaaccagatgtcttccttcgttccatacttaatgagatcttcgtctatagaacagagaacaaaccaaattttgtttagtcgaatctgtgcacgcacggattatggaagttgttgatccttgaacaaacgtactttccaccttgtcctttcccatatagattgtcgctggcggatccacaacgtttgatgtgaagaagacgaccatgatagtgctggatgggttcaatgagcacggagaataaagccaacgatgtcaatgttgatacagacgacgaagaaggtgtttgaccaggtaaagaaattaaagtaaaaaaaaaaaaactcgactcaacttctttcagtcaaacaacgacctcgacctcgatcaatcaagcagcccatcgagcttgtcggtccctctctatattcttctctgcacaactcgcttcatattctccctttgatactacctaccgcatcactttgaaggaattgcatcatgaagtcatctcttgcccggcttggagcccaactcctcgacatgtctgctaagtcgaactatccgatagctcaaaagcctggaatcgttcgttcttccctatttgtttctctgtgctttgttctctatcctccttgctcctctcgttaccttatcattaaatatccattcagtttctctccttccctcacgagagagctatgactgatcgattgttttcttctcttctttgggttatctccgatctctcgaaatatccttcactcctcttctctctcattttgttcacgatctcctttacctttctctttttttctcttttcatttcttttggcaacacccctcttcttcaaatacagggagcagtcgctgccttctttgcttctgatcagtccaatagaaagtacccggagcgaaaggcctacttgactgacaaatacacccggatcctcacccaatccaactgtattctcgcctttcagcacaacaacttgagcgcggccgaaatcaaggctatcagagttggtttgatgaagacgaaggttccagaaggaagcaaacctatgaagttgtcggtcattcgagcgggagtgatgagtgcggcctgcaacaagcgtatgtttctccgtgatcagcactcttttcctttcaaagagaaagctctaacttttggcctgatctgttttgtgcctatatcctcctattctcatcttcgtattctttctcttacttgtgcctcttgaaacgataaacagaggagtcgattgcttcttttgacgcgcttctatccggcccgatgcttttccttcactctgatggccccctcttgccctcttacatcacccaggttctcacacaagtcgacaaagccaccggcttccgacctcccgccggttctgccttcccaccccgtccgttcgaatcgaccgaagctctattgacacataccggaccttcggtcttctctatggtaaaccctcgggtgttctgcgtgggcggtatcgttgatggaaaagtgatgggtccggaggctatccgaacggtcggtacactgcctggacttaaagagttgcaggctcaagtggtcggtttggttggctcgccggcttcgcaaatttcgggtgttttgggcatggctagtggaggacagctcaacagagtattggaaggtttgaaagtgaagttggaagaagagcagggtggaaagaaggaggaaggagcttaaggagtttatagtctaattaaaacgaaatacacaatgcttcttttttcccatcactctccttctctctccggagctagcgaggaaaaagtcacttgagctctctgatgtggttgtctatctccgaactcaaccttctccttggtggcagaagaacaaagtacgggttatcatttgtattctcatcccttgagggccttcacccacgtccttcccacctctcctactgcctgtttctctgtctcctctccagctctgtccaaaacactttctaagctctcccccaacgacgttctccaatcacttgtatctacctccttcgtccgcctatgttcgccttgctcaatggacgagcgtccggctacgttgctaacgagccatatggctgcgtcaagcacaatagggccgcctgaaagatcagccttagaaagtgtttcttgtagttttgatggggtcaacgtcgcaggaggaaacaccggatcggaattgatcaagagagaaagggttaattgggtcttaaacggctcgatattggggatggctgacgaccttgccagagatgactgaagagaagggtggatgaatgctaggaagcgcgggagagaggacggaggaagcatggagaggatttcggatatttgagtgtgtactcgaaccggagacaggaatggttgggagtatgagaacacagggtacgtgagtatgatgatctatcagtcacggaagaacaaccgaacggacgaaaagaacaaagtggctaagtgagttcaaggtctcctgctgacgagatgataacaaccaaacaagaaacacacaagagaaataagcgacccaagagttcgtttccgtctttctgaccggttcaatataagctcgtcaaattcgttccgatcattagacccattcgagtaaagcacctggacgagtggtaggatatgcgataaattccaacgtatcttttttgtagatgaattcgtctcgggtggtatctgcgctagcagtaatggaatcctctgttgctgagaacctggaggagcatttccctctcggaaagctttctcctcatcctctttagactgagtccatacctccaccagatcttttgtccacaagatgcataaccaatccaataccaaccaccatctctccactcgttcgctttcttctttttcttcggtaactcttccttcaccctctccttcttctgattgttggcctcttctggatcgctttttgttcccattcgttctgctcttcagctttccccatgactccccgtgatctctccatccgttccaaagcccatttttccagtcgatcattcctctagcttccttctcaatctcggccatatctggctcagcccggttccaatatatagatggaggatcgaatgaaggaatcgagcgggcgagagggactggtgagtgaagctcaagtagccggtgaagttgagagagcgcagtatcaggaagggagagcttattgaccgaagggagatggatattcactgctcgtgaagaagaagaagaagaggaagagttcgattggttgatatagaagagatcagacatggtcgggtgaagagcgaggtagagtaagatgagggtgtgcgctctgagcgagaagatcgaattagaatgatctggtcagcgtagagctaaggacaggcagaaaggaaacatcaacgaacggtgaggggacataatcaggcgagagaaataagcctatggtctctaaagcgatctcgactatatttcttgttcgataaccccaaccacagtaccatgggagattttgtggagtgagggatcgagcgacatgaacagatgggcctgcttggtcaagccgagtgtcttctagaggctagggaattaacaataaagaaagagggaacaggacggacggtggccttcctcgagagcgttgttgataacaccttgatagctggaaggcatgtcgacctggatggagtatttatcaagagcgtccatcacggctgattaccaacgacgttgagggtgaaagtgttgttgttgaagacgatgagttgatgatggtggtctgatggaaaagtcctgagcattgctacggtatttcactccatcaccatcatcatcaccatcatcatcacctccaccatctctctatcctcaatgacatcctctccgactgatatccccatggatactccgatcaacacatctgcccctacctctctggattctacatcattctctcaccccgctccgtctataccaacgcctacaactgacacggagctctattcttccgatgaagatcctagtactaatcctatcggtggcgatgggggctctgcatttgagactccatgttcatctcaacaatccaatcctagtcgaaatccggagagttctttaagagaaagcttatggagtgctacatcaactaatgagcctaaggggctcgtcagaggagaaggaaggagaggtagacaaaatgatggtgagaacggtcagaacggtggaagattgtctagtcagatggaagccacaggcgaaggagctagcggtccgaacggaggaacgtatgcgcaaggaggtaccaaggatgatagactgttaggtgaacgagagtttgatgctcttaacgaaggttcgttctgcttctctctttagtttcttttacctttgtcgagcgattcataagatcagaatgtaccacgcttgaatgatacgcctattgaggagaaaggctcatccgattgattccctctttggcccgtcttggacatctctgtctcttgctcatcacagagattggagaccccttcgatacggacgagattgatgacttctaacgaagccaatcgtcttcaacgaatgaacctccgatctaattcgcctcatagaaccgcaaaacacaacacacactcttcactagactatatcggtaagtaggctctttcgattttgtttcaagatgatgtatatatggtgttcgagaaaactgatcatatgtttcaatggatgcgcatataatcagatctgcgttctctaccaccagctcaactatcctcttctcaacaacatataagtgcataatctatcgtcacactcagacgtcaactcttgttctattctagttttgaccaagttctccaaactcgaaaataatctaaagagttttctctctctgatcaagtagtaaatcataaatcaagggaagaagggcacccgtccatgtgcatttttatactgcaaacaaagaataacatggaatagaagggcagatgtaacaagaaagaatgtccggatctggatatagaaaatatgctgatattgtccgtgatgcaagagagaagaacgaagggactgagtagtgaaatgcaacagaaagaatatctggagatagggtgacagttgagaatgagggcggcaaccacgtcgtcacagcaagggcagtacgaagggaaaacgaaatataacagtccgaaaaatgtacgatacaagagaaaagaagggataaaaacttgagaaaactgaaaagaaaagaaaagaaaaggctgatggtcttgatagactgggtctaccagatggcgagccaactgatgactccggcgccagcgccgagagcaaagacccaactaacgtgctccgatcgggaagctcccgaaactctggcagactctgaaccagaagcagcagcctgagcggcagtggcgacagtagtagaagcgcttgcagactgggtagtagtctttgaggcgctggtggacacaaacgaagaagtagagctggttaccgatgcaggaggaacataagcgtgggcagctttgatcatgtcggcagccttctcagcaactccgtaggcggaagccatcaagtgagcggagatctgcataggcatgatagaacagtcgacgacccgaacattgcttgtaccgtagaccttcagagtagtgtcaaccacacctccagaagactgaggcaacatggcgcatgttccaagaggatggtactcggttccagagctagtgtatatgaaggtgttcaagtcggtgccggtgacgttcgctccgggaagagtctcgtcagcgatgactacaaataggaagttcaggtaacgtttgtcttcagtacatcgacaaaagatataaattaaaataataaaaaaagagaaatgcataaaagacgtacatgtagacattgggtcagtcgccccaagagtcctggcccactccagtcccttgttaaggatatcgacttgaaacatggaaacatcactgacgttaagcggcgcttttgtacaggaagtaaaaatagaatacataagataactcaccatcgtaacccattccaaagtagttggggtcaatggcagggtagtcgaaggggctatcgaatgaaaagatgaagagatgagtatttagcaaacggtgagaaccgtagctgtatgcaaggaagtactcacttggtggagttgatcatgatcgatcctcgagagtaagggtgctgcaatccgacctgaataccggctccgttcattcctatatgggcgcaaggtagaaatgtttgcagcaatcaggatcggagtcgatacatcaatcgattgagactgtcaagaacacataggcataccattcagcattgacaaaatgatctcgagctgtccgatgtccttgccaagccaactgttctggatctcgtactgagcccggtatccagcagcgacgttatccggaatgtttctgtaaggtcggaccgacaaaggtgaatattcattagtcaccttctttcgaattgacttctcaaatgcagacttaatagacgtactgccaagaagtgatgtctttgatattctgatccaaagcggcggtggcggtggcgacataagtggtatagtcgctatcgatatcggccatcgagacgtatccggtggcttcattcacataactccattgggagccagtgtagtttccagctcggtacagctccaagttggaggcggcttcatcggcgttgataaggtttccccaggtgagagttccggctctgttgtcacaatatgttaagaaacagagagtaagaacaccactaaatatgcaatttggttgaacgcacaccgatatggcaagaaaaaaatgttcacgcacttggtgttaaacttgacagccgtggagacgtggtcttgaagtccgtaaccgaccggaagatctgagacgacattgatacccaagttagaaaggaccgaagaaggcccgacacctgacaactgaaggacctgaggagtgttgactgttcctcccctgaagatatgttgcacacataaacaaattgaaggagaagaagaaatcagccaggcgcaaagtcagattgctgatacaccacaacgactgaatttatttaatttttcttcacggaagaacgaatactcacgagagaataacttccttgttagcggtgacagtgtactcttgcccttcgtttcctccagccgtgctcttgaatttaaaaccattggaaacagcgttgcctgccactgttgagttccaggaaattgctgtaacctggaaaccggtgaggatgacactgattgtattcattcatatgttagtcattgagtagacagagattgagtgaagagatggacgacgaacaggttggatctcgggggaagaggggcgatgtatccggcctgagagtcacttcgagtagagttttcggtgttgagagtggaaggagagaaggagaccccaacattggctccagagtgtgcgtccagtcgtttcttacccaggttgacctatttgtaagaagggcattattgattgaagatcagtaaatggacaatcgattctaaaggaagatgacaagaaagagagagaagggaccaacccaggcaggcacccagttcttgacagagtcatacatgtaagcacaatatccaatcttgattggtccaacggttccatgatcagaaacgttgtaagggatgtcataatagtcggtttgccacttgggaggagcagtgaagttctctgcctgttgttcatccagaaaaattcaagaacgacggtctcagtaagaaaccctggaccaagcaaaacagagaaccttgatgacggactttgttgatgtaagccgtcatggcctcccatccccaatcttcagtcccattgggattcaacgtattccatgaatcgtactcttctaccgatcctcgagaccagaacaacccgtttgtacttgagcttcctgtggtgtccgaaaaagagaaaggagttaggtacaagcagagcaagatgtgatgggttggtataggagcaacaaacctcctagtcctttgcctcggggccacgacttaacggtacctagagcgtcggtctgtaagagaaaacggagcaacgaataagtatcttctgctgatgttgagaagaaagatagtgaccgcttacttgagcgacggtcttgtacttcctgtgtaagcgcatcaccgacgcatacgcatatacatacagtcagaaacaaagaactatcacttgatgcatcgttgttactctcaatgtactaaccagtcgtagtcggagccggtcaagccattgagatctatcggtcgaatgagccaaggaaactcaagatttgtaagctgcgcgtaacagatgagagtttggtatacacgtacaagaatatccagggatatcgatctaagatgacattcaagacacccatgcgaagaaaaagaggatgacgaagagaagaagagaagttgagcgcgaatcacacaagcggagaaacgcccaagcagaagacgccgtaccctgtccttgaagttcgatccatcgccaccagcttcgatcagcgcgacagtcacgttcgaccactctgatagacgggcagctaatgccaggccagctgttccaccactgtgcaaacgaaagtcccgaaaaaagataacgggatctagagtgagaatgacgcagcataccgacagtaagagagcttgtatatcagaggaaacatacccagcgatgaggaaatcaaacgactttccatcgagctgtgacggatcggtaacgatagatctctgaacaagcgccttgtctggagaggaatggaaagccaagaccgagagaagagatgaacggaagaagcatgcataaaaagatcagatgacgcgtttcaagtgattgagtccaacaatcagaatggatgggtaggatggagaactcactagcatagttaggattataggctgcttgagtggtcgaccccaccagagagagagcgagtagagcagagagggaaagactataggttgacatagaccggaatcaatggataatgttctgtatgtgtgaatcgccaggcagagtagcttgaagtgtcccaggtcaatcgatcgagtgatgtgagaaagaggagggagaggagagagtagagagagaggagtttaggagagcaagtggtggttccgaagagaaatgaaaacagaaagagataaaaacaaagcaggcagtctttaaggatctctcttcctaccagtagacacgaactctaagacggaaggcgagcagaagaggaatcaagaatttctgtgcgtggcaaattcggagggaaggcggaatttcctttatttttctctcctctgccgccaaggccggatgaatctcttggcggatctccatttttcttgcccgctgcgcttgaacatctacatctactggaacattcggatattcttaataaccctctgaatcttattggcgcaacaataataacaacagtaataaaaacaataacacaacaataatacacgcctgcatgcacgcgttcctacacgcgactatgactatggctggccaaagagcgaactgaaaggcatggcctcggtgggctgcagccagttcttctcactaggttcgacagagatgaaaaaaaaaccgcattggtcagtcacgttgtgccacgccggcaacaaacttcaaggaagaaaacagaaaaaagagagcaaaagtaacgcaactcatatgttgccccgttttcctaaaaacaatttcgaaaaaaacggtccagtcagccttcggaccctaacacaaagatgggttgaaaattagagggattaagcccaacctctgattcaatcatgtctgtcgaggaatcacaagaaaacacgtttggaattgatgagaaactactgtctaccaatcagaagatagatcagtagataacttacggaatgtataaatgaatctcgacttgtccgaatagttgtgttccgatcggtgggctacactgccatggatgataaccagagtgcctaaattacaacatacattcacacgccccttgatcagcatcttgttcttggtacataagacagaacagatactcgaaagaaagaaaagacaaaccggcatcgcactcctcacacacaaaattttctggatcccaaccgatctcctcttcttgtttcttggcttgctccatgccgggaagggtctcgaacccagtaccacctcctggcaaacgaacaaaccgagagtgaactttggaagttttatgtgaccctggtttgaagtactgcaaaacagaaaacatgtcaactccgaatcagatcaggagaaaaaggctgtagccaacagtgatgtacgagaaaaagttagaggatatgctcacaaggcagccattggttggtgtacacttctcaagagcaaaccagaagccaacggccgatggagggtcggtgtacaggaacgtgctatcgttatgcaccggaacttttcctccaatctgcgtttgtaggtacagtccaaaaaaagaaaaacagttcatgatgaccgaaaatcacaatcgagacatgagtcaacataccttaggctgcttgcagatgatcatgctctgcaggacctttggatctttgtgagcgcccaactctttggcaacgttctttatgctttggtttcgaagcgtgaactctgtgagcacaaagaaatgggaacagagaggcagttcgtcaaaatgtcgtcatttctttctatacctacctagatcaggtgaggaaggaaattcttcggcacaaacctcgatagacatcatctaattcatgcagggcatgcccgatcttattgatagaagtctctttggacacacccgatctgaagtccttggctgtaagatcgagaatgaaaagacgttctcaatcagccatagaagagatgaagctacatcagaggagtctcactcagagatcattcagactgactatcatcatcaaaagcaccctcttcgaaaaagtaccgaatcttgtctccagagtcaaggaagtagtcatcgccaacatggtcgacgccttcctcgtaattgccattccaagaaattcatccgagtagttcaacaagacactatcagattgacacatggcggtgctgacggactgggttgggccgagcacaggtttcactcactctctcctgtactgaactttgtcataggatggccttccagagaaaagtcctatttccgtcatcgttcaaaaatgtatgaccatcaggtcccgtccatttgtgtagctcaacagatgagacgacagccaacatacagagagtagcttgtgagccctgttgagtaagccatcggtctggctcttggagaaaaagctgggaaggacaagatatccatccgaattgaactagattttcaaacgagagaacgacattattgatgaaactccggtcctcctgatagtttgactggttgactcaaatctattgatagaagccaagtaaaccatagactcgccttgttgatttgttcttcggtcaaatgataaccgctcatgggaacaaggatgtacgaattgaaagaagacacggacgagaacgaggaggtgaacggagtgaaaacgcgaacgagaataaaggcgatcggcgttgatgactgagatgcgagacaactcgtgaataatcaacggcggccgccgccgggccgtttagcagtgccttgtgtgcaaatctccggctgttacccttcgcctcctgctgcggcattgagaaggctggatttaaacttcggtcctgcatccgtcattaatccctagcacagcaaacggatccgaccttcgttgctggtcgtgtgttataagaagcattctggtgatgtcttgtcgagttctcatcctcatccagtcttcatcctcatcctcattctcaacttgtataccctttccttgatactctgttgataatgcttcgtcttcgaacaactcttgccgtggcggtatgtctcatcgcggctcttcagtttgcgccgacagcttctgctgtggatcttccatcctacatcactccggccagtacgcaggatcccagcaacacgacaattcagaacgtatgtatcttgttattagttcaattgaagactcacaagacttgagaggaatagatggatgttgcttgtcggaatatgtcacgtgatggcccaaatttgtgttcgttttattcaacctcaacaactcttggtctcttttactacgctcggcgcacctcccttacaaaatctggatacacgctcagttttatcctcaatatgatgttcgtccatgttcctcaattatccactgaagaagatcgagcagcctgaagcggatcggggttttcttgattaaattaaatttaccatcacctcaggaaagcaacccgttgagatatctacccaaccaagctctcgccatagtggtcaccgcgctttacgctctcgttggcgtcgcgctctttgttcaactcatcatgcatggtcaaaaatggatgtgtacgttcgacaaccttggtcactgttttctctcaaatccgtccctgtctttttgccgttgagcgcgcagtgttaaccctcaatctatatgttacattcttgggattgtttctgcgtggtcaactcatagtgactttgatcatcggtagcttctgctatgctgtcggaatgggcctcaggttgctcttccgaaagaactctgtttgttttatgctctttgaacttccttcatctgaaatgcactttgatactcatttcattctcaatacattgtcccctacatggtttggcacagcactcgatgggaatttatatcgctctagatatgttcaccgtgctctcgccctgtgcattcctcgcgaccgactatgttctccttggccgtcttgtgagacatttgggaatgggcaagcaccttctgatgtatgtctttgtccttctacctctgttctgaagaagtaagctcatccttatttgacaaattcaatacagcaaagcgcagaagaccacaatcatcttcgtcggatcagatgtgctcactttcttggtccaagctggtggcggaggtctggcgtccagcaagtcttcttcgacgtccaacatcggctcaaaagtcttcctggttggtatcatccttcagatgatctcctttattctgttcacgtaagcttccaggccttcttgtgtagccttcggatagggactgatatcttaccttttctgcgatcctgtgtacagctttttggcccttgactttggtttcagtacgtctttggctgttcgaatctttttggtatctttaattttgttgacttgctgatcatttcgtgggtgccactttcagagatctacaagcacgaacctcaactttggtctgcgcctgacaaaaatactcgacgatggaagcacctttattacgccatgctttggacatgtgttgggttcattgtacgtcttctgagaagcttgtctcctttttcctcctcatacgggtctcttgtgtggaaactgatcgtgctattccgttgttccgcaacctcatcgattggctcatattttttgctcatcaggtccgatctacattcagaacagccgagctcagtcaaggattcattggccgcttgagcacaacagaaggctacgtcttcgttctggacactttgccccttttcctggccatcattgcctatattccctgttcgtcttgcctcctttctctcatcttgtcaaattcttttcgcaccttggagcagtttggcttactgtctttctcttctgtctgacctaattgtgacagtctaccctggaagatacctccgcccaaatgtagccggtgctgaccagcatgcatacgatactgttggctcgctccaaatgatgggtgattcgagcatagagatggagtctggaaacaaatcctggtatggacacaagtagaaaatatagattacctctgtcgagcctttttcttttcccacaaaatttcacttcaaccaaaggagttaggttggattatctaaaattcatgaacgttctctaagctctttatttatgtccactatcattccgaattctccccatccttctcctcattcttattgacttttcgactttgatcagagctagctcgtcttctcctcctgtgtgtcgtataatctctcctttagtttataatctcttcattttagcagatggcttgtggcgctactctttcatctccgtttcactttgatcctcgctatttttatcaaaataacccgtcgttcgatattttctatatctcactcgtgcatcgcgtcgatatcagttaaacacttttattggtgtgcttcacaaatcaacgcgaaaggatgatacaaggaaaaacgagagtcactggcgagaaagaatgtgctagaaacttcgagtgatcagtaatttatgcacgctctatttcctttggttacttttgatgttcaatctttaattcgcccacccgtttcacgatcgactttttcaccatctcttgcttttctaatcatctatcatctatcacataacatgtctactgtgagcaaactattcctttgaataaacagacatacacgttgggcatctgctgagacaggaagatattgtgttttgtggtctcttctttattcacctactaggctgaagaatttaaggctctcggaaacgccgccttctctaagaaggattatgacgaggccatcgttcagttctcaaaggttagtcgtgattatcctttcccatatcctgatctctgtccgagagagagagcgagaaagagtccgctttgaatgatatccttgtttcgcatatttgaatgcgactaatattcatatcctgctctcgtattgcttcacgaatattcaggccatagaattggaccccaagaatcatgtgctattttcgaacagatctgccgcttacggtggaaagagagactacgaccaggccttggttgacgccgagaaggtctgtctattcgttcatttccattctctcgtttctgtgatacgtatttgtcgaagctgatgtatcgcgacatatgaattctctattcagacgattgagctcaacccttcattttctaagggatactctcgaaagggatccgctttgcacggtcagcgagagtacgctgcttctatcgagggtaagctaaagtcgatcataaattggattatccgatggaaaaaccaagaatcctcttccgtgtttgtagtacctgatcgttcttcttccggtatctctcgttgattacagcatacgagaagggactcgaagtcgagcccactagcgctttgctcaagaaaggtttggacgaggtcaagaaggctcaggagaaggacgaggccgacggatctgatggcatcgcaaagatgttcaaggaccccaacatgtttgccaagttgggagccaatccgaagactgcacccttcctttccgaccctactttcgcagccaagcttcgaatgatgcaagttaaccctcagctcgcttccgatgcgttccaggatccgagaatgatccaggtcatcggtgtcttgatgggtgtcgacttgaacgcgtttgagcgaccggagggctcctcgtttgatcctgccaatccggaggcttccgagccggcccctgcctctgctcccaagcccaaagagactcctgctcctgctcccagcaagcctacgcctgctccggcaaaagagcctgaagctgagccaatggaggtcgatgaggatgctcaagccaaggcggaggctgaggctagcaagaagaaaggaaatgaaacctacaaggctcgaaaattcgaagaggctattgagcattatcagatggcctggtcggtttggcccaaggacatctcgttcttgaccaacttggctggtaagttcatctttgctctgttccgtttcattatgcatgtagctgatcgtgagagacaaaactcacttgctactcaaacattgtctatgtgctgtgaatagccgtctactttgagcaaggaaactacgatcttgctatcgagacttgccagaaagccgtcgaagagggtcgagatatccgagcggattacaagatgatggccaagtaggttccttattggtcttgtgatcacctttcctcattatatttaaatctatgtctgatgccatttctcgtattcttctaatcttcctccagagcctacggccggataggaacgtcctaccagaagaaggaggatttggagaacgccatcaagttctacaacaagtctctcaccgagcacagaacccctgatgtgttggagaagctccgagctgtggagaagcagaagaaggacgctgacatcgctgcctacatcgatcccgagaaggctgaggaagctcgaaaccagggtaacgaagttttcaagaaaggggatttcgccgctgccgtcaagttgtatactgaggctaccaagcgatcgccaacggatcccaaggcgtacaacaaccgagcggccgcttacactaagctggctgccatgcccgaggcactcaaggatgctaaccacgcgatatcacttgatcccacgttcgtcaaggctcatatccgaaagtcacttgtcttgttcgccatgagggaatacaccaaggctctcgaggcttgcagcgctgcaaacgatgctgatgtggatcacaagaaccagagggagattgaaaatcagatgaggaagtgttataccgagcttgagaaggaacgacagggagagtcggaggagcagactctgcagagagcgatgagagacccggaggttgccgtacgtcttgcttggatcttttcattcccttgtgttgcctattgtttgctcgactgatcggatcacttcgtgtcttgggttttccttttctgtaggctatcatgcaagacccaggtgcgacttgaatcatccctcttcttccacgatcaacccatcctacgccacccaaatctatcgaccgatctgaaactaactttcactcttgttccccctcaatttcttcttttcttgcctcagtgatgcgaaacattctcgaacaggctcagagtgatcctcgagctcttcaggagcaccttaagtccccgttgatccgagaaaagatccagaagcttcaggtacgaagttctttcttcatcaaaccttctgatcaccatcggctcggatcgatctcactgacattgttttctggccaatcccgacttttctttctattcaggccgccggtgtcatcagaatgggcactcgataaaaactctatgtctaattaatctacgaattcgagatgccgctcatgatggttttaaattgatatgccttcgagagtttcttacaaggcttgtggcgaacaagaacacagcggaaaagaagtaactttttctgattctgattcttatcattgcctgttttttttctcttccttttcttgagaaagtcgtcatcatatgtcttgcaaaagtaaattcatccggaaaagaaataaagagagcccgagaaattaaagagtgtgggttggaggggcaagtgaagtaacatctaagaagttgaaaggaaactggtcctgattcggaagaaaaaggataagtatcttagaatcgatcacgcctccagggctctccctcgtgcttgtggttgatctaagataagagagtgggggacgagtcgatcagattgagaatgcgaagaactcaacacatttcttgtcaaaagtatgaaaaggcggaaacttacagcaaggagcttgacctgctggttctccttgatgtgctgccacggctgagggtttccgttctataatcatgccgaagacaagtgagaagtaaggacgagaaacgtatgcaatatacgtttgaatgagactgaagagaatgcttaccctgtcccagataactgtgtagatcgagtgttcggaagacgcaggaaggttgagtattaacgcgatgaggatcgaagaatgacgttggtcagtgaaaagtggcggggaagaactgggttacaagccagcataactgaaccagagatacagagaaggagcgggaaggataggaaggctccacaaaactttgagacataccatcgggacctcgagccaacctagacaagtaccagccagcaccgccgacagcaccaatcacgacggcgtagatgggaagaatctcataagcgaagacggactatgaatcgacacgaagaagttgattgagaaacgataggacgatggggaaagagacagatgcatgatccatcgagaaagcaaacgaaatcgatagagtcagtcgttgagcgttttcaccttgtgacctttttttccctttcttttttttccttgcgtctctgacgtatcgcctctatgagtactccccaaagaaaaaagatgttcgggagaaacagaagctacagaccttcctgaaaaggggggtagggaccttaggcatggtgtgcgaaggtgtaaaagatcggagagaagagaggaagggggaagggaaaggggaggggaagggaggacgggagaaaggtggtggttagacggcaagaacgggtggggcacggatccatgaccgagtgcgagatctgtaggtgatttggttacgcacgggcacgcctcttatcacgtgtcggtctcgtaaccatatcaaccgacgtaccccattctctcaagagaaaagctcgctcacgcaatcccggactatgataagtcaaagaggctcggcacagtgcgcccattgccaagagcgtctggatgatagaccacttggttatgagtacatgaagcaaggtaagcaaacaaagagtacatgtgcatcctttgaaacaaaccaggttggctaggcgcatgaactgaacaaatcggatgacgtttcaagttattgatgcatttttgtgttaagcccatacggacttatactactcaccttctcaacgcactgcctctagcagtcgtcgaacgaagctgatccttccgaccgagtgttcggaatccgtttgagccttttaatttccgccctgctgacgattaactaagttgaaggaagtgctgatgataaagcaaggacgatccgctctcttgagccggtctaggtctagccgagatcatgttcattaacgttggatgacggcgactccaagctgatatttgggcctttttaaactccctgattgtcgatatttctttctttccctttatacaaacgctcgtcgtgttcttatcgattaactacagatcaggctagttcatccacttaaccttgattctgtttggttcagtaattccatcttgacctctgttatcttgatcaagaagtgaatacctgatttagcatatcacccatatcgtccttcactgtcttattattctaccctgttgatcttcaaagtccgctctcccaagccgtgaatactcatacacatcctcttccacttgatggtttctcagttgcacctacttcaaatatgacatcctcatctttaacaagtcctgaagacagatccgacatagtcgctcttaccaaatcagatcaaatcactaaaacttctgtcgaaacacgggcgaaggtggagatggacgaaagagttgatctcggaataaaacggaaacgggtggagagggcttgtctgaactgtagaaagagaaggatcaagtgcaatggagcggaacccaaatgcgaagcttgcacgaatttccgttcagagtgtgcctatgtaggatcttacctttttgttactcccctcaattttcttcatatagaagaggatggtaaacaaacaatgctgataacatatatctacgtctaaatctggacggtatctctttagccacctcccactcataagttgactatcaagttagtgtcacctacatcacttccatctgcaccaccgatttgttattgtgatctggctgacattgttcctatcctcctttctagaaacttcgaagcgctgcaacgtcgaattcatgaactcgagtccaaattagcccacgcgacagagcaaacatctctcagtcaagcttcgagattggcacatgagcctatctatcctttagtatccacacagccactacctctttccgcaatccagcacgccagcagtacatttcctcagtcttctgacatctctcatcaggtatttgactttatctcttgagcctttttatcctgtccgtccgtccgtccgtccgttatgcgtaccctctaagacaatcttacctctatctttagacaccattccaaacacttccaacctccacctttcaaactgagcctgcaattctacccatcttatcgacatctctgtctatcattccggaattggtatctgtgcagctagacgacccttcgaacactggccaaccctatacttttcccacagagatgctgcctgatgagacccaaacaggttctctagagatcacacaatcacaacatagttcgcagttgttcgattctatgagagacatggatcaatacggtatcccgacagggtcagaaacaattctgaggggcgcgcaattcggagaggagtacaattttgaagagttatttgagacggaaacgagagcgagccaggagagcgagcccgtacctatggtccaagatttcataacacatgcacagttggaaccagttcctggtgagtgggtgcatccttccacgccgagaatatgagattgaagcgttaacatggaaactcaatcatcctatcctacatgtttgtgtcctttttctaccttagttcaaataaaagtcgaacctatatcggatgctcttgatccggacctagtgagagtgtttcagtcatctcaccattacataattccgtagtctccgagttttgctgattcaatgtgagaatggaattctttcatcagtatggtctcccgtcgtcccatgaggtcgcagcgatgttgacggtctactatgagaaacgtaagtatatctcaaacgttgtgatattattgctctgacttggctgagccaacgacctttgattcagtttactatgcttttcctgtgttcaaccttgatccgatctaccaaaggtatatttctttctgaattgaacggttcggcggacgcttgaaagctgaccaacgatatacatgccgaataagatacacaaatccttctgtacaaccactacagcaaaactatgacacttcaaatattctccagctcgcaatgctcaatcgaatcttgtccatagtgatcgcctatcggggtcaagacggcgataatgtacagtcgggagttctttcaacaagaagtttgcgactgattaaaaaaattaatagtcggtcatcttacctgattcattaagagaatcaaactagatggaggacatgatccgctcattatggatctcgtatgctattgatgacgaactcataataaagtattctcggccatcaagatagaggtagttcaatatgttcttctctcgtgttgtgagtaacaccttcacattttttcgttagtttgtcagctcaagcgcctcaagacttgaaagatccttttagttgttattgtatagattattatagcgaagtgtaagtgtttgacatacttgctcgttaattgtggttatgttttggtgctttgttacttcaaattgttcaatcgaatctttgcaccgttacgctcccctctttgtttcactctcatcaatacttcaccgtatccagttgtcctagcgtctccaagatcgatgttgccaaagaacacgctatactatcatcgttcctcgtccacagcctccagcttgatctgccatcagctgacggtatgctcagaacagatcgtgagattcagtatagtctgatgagggccgctcatgttagtttcatcactgcttttgtcatgcgaacgtgctgatgggtttagatgatctatttgtcttgttgactggccaatcgttttcgcgctctttgatgatacttagttgtgcataactgtccagctgtcaagcatgctggatgagccaaacctcaccaacggttgcggccccatgttggaatccgagttgatcatgttgttgctctatccagcctcagtttggtctgctgtcgagccgactagatctttgttctcacaaaagcaacacatattttttgtcgagactactaaactatgtaatctcaagtgggaaataatctccaagtacattctaatcatttcttcatatttcttttcgctctgtttctctctttatacccgaagccctatggtagttattaacagtccttctttgtattaaagatcatatacatcttacaacgtccatcaggcgtctgagatggtaacagaagctattacattcgaagaacagctttcggtttggtggactcgacttcctctgtttctaaaaaaaaatcaaactcgaggcattggccagcactcctcttgatcgactcttagcattccaaagtgggctgcttcaatgcaggcacgtaatcctctattccctttttttcacgtggttctcacatgccaatgtcagcattcttatgcacgtgcttcttgatatacaggtatatcgaaacttcgatcatgctctatagaccttgtttagtgggcgtaagtcgcaccgttcacagcagcaaatgaactacagctttcagattggtttctgattgcttttgttcttgatttcgactgtacagcacttccttggacaagaagtctcacctggatctataggacagaccctgagttcgtctgctcatttgcgccataattcactttcaaatcttcaatcgattttattcgacgttacgaaacaatgctgaccttctctttcaaccaaatatatcgacgcggcagccaacctaactttatgctgtgccgaggcggctctcgcttcgatcaatacggtgttgaagacatggaacactatcctccaaggattttggtggtatgtaagaatacctaagtagaccagtttgcgagtgtgtggacctgtctcatttatgtttgttctgtatgtgcgactgttctgggacatccctaaaggtatctagtgggatttgcccacaactcatgtttagtcagtgtttttgcgcacaatcactatgcacagccgatccttgatcattcatgatgtcttggtaccgtgttgggtcctcccgcagatccttcttgcatgtgggtgtctatgatttcaatcttatttctccaactgttgtttagtatatatctgaaccggctttatcgttcatctttcgttcatagttcaaacgactccgatccacccgctcaattttcagtatgaacgcaaacaagcacgatcctttgagaccgtccaacatgccatcggattcattctacaggtcgttcagtacaacccatcagcgtttccagagtctgttgaatgtcccattccgtctgaagacgttcgtttgatgggaagacgatgcatcggcgtgttggacaaactcacgaaagttatcaacccaaggacggaaggtcagatgagggcacagatattgccgcttgatctaagaaatgaggaggcctccttcaaagatagttgttttgttgcagattggattcagagtaagagtcgctttattcaaaccgtacaagctatgtacgcactttgtctcgcgtctgatgattcagttttcctgccaccactgtagagatcagtccggatcgaagaaatcacgaattcaccagttaattccatgaaaatttagtatctcttgagtggatctggtgtctacatgtcttgttttcaatataaactaattaatggcggcgctgttcaacacaggtttattgcgaagtacgagcaccgactgggttctaagcctgcccctctcgaatggagatgtaagcaggttggattctatttattctggctctttccttctttgcgaaatatcgttcatgacagctttatcttgacatgcgctaatgggtgggtcgatttggactatgggattgacgttttctcacagtgctatcagggtcggtaagtccatcatttctgatgcatgccttgatagaagaaaatcaatcatattgacggtcttgattccccccgtttttatgccatttagggctccttctcgacgttgaagtccccttctacttgaaagacctgacgacccggtcactcgtcccacctttaacatgtagcctcaacattcaatcttggctttttaccacttgctgcattatcatccttctattcctatgcctttcgttctagagcgggattcggctagtcggtgttgtttgatgatgtacagcatctgctcctactcttgttcttttcctgttggttctccatactctccactgagatcattctcactgtatcatgaaacctttccaagttttttaccctcttgtcgagatatgtttgacctatgagagcaaatgcattatataaatcatgagactatagatgtattccaccaaatgctattcctcatttcagatgaatcctccttcctataaatcatgataacgagaaaaaaaagggaactagaaaccagctagatctttgactttttttattatattaataataattctttcagcacgaaggaacggagttggtaggaggaaagaccaaggcaaaaaaaaatccaaataaaaagatgtgttgcagatgatcaagaagatgcgtagatttggtagttgaagttgtactgttgaaggtgcgcgcgttcgaagcagagggagaagcaaaacggttggacgattgtatttcagaagaagaagatacgaagaacttgtgagaagaaaatgaagaacaggaaaacttacagtagtaggtgagccgttaaaggtgaagcttggctggtaattcacaacggacgagccactcctcgtcattgtgaccttcatcgtgctaccggcaaccaacgcataactcaatctggtcacaccagccgccacatcttgagtgacactgccgaccgaagaagtcaatgtcaccgtcgcggctgattttgcaaagacgagagcgtagaatttatcttgagagtatccaccgttcgtaggggtgggcacggaatccgcagaggccacggcgttgacaggatgaggtctagccatcaggtagaccttatcggtgctgaccgtagggtagaccccggtcttgaaggcggcggcatagtacttgttgatctccagaagaggagtatgatcgaaaccgtcgacccaggcttgggagttgggctgggctccggaaatcggtccgatgtaagaagactctccgtaatcgttccaggtgagagcctcgacaagatcaaacctggctctgttagcgatgagttggtcccatcggtaagagtacaaccaatcgtcagatctgtagatccagtttttattgtaactgtcgacaccgtaatgagtaaagaacaccggggagaccgttgtggcgaaactctttgtgccgagacccgagatgtaggcttcatccgtgctggagaaagtaagatcggtggagccggtaggccaagctccattccagttcagttctccgtctataacgttgaccgagctgaatgtgcttgggtcgacaaacacacttggcaggaagaacacgttgtaaccggcagacttcaacggggtcttgaacgctccttgccacccagcatcccatccggagtaaccaaacgtgcaatcgctacctgcaaaggtagaggctaagatcttgtttttgtaccaagcttggtttgagtgggaaccgtatgtagtaatgtacaattgaagagcagcaccgttcgaataggcagtgcagggcaagacggacatgtcaaacgagatgaacaatttgaaggatgtgccgaaggatgcagcagcggcatacgcgtaagacacttgggtccattgccaggagtctgaaccgatgttgagcgcaaagccatcactgggtatcgagaacacggaaaaccagaatcagatcaaggacggaaggccaaagtgaacaaaccgatagaaagagaacagtggagacttacaatccagcaccagcagcaagagtaatctgtgtcagccagtcagcctgggtgtatgggtacgtgtttccaaccatcatgtggacataaacggcctttgatgaatccgcaaccgccgaggccgaagccgaggcggccgaggaggtagcagatacgacagatgatatcacggcggaagaggaagcgcgagcactggaggcactcgtggctgttggcgtggctgtcgaggatgcagcagcagaggaggaagaggaagaggagtttgatagtagagaggtcaaggaggaagtcgaatagattgagagagcccaagatccaccacagacatcaccggtaccgtaacagtaccagccacaactccagctttcaagtttggttgctgttgtcgagagggagttaccgcagaagcactttgaagcgagaaagaaaggagaaaagaaaagtacagaaatctttccgttagctttctgatcgaaggatgagaatgtgcacataaccagacagacttggaaagtgatttacctgggtagcgacctcaagtccggcgatggagtaacctttagaggcgcagaggttcgtgcagccactgacggtccagccagtgagctttgattctgaatatccggtgagtgtcctgctggacgagtctgacacacaaccttggttcacccagtttgaagtcgacgagctagcagaggcggatgccacagcggaggaagaggaggtggcagttgatgcaggtgcggtgtatatgaagagcgaaagcgaccaccatccaccacagggagaaccgtctaaacggaaagaggtttaatagtattgtgtgagcacaaagatagaggataaggaagagtcgcagggaggtaataacataccagatccaacggcgctgcagtatgaatcggcaagtatcgttccaagtccggttgagccggcggtgttctcataatttccgcactggagtgtcagatattgaagataacggggtgtcaggtaaagaggagcagaaaatggcagcaaaacgaaacgagatttcaagagcacatacgaagcactgctcggtgtctataacaagtacccacagaacacgagaagtcaaacatgagccgcagaagggacaagtcgaagatataggagatcactcacattcgagtccggcgtaaatataacccatggactggcaggtggtcgtacacttttccacggtcatgcctgattcttgataggcatatccagtcagatacctcgctggtgcgtcaaatatacaacctcccgcggcccagccagtgggcagagggtacgtcgttcgggcagccagatcagtcgaggaaggggcatcaggctgaacgagaatggtggtgatggacggatttgagtgagtggtcccaacttgggccagccgagagtgatgtctccttcgagcgtttccgattgaatgtgaggaagaggcagagacatgaagaggaaggatggtggccgtcaagagaaggagggaggagaatatggaggagagcattatatggcgaaatagaattgtgtatgtagttttgaggatatcaaaacaaatggatagaatgggatatgatcggactggactggacagtctgggataaagaaaggatagattgattgtgatacgatacgatacgacacgataggataggatagatcgaattatcacgattgagaaacgagtgtgggcgtctgtcaaagacttgggagagagcgaggaggggaggggagaggtatcacttccaaagcagactagctgtttggacttggggaggaggagaaaaaagaggaagagaagggttgaaggatgaaggtgttggtgtagatagaaagaaggaaaagaaaagaaatcaagaaaggagatacatgctccctccggtgcttgttttctaatataatctgccggatctaccggaatcggaatttctcttgacgcgtcgatcgcgtgtcaatttgttaaatgacgacccagcaaggtttcgtgaaaatccaaacaaggttgggcatgtgccgtggatgggcgtggactgtcctcagtacattacacgcacacttgtgtgaaccgcagtgctgtatcgtcatgatatcccaacggcttcttgttgtgagattctcatgttggtcgatcattctactcgattagataatgttcgagacaatcaagaacaagcgagtgcttggcggcccaaagagaacggtaagcgaatgatcgagagaatcgtacagctacggaacacgttagcacacgtgaattcgttggagttatcctatcaggagcgcgagctgtgcatgtaacagaaggtttcactgtgtgtaattgattgagggatgagcgcagaagtggaagttcaggctatctaatcaaatcgttagagcaggactgcagcgagtaagtttggtgggttacaaagttgggatacaagctcggctatcggatacatggactgtggagaaggaaaacaggaaagaataaaaaaggattcaggctagggggttgagctttgaaacgcaaaggaagccggtcttatatatgatcttcagacgtcaaacgcactgcacgaaggcagaatggcgagaagatacaatacgctaaaggatagatcgtacaacatactgaacatacatgcgctggacgactgcatgttggcaagtcgatgcgttggaaggggatgatgagttgagcaagcgcaacgatctcaagccatagctgacggctgtgtaacaagcaggtcacacccctgaatacgaaatcttgaacgtaatctcacagatatgtagtaatagcattgtaataatagtcatcaggaccttcattcgattcaatgcatatagtccagtcaacagtctatatcgccttttgagtctctgtctaaagacactcatgatcaacttcagattccaggaaagaacaatcttgttcagatgtctagcaaccagcgtatccattcgctaactgaagagtctaagtagactcgatgagaacgaccttcctgctcatatccctaggttaagtctatggtcaggatttgtaacacgtgactgttgataatctagatctgggttgtcacctttcttcccgtcacgaactcacacccacatacatacacacacgagagaaagagagaggacacatactcacgtctatactcaaccctctttgtcgtacgtttcaaaaaatgccaggtattcttccaggcaacacccatcacccggccacgccgtctgctccaaggcgagttttgatcctgctcaaacgccgacctgtcttttcgtccatcctagctatcacgttagcaactaccatctttctcgttctctcccctgctcaagctcagaggatctcctcggctacaaaatcctcctggtactcctcctcagacggagattatacctcagccgcctccaaagctgctcaagctgctagcgatcgtcaacgttgtgacaccatttggagagaggaacaccggggtgccagctggggagggtcgcctgggcagtccgacgtaggcgcggtccctcccaaaggtggttggagcaaaaccggtgatggtgcagacgatgttgaggatgaaggctggggcgaggaaggtctctcgtcttcggtacatagcggttcggacaataacaacaagttcagcatggcaagagaaatcagcaaaggaaagagtagaaagcgggtcttgcaggagatggtcgccaaaaccaatggatattatgctagagactactccctgtcagtccttgttttttatttctattattcatattgtcttttcgaagggagaatgaacacttggatatgaagccctcatggatgtgcttcatctccattccctccgtctcccgaggctgactgcttgaaaacgacgtttatctcaatagctggcttggttggaacaacgtgcgatacatcatcgaagcctccgttctgcaggcagacatccttaaccgaacgcttgtcattccgacatacgtatacgccagagcttgcgaattcgataagcacacatgtgcttgtgagtctaccattagagtgaacgagggagatggcttttgtaccagatgattaagggggtcgtctttcgcgcgtcactgactcgttctcctgtgcattatctcttctttcgtagcgtttgcaaagatggtcaaccgtggagatgccctcgagtcagacgagtggagagatcagcctttggagaaacagtgggcctgggtgattcctaccgaggtctgtaacttttcatcttgatcactcagatccattgttcaaataccctctttttcatggcttgatgaacgtttttcctaatttgatctaatatcctcttacaatacgctcttacccaaacagctaatgatcgacgtgcctctacttcaagaaactcattcgatcatcaccaccgccgatttcctccttctccaagatcaaccggcttcgatcgagaccgccaaaggaaactggaacaaggcttatcatccttcagctagctatcacgagattcccaacagagattacgacaccgatctcgtccgtgtcgaccggttacctgatggataccggaccttgacacatacgcagaggaccgcaggtttaggaggagctgtcaggaaactgtttgagggatcgaaatctggcgacgtcaaggatctgggagagctgttagagaaaattacggagctgagtggaagaacggaggatgaagcagaaaagatgttggctgaggtcggcgtttgggtgctcaggacatggcagggatcgtcagtcttgtaatttcctctcctttctctcatctgacatcgcgctgcaacactctatcctttttgaaacaatcagacacaaaatggagtatgtcaggactgtgaccgatccgatcaagcaggtcgcgttaggtgaaaacatgaagggctggtggaacgattaccatcatatcactgatgaggtttgtttgatcatagttcttctccgttggcattttctcatcatcatcacgcttgattgaacgtatacttgtctcctttcgttttctgactgtacccacggatatcataggtcctgtacctccaaggcgagattcattattggcgtgagtttcttatcgtctcctttcctcactaaaaatgaatgtatctgaacacgaaaaggggaaacaaacaccttctgaacgatttgacaggaaaacccgtaagtctctggcattcctctatattacatttctgactcaatttgcttctcactcactaagtttttctccttatacggcatctgaagggttccgtccgatttacctctgccaaagcccagagcgactttgccaaagttgttctctttggaatcatgcctccatcaaagttatttgaactctcgatccgtctggacgaacgaatgagagagaaagttgggggtcggatgtggatgggagctcatatgagacgaggagtacgtactggttgtccaacttcccctttagcccactttttgtccaaactagacgtcatctgattcgtccctcgttcattttgcgaatgaacaggacttcgtgaaacacaactgggtgatgaacaacgatgcttatcaacatttcgataggatcaaaagatggatgggaactggcgcaaagtttgtcaaacgtccacacaaaacaccattgtcttcgttatttatatcgaccaaaagttgaccgaagtgaactcacaggacgcttcaaaatatcaagtcgagcggaaagcatgaaacgtactctgtaccagatgcttgggttgctagggactttgagctgtatgatgctccccaaatcggtgacccgtaagtctatcgcacctctcttgctttccttgccaggcgcctctcattcgatttgacttcatccaattcctccattccttccaaataccgtttgaactttctcagattctacttggcgaccgacgaacggaatgccactcatctcgagtactttaaagccaacggcgctatcttcatcggcgatctaatcactgctgcagacagacgggatcttgacgcctggagtctcgtgttcacagatgtacttggtgtgttagagcaaaccatgcttgcgagaggttctttcttttacggacatgccttgagttctgttgctggtgagttatccatacaaaaacctcaatatcaccacttgtcataattacgttctattgggtgtaatcgtgagaaagatcgtcagcttacatcaatcaacttgaccttcgtttcaataggcggagcggtgaatcatcgagctactctcggtatgtacatgaatatcctatatcttcttcctcttcttcttcctcgtcgaacaaccaccgtactgatatttctatttccttctgtgtctgggccttgcacgtaccttaggcaaggatcctcggacgactgtgatagattagaatatgcactcttctttctctagtctcggagtttaccttctctctattctctacatttaccattcagtcccatggatacttcgatttcgtgttctactatcttgttcccaaaagtcttttgtctttttatctttcccttacatggctctcctacttgagatgagagttggcatgagtgtggtgtatactcgtaaccacatgtcacatgatcgtaacttcttacagccctcgacgcgtcgcgtgggttgatttcttttttattttctttctgcttttaatgagattgttgcttttctttcttccgtccaacaacaaatccttctcaagctgccatggtgcgtctcactctttttggttgtatctgtcgcttgggactgcctgagatttctgaagacataaagagatatacatgattgataactggacgtttggaatctgaatcatatgtttgtgttgttaaaccttccttatctttcctcttctgtacctcttgccctcgtcatttttgggtctaaatacaaaacacgaaaatcgaacatccagtcttcacctggcccatctactatccgaaacaaacgtgctcggtcgccttcaagagatgaagactctgatgataatggacatgcgccttcttctggcctcccaccctcttctccaaatctaccgccatcttcactcccaccttcgtctcctcctccaaggtttgacgattcaggtgatgagttaccacaagacgaagaggatgtggatgatgtagatgacctggatgctgatgtagaaggcttagtccttcgaagggatgaagaccaagatggagagctaggggagggagaagaggtgccttcttcagagggggatggagagtttctgaataacgatctggacacgatgcgacagtgcgtctcatttccacttccctttctatccattctctcttgcctctctctttcttccttcatgtgttgaaaggctaacttgatctttcatccggttgatcttctacagagattatgctgccaatccggagctcgaccgatactctgatgccgacctcgatgacgaagagtacgaccagatggacgcccgagatcgacgagaagctgaagctgctatggcacgtcgagatcgaggccagactggggggagactcggaaggagatcgaaggctcctgctttcttgctttcttcggatgatgacatggctggtgatggtctgctcgatggaattgattctaggagaaggagaagacattatgatgagcgaagggatgtggatgatatggagggggaggaagacgtgagtcttcttttctttctaacatttctcctgttctatcgttcttttgtcccttaccattgcgtttgccctgtttcgtttacgtggttccctctactttttctttctaccgaatcgaaaggaaattccgttccaagacctgggtgatatcaaagccaactcgatcaatgagtgggtggccgtacctgctgtaaaacgatcaattacccgacatttcaagaacttccttatgacttatgtcgatgagcatggtcactccgtgtatggtcagcggatcaagacgcttggagaaggtatgccagtttcgattctcgcgtcgcgttcaggggaggacgaccaaggtagaaggattcaagagtgaattactgattttgcctctctttttacagttaactctgagtctctcgaagtgtcgtaccttcatctagcagcttccaagcccattcttgcctacttcctcgccaactctccccaagcgcttcttgagacattcgacgcgtgtgcgctcgatgcgattctcctctattacccgtcctaccgacatattcatgacgagatccatgttcgaatcactaatcttcctacttcaaactctctccgagatctcagacagaacaacttaaattgtcttgttcgagtatccggcgtcgtaactagacgaagtggggtatttccccagttgaagtatgtcaagttcgattgtggaaagtgtggggcgacactaggtccgttctaccaggatacgatgaaggaggtcaaaattagcttctgctcgaactgcgagtcgagagggcctttcactgtcaactccgaacaggtcaattcacatcttcacacctttacttcattattccctatcctgaaattattcgcaaataaaacaatttattgacccgtgttttttcctgtgtatttacgcgtcttctttattggcttcctccagacggtctaccgtaactatcagaagatgactctacaagaatcacctggttctgtgcctgccggtcgactaccccgacatcgagaggtcatctgtctttgggatctcatcgattttgcgaagcctggagaggagattgtcagtgcttttctttctctttcttctgttctgagaacgcactggttaacggtttgacgatgttttcatggaatgaacggtgtcaatcaggaaattacaggtatctatagaaacaactatgacgcctcactaaatatgaagaacgggttccctgtgttctctaccatcctcgaagccaatcacatcaataagaaggaagatttgttcgctgctttcaggttgacggaagaggatgagaaggagatccgacttttaagcaaagacgaaagaagttggtttacttctatccttctcttcaacaaagtcttgaggaagctgtcatgttaattaattctctgtttctatttttgttttcaagtctcgaaacggatcatcaaatcgattgctccttctatttatggtcatgaagacatcaagaccgccatcgcgctatcgctcttttctggtgtatccaaggatatcaaccggaagcatcgtataagaggagatattaacatccttcttcttggagatcccggtacagcaaaatcccaattcttgaagtacgtcgaaaaaacggcccaccgagcagtttttacgactggtcagggagcgagtgccgttggtttgacagctagtgtcaggaaggatcctgtcacgagcgagtggaccttagagggcggagcgttggttttggcagataagggtgtgtgtttgattgatgagtttgacaagatgaatgatcaggtacgtttctatatctttcatatgaggaacttcgagcagtatcgtctcattatcagggatctgattatattgctactctactcttttcaggatcgaacatctatccacgaagctatggaacagcagtcgatttctatttccaaagccggtatcgtcaccacccttcaagccagatgcgccatcgtcgccgctgcaaatcctatccgaggacgatataaccccacgatccctttccagcaaaacgtcgaactgacagaacctatcttgtcccgatttgacgtcttgtgtgtggtgaaggatacggctgatccagtcaaggatgagatgttggcaaagtttgtggtaggaagtcatttgcgaagtcatccggactttgagaccgcaatcgatgaagtcaacatcgccaccagtctggacgccgatgtatgtataatattctttttgaaatgcagatttctatcttgatactaacgccaaggtgaacgaatgccttccaatgtgtctgtctatttgacgtactgattagatcatccctcaagacctcctccgaaagtatatcatgtacgccaaagatcgaatccggcccaagcttcataatctggatcaagaaaaactctctaggctatacgctgatcttcgacgagaatcccttgcaactggttctttcccgatcactgtccgtcatctagaaagcatgattcggatgtcggaagcaagtgcgaagatgaacttgagggagtatgtaaggagtgatgacatcgatctggcaattcaagtcacggtggctagttttgtaagtgctcaaaagatgagcatcaagaagacacttgaaagagtgagtcaaacttccgtttttgctgttttctgccttgatgagaatattttagcttattgaacattctaatttttcgttctaggggttccgtaaatatctcaatcaagcgactgatcgtacgtttcactttgttaaaattacaacttgttacctttccttcaacaaatcgactgatcaatatccatatctcttcgcatgcacaacctttgtagacgaggagctacttgcgttcctgctcggtcaaatcgtcaaggagaaagcattacaataccacagtattcacggtgaacaactcgaccaagtcaagatcagagttgtcgagcttgaagatcgcgtatgtcctgatcctgtgcttttctatacattcacacccacttgtccgtcactgaaaaattgtctgcgtcttttgtttttgttctccacaggctaaggatcttgagatctacgaactttcatcgttccttcggtcagctctgttcaaacgaaacggatacgtccatcagggtaaagagatcatcaaatcatttgaacgaagacggccagcggaggaagatgaggagatgtaatctcttttcttttccttgtctactttgttctggattactttctactagggttttggctttatctcttgtgtcccttcttttctgtgcttgtatactttgccactttttccatcatcgtcggctttcgtcattcgtctatcttcgttctatttcatctttctaaatcttcttgcgccattccctctcctgattcaatatcacgactctcttgttccgttggtcgccttctgttcgttcgtataactatgttgtttcatattgtcgtcagattctgatgcactctactcgccgccccttctttcctgttgaaatatgcgatgtgactgctatcagatactaatatccacaaagattgtttgaccgggacatttgattatacagcaggtttagtccgctcaggatgatacaggttttttgtgcgctgttttaggagaaaaatacattgtgtgaaaaataatataagggggatcatccgtacgttgcaaagcggactgtgcgaagctagagtttatgaaagatgaaagagggatgacatcgaaaactgtaagaatgagatgagttggagattagctgtaagaggagagcagaacgaaccattttaaaactctactgtttgcaattccacttcgaaccaatagtaagaaatttctagtaaacatcggtccttcgttgtttctccactgggatttgtttcctcacgccgtggacttcgtccagatcgatgtcaaccacgacccactcggacttcataggtttcactctgtccgctgctgggatatcaactagcgaggacagccgaccgatctcgtttccccacggtgaaaagatcagggtttcaccccaggaaatgttatcctcagcatgagcgcccgcctgagctggagcgatgacataaacctgattaaaaatagcgatggccttgagaagaggataccaatgatcctttccggtcttgggtccaaacacggatgggaaagtgatgatttgagcgcctttccgtcggagagctaggtgcatctcctggaatctgtagttggatgaaaaggttgagcgaaaaagagggagttcgctttaaatacgcaaagctatatatgcgtgtacaaatcagttacgcaacataccggatgtcgtagcagatggccaatccgaccttgccaatttcagtatcgagcggatcacataatctgtttccagacatgatcctgctgctctcggttggagcctctttcggcggctcatccgaatcttcatcggagggattagtgttggggataccagactcagccgaagaagcgtttttcacatccaagtcacacatatgaagctatgttccagttccaagcaaatgaagggatgcgttggtaagggcctggatctgaactattgaacggcttatattctaaactatgaacccacctttcggtaggaatcaagaatctctccatcctggccaattataacctgggtattaaagactttttcacttccttctccatcagggttctcctcgtcctcgccagggcgttcgtgaataccagcaaaaatggtgaccttcaattctttggcaagggaccgtatggccagctgattgttacaaacgttaacgactatctatcgtatatggagttatgaggaaagaacagtagttacgtacaacgtatttgtgatccttcaatgttccgctcatcaaatatcctttgtgagcgtccccggtgaggtagtcagcggcttcgggaaggaaaatgacctatcaagaaaccagtacagatggtaagcatcggaaagttcgatccaaagacattagaattgatgcttcaagtgcttggctccaactgatcaagcttggatgcattttcagccatcccgtttcaaaatacttacacgtgcaccgtcttgagaagctcctcggatgacctcctcagaaatccgaatattccgatcgacgtcatcggtggacgttatttggcaggcagcagctttgaccattgtttcaaacggaatgaatgtggtgaacttaggttgatacgagattgataaagagatgtagctgaaaagaacggcacaatcgatcttcttcttatggaaaatcgacggaggaacggatgaaaaaagagtcaacttcgatcggtcgagagagacatcggagggttgtaaatattaggacggtgacatcatcagcctagataagataaccagcgtgacaccaacgcgtcgacgcgtcagataacagttttcttgttcggccatcgttctacattgtctggtcactcgcttgtatctgcaccggtgttgctactgaccctcacactcaatctcttgatcgctgatctgttctgtgtcctggcatacaatgtctcaacaacgtacgacaatcgttcatccacttagtccgctttctgtgcttcctcagccaccgtcgctcttgccgttccatatcgattacataggcccagctcctgtgtcgacttacctcctgactcgtcctgcaccgtctccatcctccggctctacctccaccctatcatcttcttctgattctttacttctcagctcattccgaggtagacagatcgttggtcaacctctggtccttccttcaaattatgaaggatacatccttgatgttcccccgccgccttcgactcttgcattatcatccggtcccagcttgaaggatccctcccagcgaggaacaacctttggtcaggcttctctcagacttgataaaacacaatcaacggatcagcccagaaagtttgcaagaacaagatcggctaccaaaaggttcttttcggaacaggaagtgacaccttcatcaacggaggccccatcattccgagccaaacaactaggagcaaagaaacaaaaggtggctgctaaaaaattcaaacttgagtcagactctgaagaggatatagatggtgaggaggaggcccaagaaatcaaggccgttccaaccgctataccaatcgagacaacttcctcgacgtggacagtctcgaccgtcgttaccgactctgattccaacgttaacacgcaggaagacgaacaaacccctctctcgacgatatccaatgctaccgctctttcctctgttgacgctactggcttgacagcaacggatgcaacgacaacagtacactctactctcccttcaacggacatgtttccttcttcggatcagcctatagattcgaaagctacgcaggacacacttaacctttgcccatcctctgttccttctgttctacatgatattgcgccttcagaccctttggcctctctaccctcagaagagattgcagaagatgagggagacattcatgatgtcaacctcgatgccgaagacgatgcagaactctacacaccccctggtcctccgccaagagaacttgttccaacacatacgttcaagcagatcaccatttggacggcagacgatccagttgatagagctcgtgacgagttctttagatgttttgatgtaggaggttggattgacttggcgaaggctatccatgctgaggattaacttgtgttttcttttatcatgtctatcatcgccgtcatgattgttgttgtttttttgcattatcattatcattatcctcggtcaaactaccaagacacaacacagcaaagacaactgcattaacaccaaatcgaattcttaaagccataacctcttctttctcaatcaacccttgactcaaatctcaaccaccaacaaacatcccaacaagttctctagatttgagcagccgcgtgtctatccatcaaaagagattgaaccaaagatgaatttcagatttcagttgaaatatacgacagagaagtgagggcttacccgtccgctcttagatcacttccagcggcccaaactcgtctgccagtcgttttgtctttgatctgttgaataatctatgagcattaaacaacaactgttacatatcagatatttgtcccagagacttgaatcaagtcaaagaagacaaagacgtggaaagctgaacgaacctgaccacggcccaaagtagctcgagcaaagcctttagcttgtcgagcgtcatgacccatatcttatcaccatccaagttcgacatacaggatgtccaggtcagccgtgcaaagctttctactcgcaccatggacatagagagatagacaaaccgcgaagggcctcgactgtctctataggaatcccctcttcgatataaacctaatccgtcattcggcgcgcagttaatgagtgagagagagagagagatatgattaggttgggtctcagtctgaagtagagttttatttatttgattaagaaatcaaaatctgataagaaagagacaggtacctcagagttgacatctccggctgaatggctcgtcttgacttctgcatcgggtaacccagcctgcaaccacgttatgttatcaaaatgactctactcttcagagatcacgcaagcccatcaatggtaggaactagacacttacagagatgcaaaatctcggagcatccaaagcctcctgaggagtcattccacggagcatgttcaacaggacctgtacgtgtccttgaggctgcatgaaacctgatgattgccaccgttttagtacagattgatacatcatcttgtatcaaatcggtcggacagtttgggcaatatgtgtacttcgtgctcaaaaaaaacagacttacctcccataacaccgtaagaaaggaacaattcgtcacctctaagtgccatagcagggactaaaagaagaatgaaacgggtcggaaccatatatcaactgtcctgttcccaggtcctctgatcccaacgatacagggtcacttactgatcgtgtggtacggtcgctttccgccctaaaacccgtcgaccccaatcaccagaatacttcttagccaaaattggtggtaaactcggaagaatcaaaggtaaacgcaccttgagctcgttgggatgaccctcctcgagggtgaatccacttcctcggtctatgcacatcaagtttacatgtgttcagtcagacactccatccattgggttccttcaagaaggaagcatgtacagaatgggaaacatactctgcaacgtgaatccacagccggcgggaatagcacccgtcccgaaccctgcatagttagaggcgatgaaggagcatgcattccctgatgtttatcgaataagcgtggaagtaagaagtatattaaatcattcaggtcggtctgtttcgatcactcattttatcacgaggccacgcaacaaagaaaaccccgagacaaaccatctttatcgcatgtcgtaaagtatactgtgtctgtagaagcgcaaggcttgccgtggtgaacagaggcgactgcctgggaaggatcaaatagtttggctcgggtcttgagatattcctgtgtacacatttatggggttgttttgttgagaaagagccaaaactttcttggatatttagtctgacttataggtaaggtagactaatcttacctcgctaaggagctcggccacaggtacatgaactttatcgggatctgagacgtaatatctaattcctcgttccgtccacaggaaacacaccggcgggcaggtcacgattcattagctctgcgatccagagatgatacaacagcaaagaagcgtgtgatgcatcttcctaccttgtatcggcgaaactcaatcgaagggcctcgatgaggacatgaaggtactcgaccgaattgtgatccaaatttgtcaaatcctgtatcttgcccgtagcttggatctgctctagtatacccagagcgaggagcgcagtgagaccttgaccgtttggtggacactgggtttatggtggtagattgtttgaatcatttcgtttcagtcttggttgaacatctcatgaacatcatgtcatgatgtgttaaaataccgattgatttcacagataaacggacggacctcatagatcgtgcagtcgttcttgtacgtgtaagagataggttctacattagcagaatgatgagcttccaagtcggatagttccatcactcctcctttgctctgttcgataggaacaagagaaaattctttgtgagtcttggaatcaacctgagcaaagatatacaccgagagagagcaaacctgaatgagatcgacaatggcctgcgcgatccgtcctttgtagaacccatctctacctttctcagcaacctccttgaacgtgttggctaagtcagggaaccggaagatctctcctgggttaggcgcccggccatccaaaagcatgctatccgcagaaggcgaggcattcttgatgagattgactgaacgctgccactattcgagataggtgaggatatcattgagaccgtcagacataactacaaacaggcgcagagaaagataagggaggacaaacggcgttactgtgcaattcagagacgggaacaccttcttcagccagacgaatggccctgagccatgcagaaaagagcgagcaacacgattagtttttagagttagccttaatagagaaaacatgcgacgaacggatccaggatctctctcatcgataattttccgcttccgaactctttgatagtcgtacaccatccatcggtcgctccgggaacagtgacggagttcaagttgtcgagagggatgtgtctgccattaatcccgacgctccgagcatattccatcgtgagcttggcgggtgatcgaccagatccgttgatggctttcacggtcttatccgatgcattatagtagaggcagaaaacgtctcccccgatacctagtgtagagaaatttgtccggccgaaaaactcagtctacatgtcatcaccttcaagctttgaggatataacccatggagagagaacataccggtgcaagagggctcggtcacgttcaaagcggcggccgtagctacggcggcatcggcttatgtcggatagccgttaccggcgtttattcgcgacaaagatgaggattcaaccgagaacaaaaaaaattaatgaaaaagaagagatgtaagcatatacaccactacttgaagcagctttaatccatctagacagcaaaccagccaacggaagacgaaccggcatttccacctttattcaaaacctcgattccagctgagacagccaaaggttgagaggccgcaacaagtcctttggtagagaacactacggatcggctgtatagatgagcatgatccgagtttaattctggagccccgatttgactgactggatttgtcgacgtgatgtgaagacagagtcaaagaagaggtgatagaaaggaaacacgaaccgagatggatgggtcgcaaatgcaacgtcgacgttcggatagacgcgagaccaatcgttggacattctgattagatcaaactagaagatgatatctgcgggagtgagtagcgtatactgagcaagggtggctatcaagatgggatggagatggagagaagaacgaagaacgaagaacactaagaagtacccgtgtgcttcaaaggtgaaaagcgttgatggcatctgtacgagcgtcggccaagtccggatggatgatgtatcagggatgttagggttacggccgctcttttgtaatttatccgttcagtcttttggcggctcacattagatgatgaggaggtctgacgacaagcttcgcaccatcatcactcaatgattcccatacatcccactccttctttacagtgagttcttgttcgttttcctgagcttgtggtatggatctttctcatcctgtctgcttgaatctatagtacacccggccttctttgtctcgttctcgatttgaccccgctatcctggcacgatgcgtctcaaccttcgtcatcttctggcccatcaattccggaccaagccgaggagtcgttcgagttagagtccatgctctctcacgtcatggtatttttgaacgcgtttttggctgagaaagcaggtaatggactagccatctggggcgtcaaaggtcgaagaaggtttgtttaggtcgtcttctcacgattgaatgatagcagtttgagttggttctgatcaccttatgttgtgtgaatctggtagctacttgttatatgccactacagacccgatttcttcagcccatagaccagaccctaatacatttgagccattcaaaatcatggctgatagcgtgatatccaaggtcagacaaatcatgacggacgagtcgaatcccaccgaaggaatgggtgcgtgtcttgttcttcttatgacgtttcgttgtaccttccaatgaatcttgtgaaaacatctgacttaaatctttctctgatgccaacataaaaacaaccatagagacaacatcgctggtgacagcactgacgaaagcactttgctgtaagaattttgcctgttgatacttggctttcgtttgcttcccagaggcttacatattcttctcctgatgcgtcttcggacccccgcttatacccatccacctagatatcaatcgcctgcataccctctcggcttcatccactccaatcatcatacctcctcctccgcgtccctcttcgccttctgccaatgctcagtcaactgctgctcctccgccatcagcggcggttttaaaggcgaattcgttagcggctgagaacgcaagttataactcgagaattctcgttgtaagcgcctcggaggaagagagctctggatatgtcagtctgatgaactgtatcttctctgctcagaaggcggtaagtacagctttcccgtgatgcatgcttcttctttaattcattacagcctgatgactcttgttctgtcctctctttcccttccctttagagaatcatgatcgatgtttgcaaagtgactggatcggacgcgatcttcttgcaacaagctgctcatctgaccggtgggatctaccttcgtactccaaaacgaactgctcttcttcaatacctcatggtgcgcttcctctttgttgtctgatgattgaacagaaagttaacctcctgcattcacaatggcaccgggcctgaaatcataaatatagatgactttccttccgagcagaccgctcagacaacatttacttctgccatcccaagaaagggtcgacttcagagccgcctgcttctgccacaaaacgatcgttgacgtcggttatgtttgttcggtctgcctaagtagtatgtctcccaagtgccttctgtatgtaccactacttaagaccagcccatctcattctgatctctttttgcttctacagtattttgtaaacctatcccggtctgctcgacatgcaagacaaagttcccgttgaagacactccaggccctcggcttcagcatgcctcggccccctcctgctacatccgctgcaggcggagcaggcaaccggttagctgctcttcaagcaggaagatgactctttgctatccatgtatagtatacagatgattgtatgcgcatatactcaaaaaagcataaggaaaataatctcgttgagtcaccggtaaattgaaactaatgactccatggtttccatggcaacatatgcagccgcggcctaccttctcttttttttttcccaactccacttgcgatttcatatggcttgaacatctttcttcaacacacatctcttcctcttttctcctcacatccatcatacagaaatcatcatgtccaagctttctcacccttctatcaaaggtagctttgttcttggctgcagagatgagttgataactggattgtcgtattgaccggaatggtttctcattcttctcttgttcttttacctttatctagacggctggttccgagagatctcgagccagtggcctggacaggctatgactctccagttcagttcttcagttcttttcatctcagctcatcctttcaatgaatcctttgaacataactgacctaatgaatcgtgcttgtgcctcaacacttttccggatttcatcttcttatcggctggtcggttcgtcatccgttacctataaacttaaacttcttaaatacagagttaagcagatcctccacaccgagaagtccctcttccaggacgtcctcgtgttcgagtccgagacctacggaaacgttctcgtcctcgatggtgtcatccaggctactgagcgagacgagttctcgttcgttccacctttgcattcatccttcgcgttttattcgcttcaatagaattgcattttgatcactggtgtctcctcgatatcctgatatctgtcaaaaacagctaccaagagatgatctctcacatcccgttggcttcccaccctaatcccaagaacgttttggtcgttggaggaggtgacggaggagtagtccgagaggtccttaagcactcgtctgtcgagtctgtcgttttggttgatattgatgaggtttgtctcttcatcatgatctcctctttcttctacagtttgagcaaaccgttgactctcatcgattgcttgtctgtttccttgtgtttactcgttttcactttgtatcattcatcaggctgttccccgggtctccaagaagtacctccccggtatggctgatattctctctgatcccaaggtgaccgtgctcatcgccgacggtttcaagtaccttcctaccgtcgaaaacaccttcgatgttatcatcaccgactcttccgatcccgtcggacctgccgcctccttgttcgaggctccttacttcaccttgatgaagaaggctcttaaggagggaggttccctctccacccagggagagtgcctctggttgcacttgcctttgatcaaggacctcaggaccatgaccaaaaacttgttccccgttgccgagtacgctttcactaccattcccacttgtatgtctccttgtttacctttctttcgagcattgtattgagtgagcttgagttgactaaagtaatcgttaatttgtacgatagacccctccggtcagatcggtttcgtggtttgctcgctcgcggctgaccgcaaggtttctgagccgttgcgagaggttcccaactgcaagtactacaacaacagtgttcaccgaagcgcgttcgttcttcccgagttcggtcgagctatggtcgaggatggcaaggatctattgacgggaacgttcggaggagttaacactgctcgattgaacgaggctgctaaggctggtcaaagtggaaagaaggtcttgttgctcggaagtggtttcgtcgctggaccggctgctgagtacatcaccaggcagggaaacgagttgaccatcgcctgccgaacgctcgctaccgccgaggacctcgcctcctctctccctggcgctactcccgtttctgtcgacgtctcgaactccgctgagcttgacgtcttgatggagtctcacgaccttgttgtctctttgatcccttacacctaccacgccgacgtcattgaagccgccattcgaaccaagacccacgtcgtcaccacttcctacgtttctcccgccatgaaggctctagaccagaaagtcaaggatgccggtatcactgtcttgaacgagatcggcttggaccccggaatcgatcacctctacgccgtcaagaccatcaacgaggttcaccaggccggaggaaagatcaaggagttcctttcgtactgtggaggtcttcctgcccctgagtgctccaacaaccctcttggctacaagttctcctggtcttcccgaggtgttttgcttgctcttcgaaactctgccaagtaccacaagggaggaaagaccgtggaggtcaacggaaaggagctcatgggagaggcccagccttactacatcactcctgctttcgccttcgtcgcctaccccaaccgagactccactcctttcctcgagttttacggtatcccagaggccgatacttgcatccgaggaactctccgataccagggcttccccgaggtcatcgccgcgcttgtcgagatgggtttcctcaacgacgagcctaacgcgaccgtcgagaagggagctgaagccaagacctgggtccaggtcatgtccgccgccatcggtgccgaggaagcaaccgagcaagccatcgttgccaagctccagacactcaaggctttccagccggcctcgctcggttcgctcttgatctccaagttgcgaaagttgggtctgttctcggataagaaggtcactccccgaggaaacctgttggacaccctctgcgctactctggaagaggagtgccagtacggagagggcgagcgagatcttgtcatgcttcagcacaaattcgttattgagaagaaggacggaacaattgagaccatgacgtcgacccttgaggcttacggaaagcctgacggtccttccgctatggcgctcaccgtcggtgtgccctgtggtatcgccgtccagctcgtgttggacggtaccatcacgcgaaccggtgtgattgcgccttacgatgaggagctctgtgttcctcttcgagccgctttggagaaggagggtatcaccatgatcgaggaggttctttagatttggctgaatccctctctaatctgtagcttttcttcttcatcatttataaataaatccgaatcgtctgaatgctgtttatcgtatgtttctatggatatctctgagaaagctcgaaagtattggtgacatcaaacggaacgctacagcggggctgaccgaacataatttgagacccggcgagtttttaccggcaacgactattctttagattttctcttggatccctcatcatacatccatcactttcgacacaaacacaaacacacatatcttctctctctatccagttgtctttctcctatagaagctgaggttggtctagtaaacaagttcttgccaaatgttttacaatttgcacattccatttccttcagcctcgacttcctcttcctcagctccaaccaacaaaccttccaagaaggccaaaggatccaaaggacagcccgtgtctgctcccgctgcaactcgctcgacctcatgcttcgatggagtaccgagggatgagaaggagaagatcgagtccgcggtgaccatgtctaggcatcgttcgtagagaccttccattttgatttgctctgccattcctctctgtacctccctctgcgaggcgagggcgtactttgagtggggttcatgatcttgtttctttgactgacatcatctacgcattgtcactccgaacgaacatgtaaaccacctcatcagttggctattctgtcgtggcgtttactcaaacagctacctctcagattccaacgaccggtcaccaaaacccatttgccgactcaaaggtcccattcggccacttggaccctcggtatagtacgaacatgatggatcaagcaggtagaccggtggtgcaactcagcagactacaccttgttatggatgatgctagtttgctagggagtgggccgggtttcgtatgtttctttctctcatcgattgtgtccaaaccgtgcttcaagaggtctggctaaatatttaaagtctaccttcgctcctctttgatatcttcttgatagaccgcccataatctgccttacttgtcccagtacgacttgctttccgttcagcctctctctcaggctgcgttcttgcacgcctgtctcaatttgagtgtccccggcccaagtcaggtagatagctttttcctcttgtcgctttatgctctttcggctagaaatattcttctttcctgtgtttggtgaagctcgatgctaattgatttggatgtattgatgaaatggtaactatctagatctctatcatcactctcgatttttcgagtttacctttctcgactcgaggaggagcaccttttagactcaagagaaaacctctccttcaagctatccgttcaggcgttgttgttagtctctctctctccttccttcttctgtcgtttcttgagagattctcttgttattcagaatgagtcctaatctctattccttctgtctaaccctgtgtctgatgtgaccagtttgagattttatacacacccctcctcccttccgctggtgaatcatctgaagaaaatgctcaacgaagaaggacaactctgtcgttagctagagatttgatccataccaccaaaggaaagggcgtcatcatttcttcaggaggagccaaatggggtgacctaaggggttcaggcgatgttgttaatctgtaaaaccatcgtgttccctcctttgtcctctttcttgtaagaaaaatatattgaccattcgtcttgggttacgatgcaataaactttcagagggacgatcatgggactcgctccaaaccaggctcatgatgcaatctgtgctaccgccaagaaagtcgttctcaaagcccgtatgtctgcttttcctgccttgatgcattcgcttccttcgagacgcgtggtgaactggcttgaggtggtctaatgttttgtcaatcggcatatctacatccctatctcaaccttcttcttcgtcgtccttccagaaagccgcaagacgttcaaaggtattctgagtgcgcctcgagtgatccttcctagttctcagtcggaaccagtagtagataccggatcgaaacgaaaagcgtccgatggttctatggctgttgaagattattgatgaacttcaactcgaaataatcacatggttctgatgtaagcgctgaaagtgtacacgtatctcgaaaaacgaaacgagtacacagtcgttccgccaaagaaagaaagagaaagaaaaaaaacttgttggctcgtgtcgatcgcaaaagatctcgaatgaacaactaacactcacgcacctactaactcattgttcactcgaaaacatctttctcagacaaagatgtctaaacaggtcgtagcccacttcatggtaggttgatgcattcgatctgtatagctgacctcagtttccatgagcccttggttctgccagacaaatgtttgaagagggaaaacgcacaaaatagaagaactcacccgctaccttggtttatcttttcttgacaacaacttcacggactgttgttaatcgcccccacaaatggcaatgaaagctgggaaacacgtattcgtatacagatgagatttgggtcgaacagatcgaattggctgtcaagaccgggttgtaagttctagtaggcttctatggctatgagagatggtcaacaaatcggccagctgaaatagtgatcggctcggttgtgcacagagatggattgtcacttaacttaggcccagaagaatggcaatttgatcaagcctgtgaatctttctctctttcttacattcctgtttcattcaactcgatgtcttgacagatgagaatatgtacatcgctaatccaggtatgattcatcataaatcgaccagtgcgagcggctcaactgtgtccccctcacttcaaactctttctgtccttggacatgaatgtccttccttcgtccacaacttcctccgcttctcttcttgcctccaagatcgtcaactttgcgtcatgtacccggtatctacttgcaaacaaagacccctcaggaccaggtactcatcaaatgacgagaactggaaagatcgtcgtttctacctttggaggggcgaacgctacttttggtggtattggatggaaaggactgttcaaaatggttgagaaggagggattcaaggtaggggctctcagtattatgacataaacgtacgcacacaaaagctaggatctgattactcttaagcgcaatcttgatgatgctgtccgacttttcattagctctttttcgtaccggccttctttctacctccggagaagatcatgaccgatccgttagtggatggtacgttctcatggaataccgcttggcccattaatggctctggccatatcacttccgatgaggacaaaccattcttaaaatctgtgagtgcgttctttcttctttttgttctggctttttagaacctcgcatatgcgacatagtctgatgcctcttcttattgtacttgattcggatttgatgaagtctttgttcaagaagagaaaaccgtatatggctgcagtcagcccgtgctttttcactcattacggcacggagcctccttggggctggaacaagtaggctgtcactacttcatccttttcgaactaaataaagtgctgctcgagctcatcatacccacgcgtacgcgtctccttttatgtttttagaaattggatatgtgcgtgtgatagatttcctttgttcccttgtccagagatgaattctaaagcgtcagtcaactgaacctcaaggctttttgatattcaccttctaaacagacccgtctgatagggctctttactcaaagaggtggcatcagatactagaatttgatcctgaatgggtgcagatcatcagctggaatgactacggagagaggtgagcagttggcgtcgttttcttgcaaagaatagctgaactacgttcttcgacgatgtgtttcgctcatctcttctcctcgtcgttgttcggttgttggaaaagccactgtaagacactcttgcggtctgcgcttgacgagatagatgttctcgttaattcgaaacttacactcgatttacgttgtattcagacataggtcctatcgtcggctcacagccaggctctgaagcttggacgacaggattcgatcactctggcttcctctctctcactacgcatttcaatcgactttataaatctttgactcccaatcgtactgttcttccatctcaaagcgggggtagtatcgtacgagatctaaaagacaatatactggatgaagaacaggagcgcctcgttatatattacaggacatgtaggaaggaaggacaaatcagagaggatggaagggccgatagggtcggcaagccagacagagcagagcaggttcgatttcattcagttttctctcgacttacctccttctaaaagcgtatgcctttgcgacggctcattatgcaacattcgtgtttgaggaacgacacaggcagaagatctgatgacaatccactcgattcttcaccaaccttatgtgctgacgatcacgaccgagcccagttcctcgcgctcatcctcttcagagtgtgctaccgaccagattgttccttttcaaaaaggtggaatatcactctcttcccacatcagacttccgtttcttgtttcgtgacttacacaactcaactactctatgcgacaacatgaaaacgatctataggttctcgctacctgaccgtccccttttccccaggaaggatcttctttacagtatctcaagcatcggatacagaagggaaggttgtcggtcgacttgaggggatagagatccaaagtgaagtccttaatgggtataacttcaacctgtgttcgaaggtcctgcatatccgatcagatctggacgattgaagatgcgtgctggaaaagccgtcgttcaagtcggatgttttcttatgaaagtcagatgatatattttgagatttctcctttttactgaattgaaactagagaacaggtagataagaggaacgtgaaggaggtgaagaaagatggtgaagctaacagatctcaacgagggaaaatgtcatcgaaagatactgaaagcgatgatcggtaagtcaactgaaggagaaaaggaagaaggctgtgggaaagaaacggtatcagagttttgtccatggtgaatgtatgcaagaaacaaaagagaaacacgaagggaggagagacacagaggacctcagaggatgctcgaagagaaaggcgtagaaacagagagaagaagaggaaacaagaacaagagggattgagaggaacatatgacttgactgaaggattttactgtactccagccgggttcgctcctcgcagtcggattcttccatccttggtgcgctcggtgataacctgtatgcattcgatcagacgagaacgaagtatgtgctgttcagtatagtttttgggactcgagatagtccaatactctgctccgggaaggatacacatacaggggaagcagctggtcggaacttgtgttcgtttgaatacctgtagcacagcacgaacatacatcacgatcaaagtcatttgtaagaacgttcagaacaagaccaatcagacttcttgtcagcattggacctaattggcaaggcataccagaggaggagggcagcatgcaagagaaagaactgaccttttggcatgaacaacatttggcccgtacctgctctctatcttttccttatagatctcgtcaatcgatttgtgtttgaccatgttcttcgagttggacagcctcagcgagaaccagaagaggaaagcaatgaccgcaagaaggagcgctcgtttccagctagccggaggaggagggttgaaatctcgaggagttggaacggttcttgggcgagcattctgtcgacgttgggagtcagacgaagtgctctccctcggagaagtctcgtccgaggtggggatggcttgatattgattggacatggctgattgatccaagttgtgtgttcagcgagtcgtccagacagaagccagacataagaacatacagaaatgaaacgtacatggcagactgcgatgatgatgaggctgattgaactgctctggttgttgctgccgctcctgatgtagatgatggttcaagtgagagttttcattttccactcgtttaccttcaccatcgactaacatcaccatcccatcccacttcgccatcggctcttccttcactctcttctatctgttacatattccctctgctctatccctgatcgatctcaagtcatgatcaacattcgaccggtggtgtccgctcccctaggtacggcacttgaggatcctcctgatacgcatcgagatcttggatcccatgcttgctctcaatgttgtataaacatcggcacgaacttagactaacaatcatgaaaccctcggtggtaaaacgtttctttaaaagctggctgctgtagtgttctttcggtatttggagtgatcattctctgtggtaagcttagctcccaccttgcttttacacaactctcggtggaaactgatctgaatcttcctcttccctcttaattgttgtagctgtactacccgttttcttctgcttgtctgccttgtgttctttcttgtagctcctgactgattcgtgaaccgatatgggtctctactcgtagttcggttggttctttgatcacaatgtcgaagccctcatgggctcaacaaaggatccgttagatggacacgcggtaagctccgggccttctccatctatggattgtctcctctcctcttccccttctcggcttcttctttgcatcatgtcagttctttcgagcaagacttcattgacaaaacgtgtctgttcttttgttcttacgcgtccggtccttttcaggtggccgtgacttgttacacggcagctatcatctatgtcgcttttatcgtcttctgcggttgccaggttcgtaggttgcattcgagatgaattcaacatcaccatcaccgtactctttaatacaccacttctactatgtgggtttaggatacttactgacagacgttctaatgatctcatcatatagatgggcattcataacagatatcctcgaggagtgcaattataataattcacccaatcgagtttctttctacaccatattatgtcttctttttatatgacaactgtcttccaacatctgaggatgacaaccttgatcaacggaagcaaggttcctttcgtcctttattgactcggctgatgtatcaagcatgcggaaaatgttagagaatatacattacgattactcgtcgtctgggtccacaggtcgaacccaacctgccgctttgcccctctattgttgagacacagagagagagagagagggaaaaaggacgaatcagcacatggcctaactcgtttatacgagctcttggcatcatttagaagagtagaacaaaaagagggagagaatctaaccgtgcaagcatcgtacagctctaacgtcacacttgccaggaaacaagggatttcctgtctttgcgtgacccaaaagtctcttagttcatcaaagttcttggccatagagccggtgagctgcatagttccgaaatgaccttcttgggaactgaacttgaaaccgagcgccgactttgaggcatacgtcgtatttagacggacgtcaccgtttggcgaaaagttgattcgataaccaagaagagaatatagtgtatcgaggaattcctgagattttgcttgaaacacctatgtatgacacacgagttaagaaaaccaaacgagaatgagcgatgctttccaagagtctgaaagaaactcatagcgcacctctttcaatcggagaagccgtttctctaactgagctttctccgcttctttttctttcctgagcaactccatcgacactctgggcacactctccccttctttcccctcaatcattcctaacagcgcctggttttcctccctgagtgcatctagcgtagccgttcggatggcaagatcctgggaagaaggattgatcgaaagctgtaggcactggaacgtctcaggattatattctcctcgggcgactcgacgttcaagcagtgagatctcgctctcaagcgaagtggtttgatctcgaagggagaatagttctgattcaagttctggtagtgaagtaagttctgtacagatccattcaggtagggaaagaagagaagaggaaaagaaagagaatgcaggcgttgatttgattagatctaactcactccgctttcgcaaaacatgtattatagacggatcactcggacttacgactctgcaagcttccgacttgttggttcagcgtgtcccgttcaacggacagctgatcaaacatgtcttttcggacgtatccctttccggcagccacatcctcctcgagttttctcgaatccttttccattccctcaaccttttccttgtaactctcaagaagctcttctaaccttctgaccttgtccgtcaggtcaccttcgctcaggacgccagcggctgaggccttccttccgccctcggcagtgacagctccatccagaattctgacttccttgctcatcaactcggctctcatctctgcgttctttcgaccttcctgggcgagacggagttctcgctcgagtgattcgacttgggtcgataagctcgagattgctccccgagaggaggcagaaagagattcgagtcgagcttggagggatttgatctcggtctctttcacagatagagttgagagagcttcttggtggagctgtatagttgtttggagttgtgtttgtgaggtttcagaggactgggcagatgcaagcgcactgcatgggttgaagatgattaaaattaaggataagagtgaggttaaaggttgatgataagagctttgacgagctatgaagatgaagatgggcgacagaaggaaagcaggaagacggcacgaaagcatgactcactcaagatcagaacgaagtctctcagctgtctctgcggccagatgacatttgtcaccccatgcgcgatctagttctttgatctgctgttgtagtatctcgacgtcatcttttcgctgtcgaagctggacaagctcggtcttcatcgttgacatagctagatcctggttctgtagatttttggcttggccttgtatgattaattgtcaatcgtagaaattccacttgagcaagtacttctcctttctttcgagcacatgatgtagaaagggcaaactcacgatgcaactcttctctgagaacgactccaaccttttcttccccttcttccctcttggctttctcagcctcctcaatcaattcttcgacttgtcttctcaaacttccaatctcaagctttctctcctcagccctctctctccattccttggattcctcctcaacaacctctaactggccggtcagcaatgtcacctggttttcgagcgatgtgcgcgttgaatttgattgatgcgtcaatgtcgttagctgggtcgagagttgagcattggattgctgaaggtcgtttcgctcggaccggagccgatggatagtctgttgggacgcttgctgtttagcaaatccaaccccagattttccaacccgtcagcggctagaagatgggatgaacgaaagagaaccaagagcgacgtaccaatgtttcaagctctttttgactcttctgagcttcagtttcttctcttctagcatcatcctccgctaatcttcgattgatgtctcgagcagtctcgatctcgtcccttgcttcttccaaaagagcgagaagctcagcttctttttgctgggatgctcgaagacggcgttcaagatcactctggaggattgcctgggtttttcgagcggtggacggaggttctacgttcagtatgaaacaaagatgatagctcaagaagaatatcagttgttaagtaacgcagcaagtgaacgatgataggaaaaaccacacatggtctcgagacacacacataccttgggttgaggaagcgagaccagcatgctcggccgtcctcttaccaagaggaattctagaagatataggtgtctgagacggaacataccgcgggattgacccggagctcattgatgacctcttgtccatcgatgtatgtgagtgtacagagtaaacaagacgatgtagcgttgaatgatggtttgttgatggtttgctgagaattcggatacaagccgggtttcggtttcctccatcatttccttccatctatcatctcctctacacatcaaccggccgtcagatctcccattcagatctttcatcatgagtggatctataaatatatccttgccagactatcctccagaattcacgtcacttcggaactcaaactccgtcatagagttgccagaagacctgatctcacccgattttcggccgcttccacctagagaaccgtttcctgaagatcgctggcagaaacccatcccgatagagcctacgtacactcggaggattgtcaatatctaccaggacccgccaggatggacctcaagactaccttctccgatgctcctggctgttttgtcgggaatcatcattggcgcaaggaaaggagggcgaatggcgagctataggttcgccgcagagaacagtcatcgaaagccggagaccttgaatggatggtacttttacaagaaggttcgttctgatgtctctcatctgttcatcttttaggaaagcttgttgaaaccgatgagatctctaatctggaccgcacgctatttagcaaaagaactactatgtcatcctgaatactgtccgatctgcaatcgcgtatgcggcacgatactctgcgttcaccttcactcttatcactcttgaagcttctttcgaaaagatctatccgacgttcagatcctggggtcaacctcctcttgacaagtcgatcactcttcctccagcagacccgagcgcacatttgaacggatttgctacgatagatctgaatgagaaaacgttctggacggacgtgccctttgagatagatggtgtagtcgaccgaaagttggttttcagcagattggcgagcggagctcttgcaggcggtctcttggttggtgcactggccagatggtgtaagattcacttttttaagtcgttcttcttaggattgcgcatcgtgttttcctttctgaccgagatcttgcttctgaacaccgacagatcggttccatccacctacgattcgaaagatcattttctggggtacggtcaccgggatatcccattctgcagccgtgatgtttatcgagcgtgagaaggctcgcgaagcctccatctcttcctctaccatcagttcttccgagcccgctcctgtcacgtcctctatgtccacctctacactaccctcgcctattcccccgaactttgagtcgaccttacaatctacctctctagctatcgattcctccgcatctcctccttctgctcttatacacaaaacgggtgataccgacagagatttctcagaatctcagcttaaagtaccctcggacagtcctgacgaatcgtctggggaacagaatcaaaccaagaagagttggtttgctcggctcaaaggcgtgcttagagcatagagttgagactgtttgcactcttattcgtgatctctctcccagaagaaagaataacgttttgtatttccagatgagatgtatatgtattcgagaaaacatggggaaaaagggactaagaaaaaagtgtttttctctatcaggaagagtacgtgttatactggaaggggcaagactcaagcgtaatcggaatacgtcagcgcatacaaacaagcgagagtacccaagaagtttgatccagttcgaacgaattgattgatagaggagggaagagatgcacgttcgttctatcttttatctatctataagttcttctttggcttcgggaacgtgttcgaggcctctgtcgacctggtgacctcgccggattggaggaaaccgacgtaaggcatgatgtgatagttaagagagtacgtcaaatcggttgagtctctgttgtagttgcgtgccaaggatgatcaacaagagatcagcaggtgagcagtctagccttatactaacctatacgtagagagagagagagagagagnnnnnnnnnnagagagagagaaatgaaaccaagactgacttgaaagagtttgacgcctctttaaatgtaaatgtgtttcgaccgccttggatattcaaccgggctttgcgaggagactgaatgatcttatcccaaagaacgaccgagttggacgactgtggcagacagagacaacagagaatgagtgattctgcaagcatcggattgggtgtctgcactgtgaatagatggatagtatagagaagatatggacaaacattgttaggcgttgtgtattcggcgttcagttgaaggaagatctgtttcgtgttccaatggaatagcggtcggagatctataaaccaagagaaagaagaacgaaacctcgaagattcagttggtttctacaatgatcattcgcagattgatcataggatcctcagatacagaacacaaagagcgaaaagccaagagcgaagaggaaaggaaagaataggaaaatgagacggacctgctttgagatcaaacctgacgaatccgtattcgacctcctgattccaaacggatcttgacttgcccatcacactatgttcgactcaaccccattcggtcagcattttcccgttcaatgctgaataaaacctctccgaccatcgtagcatcaaatagaccgagaagaacagcggaaggacgaacacattcaacgactggacatcgatcttggcagcctcgaacggcccagtgagtgtcaaaaagtaagacgaaacagagattgcaaacaagagcgcgaacagcgcggtcgtggctagggagactacctggttggctctctgtagacaagagtacatcttcagcttcaaacaaggcagggtagattgtgttaggaggtgatcagtaccagcatgcgagcaacaagagaaggagatggtcgagctggcagaatggaaagctgtgcgacgacgccacagaccttgactggctgggtgtcattcgatcattgtaggtagcgtacagagagttgtaaggataggaggaaattgggagcaccaggtttattaaggataacaagcaaacaggaagattgagatcaccacgttgggaacgaaggtttgaagggaagagaagaaacgaagattgtacagattttatgctgggttgataacaggacataggatatgtgaccgtaggacgaccgatgaagtggtcggaagaacgctaagagacactaacactcagtatcctcctcgtccttcgtttgctagttggacctcatccagtcctacgtcttctggagaaggctgaagaccaagcgccccgtttacttgactctcatctaccgccatcccagagtcctcttcttcatcctcctcctcctcgccgtttgcctgcatggcctccttcatcttccgcatagcctctccctgagggtagaaagatgagttatgtacaaacatcgatcagcctgagtctctagagtacaaggagagagtacatgaacgcacttcattagagtagtgtcttagacgagctttgacaaactctttatgcttctcttcctgctcaggtgtcatgtcttcttcttcgatttctccagactctccggctgatgctccgtctgctttgggcaaatggggataatctgatggagggagagagaatgaggtcgaacgagacgaattgaaggagctcgttcggttcgatctgggaggtgacgtcgggccactaccactggtataatttgatgcgagaatagtcattaggttagttaacgcctaattaactatatcaaagttgctcaaaccttacttgagagcaaacgactcgagatcacccgttgctgtcagaccagactgagactgcccgttgacggttgatagatcgaacccaggaacatctgggagccaaatgaaatgaaaaacttggtcagattggtatcaaagcaaggaaaacaagatcttcatgagcaaagcacggtcataccactcaaaaccaggtcattctcggcatcgtatcggacatagggcgtcttgggctcagtgatcttcctgataggttgagcgcgacggtcagtccatctggcagaagcatcacaacagaaaagtcaagaacctacatctgggaatctttcgcagcctctgtcatggccaggttttcctcatcccacttcagactaaaccagtcaagaaacaaataagaaacaaacgtatacaaaccttagattagcttgagctgatcttatgattatcgtccagatccaaaaagacatgtagaaagaagacagtgatggaaagtaacgtgagaatcaaactcaactgagtcccctgcccatcagacatcgtcacgttttcctcttgccctacggttggggatccatcaacgaaatccgatgttcctctgaaagaagtagaaggggtcacgttcttgaggattccttttggtcgctgcggaggcagctccggtgtcggtctattcgaaacgggtgacgagtcaagagggatcagaggaggagcgttaagagaatactgatctggttctgagttcatgccgatgtgtgagagtgtgtgtgtgctgttgtgttggctatagcaggtaagaagagatgatggctggcgaggttcaatgtaggagacgctcgagaggaaactatgacgagttaagtgttgtctaaggtatttgattttatttaccttacttaagttgaaccccatctccccgctttcgttgctactgttgatgccgttggcaagttcatctgatcacttctctagctggagatcatcaccagacaatgtcatcatcaacacctctcccagatcctatcgacttttcgccgctcaatttctcgccgttcgagatggcttcgatctgtctgcacaggccggatccggtagcgaccgagcggttcatccaggaaggtcttctctctaggaaagaggtcgagacgatagaatccggttatgcgactcttggtagatacatgtttgtgcgtgctgccctatagtttactgcttcgctcttgtttctatcaagcttatttgtctgtcagaaacttggatccttgctcacgtctctctgggcgcccatcacaccgtcacttgggaaccgtagagcacggctgtatgcttgccggtcgcatggacgacttacctcttaagaggaggagtatcaggcgtctggacgagaaagaaagatttcaatgttctgctcggaggtgtcctagtgttcagtacgcttggacttaaagttggttatgagattggcatcattcacggaggagagaccatctggaaagagtctgtcttttttctattccatttccatcgtgttgctctctgtgtgttctagat

SEQ ID NO: 1110 - DNA, 17763 bp, Xanthophyllomyces dendrorhous
gaacgctcaaacgaaaacctctatatcttcgttcctgatctctctcttaggatcccaaataacaccgcggtcaaagtcctcacatacaaataccttcacgccgtgcttcatcccgatcggcttcctccgataggttctaacttattcaacattgatgggcaaccgatgttctcgaccaagaaaaatccgctggttgaatacgaacaaatagcgcttgaaagaaccggtcagactttgccatcgacggcaatagtaggtgatcatgataccggtgcacaaggagagttatgggatgagggtagggtaggtgtcgtcgcggcactcgctggtcgattcagagatgcctggaatagggtcgtacgagatgaaacaccaccgaaaacagatgagaaaaacttctgatcttcatagattatagcatgtattcatatatagagggtgtggagaggttgtacagttcaactcatcaagtcaggcacgtgtccagagagagggaaagcatgttgcattttagaactgtttctccttctcttctaaatacttttatttctgttttaattgcatctagtgaaatttattaagatagattggcaagcttctcgttcttgactttacctatgtttccaagattaccccaagaaagagtgaaaacaatcagtacacgtcttttgttaatggagagaagcaacggagaaagaacatactctcggcaaggacggtgaattgaccgccgacctcacagtcccttagatcagacttgtcctcgaccgtacacctctgagaaaggatacagttctccagtttcacactgtttggaaacatcaaaaggaagaaagaaaaggtgtgtttagtacgcgtgttcgtcccgtatgaagcaaaggaaaccttcccaaagaaaagtcttacccgtccccgatagtgacgaaatccatgatgacacaacccagaatcttgacgttccttccaatcacacaatgcctgccaaccacactcttcttcacatttgtccgttcgccaactctggtggaagcgccgacgagcgagtccgtcgagatttgagctcgggcatcgatcaagctcgagtttgatgggagagctccagggggaagcatggttgattgaattgctagattcttaacaaactgtgtaaaagcgaagagaaaacagctcgaaaatgttaatctgatttcaaaaggatatcgagaatgcaaagaaaagaatgaatgaaacggtgcgcacttgacggttgagctcgaaataggtcggtaaagtgttggctctcgccacgaacccatcctccaacttccaaaccacaacaccacatccgactttgccacctccaaccttatcttctttcctccctcccctaccgtcttcctcttcagatgtcgattcttcttcattgtcatcttcatcgtgagacggctggatctgaagggaagcaagtgactgagatagtgattcttcggttgatcggccggacggaggaatcgttgatggtgatgaaattgacggaggaaggaaagaagtagagtgttggagtgagagcctaagcgggtttggtgtcgggtttaaggctgtagcagaaaatgaccccccggttagcgataccatgaatactgacccagcattggaacagataaaccaaggaagaaaaaataattaagctaaccagacttccaggcctgagccagccgggtttgatacccgcccttaaccaaccaagggacaagttcctcgcgaatactttcaatttgagggtacatcgtcaagagctccagaacagaatgcttaaagacgtatacgtgagagtcgagtagctttgtggtgagggtcattcgagggtatctagttcaaagtgacgtgattcggccgagaaggaaaggaaaacttcgttagcagacgtttgatgaaaaaggaaggcttgtgtaagaagaaggcgatgttcagaatatgtttcttatgacttaagaacccaatggctgtcgtctttgttgggcgaagagaaaagagaggagccagagaaaagaaccattctcgtttgacggatcaggcgctcatctttggcgcccagcatcactcgaccccaactcgaagaataaggatgatgtcggtgtattcatcataaagctttctatctgaacctctccactatccgaactacactcaaacgtagaaggatggagagacatacagaaagaaagacagagcgagtgtgaacaaagtttggacttgtacgtacttccagaggagactcatgcggagctcgatctcatcatcgacatcttcaatctcctgaacgtgcaacagtgactttgtctgtctgtcccacccgaccaagatccgctctggtccgtcttttccgacttcggctcgctcataaaagagtgaggtcattgtcgcgttcggccgcgttcgatgggcgtctagcagggctgagaggggtaggttcgggggagggatgaaatcgcaaggaagaagaatgaagtccgtctgttgatagaaaggaagagacattcaaaggatgaaacatgaacgaaagagattagtcaagctgagtctgcaagaatggcaaggaaacccgatacaatcgggacgaattatctgaccgaaagatagttgctgtaagctctcagtaaatcagccgtctttgacttcaagatctcgtcatcaatctcgcctccatctgactcgtcactgctaccaccatctacaccagtaagtcctcctgaatttggatccagtacagaggactcgatggctcgcaaatcaatcttcatcgccccctcaccgagggacgtctgggattgccggaaggactgaaggtgatgggacagggaggaatgataaggtgccggggtaaggatgagcacatctgtaggaatttaaagagaaagaggccaaggttgttcatgatggcaaaaggtcaatagataagagcagatattagaattaaagaacaagaaacttggagaacaaaagatatagaagggttaagtagaacaaacctagaatgccggcttgttcaagccaggtaagtacatacgagatcatcggctcgtttccaataggaagcagtgctttacatagtgtgtctttgcttgtaagagggtagagactgatggagaaagaacaaagatatcgaggtgagtgtcgtattcaatcaagaaaaagccagagccaaaatataacgagagcagaagcagagggaaggaaagtccccaaaaggtgacgaccacagtgaaaagagatagaaagcgacagactttgatccatggccagccagaacaactgcctggaactcttttgatcttttcggagctgccgagaacatcgagaaggatggtagagacgatgaggacgttaaacgttgaaggttggatgtttaaggagagtctttgagaatggacgactatggttacgctggtgttacagatagatagatgattgatggtattcatttatacattcgtaacagggagacttagctaacaccggcgtttcaagaagtcaccgctcgtttcatctttctcgacatttggacgttcacagagagcgcagagattcgtcgtcttcccgccgatgaatacgggtcttgaaatcctttgttcggtggcgtctgataatgacagctcagaagagcgcggtctactgagaccctgtcgttgtctggagaagggactgtacacgaggaattttgataacgaaatccgttctctagtctgcgcttactgtttgtccgtgctcattcgatgcgcgcatgtatctacaggttctcgttcgaaatgataacttatcctacagctggaagcagagtcggctctaattttaccttggtctctctatgagtgtgttcgaagaccttacgattgtgacccttaccttgaggggcttatcgtttctgttctatctcgaatagtgcaacttgcaaaacccttgtccttcagccaattcggcaactgctcggtcgagagtgagcatattgattgatggaatgctcaatctttttttggcagacggtttcttttcctttggctttgaaagatatacagacagattttttcatgatgagtcactccaagtaagcgattttgctcttctctaactcctgagacgtttcctgttttcagctcaaagatctcaactgaaacaacatgagaatcacgtactccctcgtctttgactgtattttcagctcattctatccttaaatacaccactttaagaagaagcatgagccaagtcatgtgatgatagggaatttgctcgtaagtatatgcgcggtgttacggtttccatttctgaaattttctttctctgtttgattgtcggtgatcgattccttggattttctttctttcggatcaacgaattgcttcttcaacggtggtacacttccacctcaactatattcatctgttgacatcgaaagctataggcttagctattcgaacgaggaccaagaacaaaagagaagacgatactttccagagatttctaatgtgactaatgaggtatttttattgttttccctacacttcttttgtttgtctgtgatcgacctcattctccagttttatcatatccttccttctttcattctctccttctagcttatgatttctttgcaactctaatcgtctttcccaagtttcctcaacgttcttaatgcttgccttccttgcttctcgtcatacttcccattcgaactttcctttagagacttctattttccattcagccaactcgtgcatgatccagcaggtaaagtgtcagatgtaaaggttcttagggcacaatagtatatcaagcctttctccccatcgttcttgattacaaaactaaacatacatataataagttcccttaataggcaatgaagagcgacatcgaagggggaacaccatgacaagccgaagttttagttttataattactttgaaaagtcggacattcatctatttcataggaactactttctgcgccgaggcggctggatctccacctgctccatttccagtctttccttggctttcgttcatagggataatattctgagcggaagaagatggatcttgtcctccagtttggtttttgtcggaacttggtttgaatgctcggtgtgccagggcgagcttctcttgggcttcctctttctcattcgcttcgagaatatatgcccatgagtgatccgctggtggtttctgaatattttcagatgaaaggaccgaaagaaggggagaggaggaatcagttgtgatcggcattagcatgatgagaataatagagcagcatactaacagaggggtgagcttcatctttcggctgatatgtgagataggcagatcccaaaatcaacaacaccgtcagaccttgagcaaccattcgagagttcacgaccttctgggcgttcgtcaaatacgggttacggtaaaagtaggctcccgatccggccatcgaagctatatgatgaggaaaggggatattgagaatattgaacgagcaaaacttgtgaatcaaccgcccgagtttttggacgtaccgacccaggaaccaccgacgattgcccattggttttccttgaaagtcttcaaagccttttcttgtctcgacaatcgatcccattcagtaacttgtctcttcgccatttcgtccaactccactttacccgctcctgtccagagggatttctcatatcgaagtcctagattccagacagatgtcgaacgcagacgtatgtgagtgtagattcagtgtatgcatagtttgggaagcgctcccgagaaaaaagtgaagaacaagacagtaccttcgttttcggcctcaatcactactgccggggcaaatagcacgatagcactgtcagaatgagatcgagacaaggtagagaatagaagtgtgcagaaagttagcatctttagctgtctacgtaggatctggctcagttgaacgcagtttcatccaggattgacacggaagaacgaacccaaaagccttcagaggcaacggagcaatccggtaataatgagagtatttgtaggccgctccaaagatcgggaccatagcagcaacggaataggcagctcctcggattccgcctctgatgacggcggcctggtgatcatcttcctcctctgtttggacatcaacaaaaggatgtcaatttaacaaaatctagtcaacacaagatcgagaggatcaagagaaagtgaggaacaggaactttcgatgatggactaacgtttggttaagagctatgggttgaagagcacaaaaagttgattagactgttctgtgaacaaagtagagcagtatagagcaatgtccagagtggaaactaaccttcattttctatgtgtatgtaactgagggtataagtgtgttagatcgaaagagagataagacttgatggttgtcgaatgtgtatcttgaacgaaaagattataaagatcaaaggactgttgaaaagtacgggctccaccgtaagaagttgacggaatgcggagtgctgacgacatccgctcgatctgatctggcctggtagcgtgtctcatgagatatcacattttcatattttatacaagtacacatatttacgcacgcagctcagtccagtctgatcagattagtctacccaagaaaccttgtcacttcacccttgacatgctataagaacaatccattgcccgaacatgtgtgaaggtgggcgaaaaagaattgtgaactctcgcgaagatcgagttgaaacttcaacccctcgagatttcataaggtccttgtttcgtcatctatgggggatcgccaggatcacaagagaagagaggaagggatcaagacttgatgagatcaaaagagattatagtgttctcgatggtatatgtgactgtggatgtatggtaggtttctttggaaaggaagtcaagaatcaatcagacatcgatccagtctacagaatcccttttttcgctcatagtcaagaagatggacctactgtacaggttggtcggttcaggaatatatcctctctatgacccagagatgcaatgttctctcgcttgatcttacacaaggatcgcgaccaacaagaggatggcaagaacgatcccgagaacgagaacgcaccatccggagcctcttgctgaaccccgtacacgaacccccaagatgtggctgttaatatacgtacgaagaggggaaggatgccgtatctccaaaaagagaaagcagatcataccttctgactttgctacaaactcttttagcttgcccattgctcttcccagcttgtcttctgtagaatctacccggtccgataagtcctcgagcatcctggagagaaatcccacgtttggttctgtttaagtttctccttctatgtcttagatacaaagaggggatgaacgagggaagtttgcttacatattttgctcgcctacttctcggcccatcaaatgtgcttgatcgtgcaacgtatttaatgtcccagagatcaaatgtaaatcatcgtcctggttgcgcattaaactctacactttcacatagaggatggtcattagctcgagggattaagaaaaaagaagtcatgaacacatgacgataggaatatagacggacgagttgttcttctcgttcccatgcctcggtctctccattcggtggtcctgatcgtcctcctataccctcttcctcgtcccgatacgcctggcttggactcggccgagttgcttttgttgatttctatacgttcgagagtgtgtgtatatcaccagggtaataagctttcggcgtgcgtggtagacatcacaagaggaagaagaacaatgggggaacgtactggtgtgacaatcgatgcccggatgctctagaggaagaaccctcacattcttgagcttgcatgtcgatatgaatccagaagcagaagcgactaatgttgagaagaacctacctcgacctccgctttgaccatcttcaagaatcccttcctcctttgtatctctccatccagaatcccaaactgaccgtctccaccctctacgactgctctcacgctctcctccaaatcttcgagatcgacatcaatcgagctgatcgttcctctgacttcatccctcgcagagatgacttctctagaggaagctggataggaagaaagggctcggtggtattgagaaacaagagattggagatgaagtagagttgactcgacttcttgctgtatatgataatttgtggtattgagaatggagaagccgtggtgaatgtaagcaaaaggaggtggtgtggacgtgatgaactcggatacgagtgaaacgaaccttgacgtcaaagtaagctgtgagaaagcaagatacacagagtaaggctccaagggctagagtatccaagagcaagaatatcttccaggtaaggctgaaacgaagagttcaacttacgatctccgcccatgtcgataagagttcgtcaggtatgagatgatagttcagcgatcagagatgaaatgaaaaggcattccagatgtttacacttcacacaggcggcgcagagaccgggctgatccgctagatttagttttctttggcggtgggtgaacttttcattcttattcgcgttcttcattttgtactctgcctcaaaagaaacagggaaaccatggatacatatataggcagaactaagaaaaggcaagggcatatacgaatctaagtgtagcggatattgggcgatcgatcgaacgatcaattaagcagtgacgccgacctgtccattggtcttaagctctccgttggtgttaatctccgcgttggacttgggttcggcctctttgtcagtctcaagcttgactccagcttctctcaaagtcttttcgattcgatctccaagagagggatcaaccttccggaagatctcaatctgtctctgcagaatgtaaggatatgtgactcctccaaggtggccacagacattctattttcgaacataaaagagtggcgtatcaggttctggccgtcttagaagaaaagacagagaaaaaacaaagaaagacacgtacagagacaaagtggtccttggcctcatcatcaaacaccttgctccaaagcgctctgggctgctcaaagtcgagctcttcagacccactttcaaacgaaactacacccggtccatcgaacgcgtccgaaatcgactccctggtgtagggcttgttggccatctttagcgggttgagcgatgatggatagttgggagcagccccgccgttggcgttgaaggtgtaggctccacttcggaggtagttcgacacggacgcgacaggacaattgacaggaagctcgttgtagttgattcccagtcggtatcgatgagcatccgggtaggagaatagtcgagcctgaaggacgggatcgttcgagggctcgattccaggaggcagatgggaaggagcaaaggcgagctgttcaacctctgcgaaatagttatccacgtttcggttcaaagtgaactttccaatcgtcctaagtgggaactccttgtgggaccagaccttggtgagatccagaatgttgtatctgaacttctgggcctgctcaggagacattacctgtacctgaaccgtccagctagggaagtctccattcttgattgcgtcgaacaagtcgtctccgtttgaatcgggattggaggcgtcgagtttcgaagcctcttcattggtgtgagtcttgacaccctgatcggtgcgcatgtgaatctggacataattccagtcaccgttcttgttgaccatcttgaaggtgtgtccagagtaaccatgcatgtgtcggtaagaagcaggggttcctcgatcactgaacaggtgcagcacctgatgcacggactcggggttttgggatactataaaattatatcaaagacaaggtcaacatgaatcagagcggcacgcagggagtgacgaggttatacgaacggtagtcccagaaagcgtccttgtctttagagtttgtctgcgggttcctcttctgggtgtgaatgaagatcggaaacttggctgggtctctcaagaaaaagatgggagtgttgtttccgacctagaggtgtagacagagacacaaaaggatgagggtaagagagcgataacgagcttgatgactcagtcgataagaatacgtacaaagtcccagtttccctcagaggtcttgaccttaagagagaaacctatgttgaaacaaagagaaacacgaggatttttttaagttaacagcttcatccatgcgaacaaagcgaaagcacacaaacctcgaggatctcgagcggtatctgagcttccggattctcctccaactgttgagaaccgggcgacacagggtgacttggttcccttttggaggaactgtttggatggaatatattcatcaagtcaactccgaattgaacaaaattgcgataatgaggtagattgagaacgtacatcggccatgcataggtcagagttgtcttcagtagcctcgaacacaccgtgagctccggagcctttggcgtggacgacacctagagatgttgggaatatgaaccaatcaaatagaggcaatttgagatcagggatcgactacatatgacgtaagacgaacaagcaaagacatcaacctaaagagacgaaacgtacgttctggaattctctctctattttgatgagtgagaagatcgatcaagtggaaatcctgaagaagcagggctgaatgaatcgatgaatgatagagaagatactggatgatcagcttcagcatagcacgatgatgacgacgacgactgagataaaaagagctcgcttacgtccattaggtccggctcgttgggcgctctgagccgaatgtctagggactccgttcgaatcggtataggcaacaccggcgactgggcaaactgttgagttggtagcggttgcagggattgtggacacaggtcgagcatgaacaagagtcaacctcagcctcaagggatgatatggaaacgatcgagagaaagcaagaagagactacgcacctggagaaggcatgcttgtggttataagagcggatgcacgtatgtgtacttcgaatcagctgcctgcatgagaggatggatattatgagcaatgaataagaattccgatgttctatcctcgatgagccttcttaaatatcgtctccagctctgtccggtttcaacgggatggacggcaactgacattctgacgtcagtcacgtgcatatttgatacacacgtgcttcagataaacatcttacgtaagtgccgttcggcactgtcagggatgtgacctgagtgttacatcccggtaaccttcctttcattctagttctcctcctgcctcgttactccttatgcttcctcactgtatcaacatgcaggtatatagtctggtagcgcaggtgcttgtagcaccttctatgatctgttgtcttatgattaatcgctggagtctgagaagaatgcacaagacgagcctcctttgccacccatagcataggtttccaagcctgaatcctttgtcactccttggttccctagtactcttgttcctagtgttatatccatctttttcttccaatctcttcgccttgcgccctcgtcacaatcaccaaagctggagagcctgagcttcctcattgtcagctgcattccccgtttgattacacccttcgtaacctctccgctgccctctgaacccggatcctgacatccaccctctctgtgccctctctcacatcgtatgcaacacagatagatacgttcatgtttctttgaatacatccagtacatctacagtctactcatttatgatatcagacctgcattggagatccaccagggacagcagagtccacaggtacgttctcacggataggctcctcgtcaaacatcaacctgtgataacatcaacgtggagggaaatttcccggattcgatgagtcctcaaacaaatgggcacatgaagcaagaaaggcaacacagaagaacactcactttccacccatttctttaacaaactcgagactccgcttctcgtcacagaaatactggaacactttgacaagatccggcacttccaccgtcgtcgccttccgtctcagcgccactaagtgggcgggcgagatcaactggagcgcatacctcaatgaggtctccactccaatgttggctaatgtatcaagggcagagtccgacagcttgacatcctcctcctcgcatcgaatcgaaacaatctccctaatctcgctgagctcgtaagccttggtgctgatgatgagcactctatccaacagatcgatcgggattccatgggggcttttgtactttgtgcccctgattcgggtaactccccggttggaagccatgatcactagcggcgccagatcgttctcaagagctcggttgaggaatgagaagcactcgatatctagcatgtgaacctcatcgatgaagaggacctgtacaaaggaggagcaaacgtttcaatgcgggtaacattttgacgatggcttcagaatatatatcaaagaatgcagagtggaaggagcgcaagagcgaccgacttacaccaggaacgatgcttgcctttccctcctcccgccattcgcccactttcgtattgatctgatctctcagctcaggcttgatctcacctgtgtctcctgtggtttgccaaaaatacgtacgggaaatgatactgagcaatagaaacaaaatacgcagacaagatgaaacgctcaagggaagataaaggtccagagactgaccagcaaagagggcgaggaaaccctgagtacgagagttgatcacatcgatctcgtgcaggctaacggtgtgtgtgacttctcgtctcttctggagctctccatccggacattgaacaaatttggtctatcaagttcaggcaggatgtaaagaatcaagatgtgagttagaaagaacgcgatgtgaacccaagcatgacatgaatgagtgattgatgggttcgcgtcatgatcaacgaattgagagaaagaagaaacaaagtacatacgtccccacccatagcatcgtagtctcgcgctcgggcaaaacttcggccgaccttggagatcttcccagttcctgtatggatcagaaggcgaaacacgacgatgagagaggaatgcatcagacgtagcagcatacctaaacgcgtcggactcgcgtacctttatcgatagtaatcacgtctccagcagcaaccttttcctttgtcaactgatcaatcatcttttggcccaaatcatacacagtctccatatctgttgacttgattgtcagctttccagtctttgtagactgttattggatcagacatgtatccatcattttttagccgtgaagaaggatttagtcaagttttcttgcagaggtagttttggcaatacaccaaggagtatgacaaagaacgagatccagacgcaccccggttaatgacctatcgacctggatttcgactacttctccttctataacttcagactcttccttgatcctcactccaatcgaccgtcgaaacgcttgcgtcaatgcttccgttttggacatctagtcaggaatgtttagattggatggatcgatcgtttgaatcagcacctttggaagggccagttcatagcaaagttcatgtggccaataaagaatggaacccactgaaagcgaaaagacttcggagccggacagcatggtaaacggaacgtctggtcctaagctctgagccatacctattttgcaagacgtttcgtccgaccaggagagaagacagagaatccaataagatttgtcagtcgttccatctgaaggaccttttgacaaagggtatcctcaagggttgctcgcagttcagacgaacccatagcgatagccgtctttccactaccgaccggcccggccataaggattgctctaccggcgatcctgccctcctcgaccattttgatgatcagcccggctgccttcctcgcctgagcctggcctaccatgccctcggatgaggggagaacttcgagctgggcagagagcccgagccctcgaatatgtgagtgagaaccgattcgttcaatcttggtgatgtccgacaattgggacggggttgtgattgttgcctgtggttgagttgcatatcaacaatgagttgtctaccacaattattaacagccaaacgattattcataccattataagaagtctccgagagtatagagacgagggtcaggatagatggatggatggacggatggatgagggtgaggaggaaagaaaggtaaaaagaaattcgctgcaacgtagccggccagcggaatcattcgagttctttctccccacccacaacgacgacgacaacaaccatcccacacatcccatcccattccaccttctctctacattctcaccagcgcatccaaccagatttattagatcggtgtagatttaaacagctgctagtgtggtaagtacacttatcgtcttgttgtggcagtggcacctcggccgtccctcttctttcccttcctgctcccgctggtgtcctcgatttctcccttccttcctttatttccccctctctctctctttctgttctgcctatctggtttgagacacacagagtaagcaaagggttcaacacctgtttttattgatcgagagccgactttgtctctagcttttcgaaatcgatacaccggaaccttcgagacagaggcagagaggcaaagaggcagaagccgactgtttactcagcacttttgcctctttgaagaatctggatccgagtctggtgtacgcatatacccagaagggaacacaccgctccttttaacagcagatgtggctgagcaagagatggtggaggtgaaactcgtaagatgggacctcgccggcgtatgggagcgtgtgcgagatgtgatcttttgagttctctccagccgactctcttgtcctcttactatctctcctttgcttgctcaccttcttatcatacactaccgacattttgttccctccgcactcatacggtcatattacacgtaaaacttgctgacaagatcatctttgtgtcgtcttgggtgtagcaaacgaacagaacacatcttgctccttcctctcgttgtaccacaccccgaccatgtcgagctctccttatcagtcctcacccaagtttcaaatctcccaaccctctccggtggatcgccactcgacctttattcctgagccagcacccgtttcctctattgccatgccatctcctccgtcttcgtcgtcctcacttctatccagctcgcagcagcagacgacccggtccagatcttcatcgtctcctctagcattcatgaaccgatcaccttcgagaacaatgccaaccttacatcgccaccactctcatgttcccaagggagcctcggttgacgagaccaggacacccgtctcggtccttatggccggagccagcagtttgactggcagcgactcgagctcgacaggggcgaaaaggaatcgggcgagaagcgcgagtttggtcaccatgaaagaagtcggcgttggagagggcgagaacgatatggccgatctaggaagctcggggacggaaaactggaaatgggttgacggaaagggtgagtagttttggtgtttgtgtcgtgtttgtgtcgtcggtcgccgctcgttacttactctgttcgctgtgtctttcgtttcttggtcaggtgcttggatcattcacatcatcctgattctcgtttgcaaggtcttgttcgactccattcctggaatcgggcacgatcttagttggaccctggtaaactgcggttatatgatggtccgttcctcctgtcttgctcttctaatataagagtctatccgattgacccttctcgttatcacgcgcattcaggtcacttatctgatctttcactctatgactggtctgccgtttgagaatatccaaacgaccggcggggcgtacgatgatttgactttatgggaacaaatcgacaacggcgctcagtacaccccggccaagaaatggttgacaagtgtgccgataggactgttcttgatctcaacccattacacaaaatacgaaccggtgttgtttagtgtgaatgtcggggcggtggtttgtgtgttaatccccaagcttccagctgtacgtcctcattgtctaattaatatgtttctcggtctcttcagttacttgatgttctttcattttattttcctttctcttagctccatcggttgagattccgattcttcgaggccccgatggaaactccttacccgtctcgaccgtcgagccctatgaaaggacgaagcgaagcgtccattccggaagaagtggaggacgaagtgctgattggttctcggtctgctcgatgaggtgctcgcaaaagttaaggacggaaagaaaggggtgggtttgatctagtgttccgcctcaaattttgtgtaccctctgtcccatctttctcatctcattcatcttctttgcttcttgcagagagatctgtctcttttcttatttttctttcttctcttttttactctcacttctttccttcttctcattatcatcgacaactcatcttaattccagaaaggaatttcaccatcactctgctatcatcattttggtttccgctcttctgtcttgtttgtctccgtacgaattccaagacaaggtgaacgaacccgtgtctttcgtctctcttcattcccctctttctttcttgcgaatgaacgcgttctacataccgatcatcaatccggtttctttttctttttattcctttttatgaaaaatcttatattctctgtcctttctccccggtcggacgccaagcttggttcattcatcctttagacctatgcccaactcgtttgtcgtcgtctcggtcgaccccgttcctgttggtttgttggttttttcttttcttttcttttcttttcttttcttttcttttcttttcttttctcctccttttcctttcctcttccctctttccgcgttcctggctctggctcgcgctcgctttttgagatcggattcctttcgttagtcagttatttagttgattcgttcatcgtcttgacgatggtggtggtgccggtggggggaacgggggacacgtagaggcgtgatctagtgaatccatggacaactgtgctctatatttattcctcgtctcatctttcatctttctctgttccctttcttcccctctttcctcttttttttcccctaattcttatttctgaacacccgagatttcgaatccagacgtcgaatacagatcgaaacataacgcttgaatcctcagatgatcctcctcctcctccttctttttgttctctttctttttctttctcgggttagctcactggatttgatgataggttacaaacaaaacaaaacaaaacaaaggcacatgtgaagacaacccggggagggacagcatgggatctttctctctgctcgtgtttgtgcccgagtttgtggacaaagacgtcaaggatcgaatatacaccttctatatgatttatgcttttttgttctatttgaagaaaaatagagaaactgtaggatgactctggctcgcagaatcgtgtagacatcgttgtagacaagagatgagggagagatgatgattctaatgataaagataaagatgaagataaagatgaagatgataatgttgttgttgttattgttgatgtgcgtgtgaa

SEQ ID NO: 1111 - DNA, 6271 bp, Xanthophyllomyces dendrorhous
ttgttgatgtgcgtgtgaatgatgggtattgcgatgaatggaaccaagagacaaaatcccaaaacgaaaaggacgatatgacagaaaggaaaagaaaaagaaaagggaagttggggaggggaggggcgcaaagacttttaagtggcttggggcgtcagcgcagaaacagggacgatcgccggcgttgaagcaggaggaccacagcatgccttcttcgcgctcaccacctctatcccgtcctccttttcgtccttcgtctcgacctgctgttgtctgtgacagctcttttcttctacgattccgcttgggtcttcgtccgcgctcaccggcctacagtcacattcacagcctgtctgtccgcactctgagggatcgcaacattttgcctgtcgtctgtaatatcgagtcgcgcacacatgcacaataaggtcagcatcaagaataaaacatacggatgacgacaatgagggaagggaagggagactgactttaattcacggtccttgaagtaaaagacaaaggaagcaacaatacagagtacggcaaacccaagggcagctctgtaacctactctgtaatgaggagcctgagcggccgggtagatcaggactatcgaaacagagaaggaaaaggaaagtcgagtttgagcacagaaagaggagagacaaaggacgaggcaaggcaagaaatacgaaccgttggcccaactgtcgatgacgtagacgaaagtgacgatcactccgatctgtaacgatctctcctcgggactcgggcaccaatctgccatccaggcctggtgagaaggaaggaaggaaagaggccatcagaaactcgggacgtttggtagacagagagaaggagtggacagaaaaactaacgatgaggatcgggccgactccgttggacatccaaagtagatagtaaccgaccatctttgtttcgaacgatgctggccagatctgagagacgacaagcggtgttggtatgaatatcaaaagagagaggcgcgcgggaaaaagacgtaccgaaagaatgatggtcccgataagcatggtggtcatctgtccaacgatccactccaactttctaccggtcctaccacttccccaggcacagccaaccatgacgatgatctggaggacataaccgccgatagggatcaggttcaactggctgacggagaatcgggtagtgccattggcgttctttgctgctttgaggaagaggatgatccaggtgtttgcgttctgggtttctgtccagccgctattgaaggtaggatagaggaaggtcaagtttataatcaaattaaaaagacttctaaatcagtatcaagacgaaaaggaagatccgagttagaatacgatcaaacgaaaactcacacataagccaaaccgaagacatagagggtccaactggtaaagactttcttcacgagcgcgagcgtccattttgtgggtggcagctttttgacgtccgacatcctttcctgcgcgatcaaccgttcaagcttgctcaaccagatcactctggtctctcctgggttgtcggggatgaggagcagtccaaacgaggcgatgatgacggtcatcattgcgttgaatacaaagctgtcgaaagaatttgagtcgaagggacaaaatcagttttgtgttctttggaaaaggaattgagaaagagggaagagggaacaagaagaagaaagaaactgacagccatttccaaccgggaagaccaccgacgccatccatgtttgaatggagagcggcctgcatgaagccgacaaagatgttggcggccggataactagtcccaaagatggcgagcctggtggccaactcggaaggggtgctgtgagaaaaggaaaaagagttatttttttgtctcgcgtgcgcaaaggagaaaccgggtggggaggaggggaacttactaccaacagcaaagcacgcagacgactacagagatggatcagttggagagcaatcagcatatgtgctccggtgattcatacatatatagaagagacatacttccggggtaggaactagcttcaagcaaaccgataaagaatcggagggcatacattccgttgacggtcttgcaggcggccatgagtcctgtgggtgtgggcgcgcgcgcgtgtgagaaagagaagagtaagagagagaaacaagtcgtgtcagggggttgtcgtttgaaggttataatgatggaggaaatcagacgaaccagtcataagaccccatgcaatctccaatccgggcaaccagtaacttggtctaatttttgtgagaatgatctgagagggaatgatcctagaggtgggatgatgagcgtgaacagggtgtgtcagaagagaagaattagtgaaaggaagaggagaaagatgccacggggagagaacatacatcaacgcgtagccgactcggtaagtggtgtccatgtagtttagttcgttccctcccatattaagctgaacaggagggggtaggggagaagagtgagtgagtacttgtcagtatatgagtgagtgagtgagagagtgtgtgtgtgtgtgtgcgcttgctagtacacgttgggcgactgagcgcacatacacccatacaaacgaaagggaaaggagtagactaacatcctccttcattccacttgcataggctgtcttgtagtttgatgcatcgatttgctggacgggtggagaattaaggttaatagtaaccaggcaagacagatggtcagccaaggagaagggatagagggcaaaggaagaagggggaaggacggaaaggcaaaggcaaaggcaaaggcaaaggcaaaggcaaaggcaaagaaagagcgactaaccttgatgacataggagaaccaagcccaggtcaagagacagagatccaacttccagaggaacttccgttcggcctgtttcgtcctgtaggactgttggccaggtggtgagcagcagcaaccctgggggggtgggtcgacggatgagagcgttccctctagtttttctaactttgagtctgacatcgacggcgagtgggagggtgagagatcagggttgtaagccagttgattgtgtggacacatggtgggtgtcggatccgacgctcggtgagcggaggaggaggaggaggtgagttaagggagggaggggcccagaggagaccgaagcagaaggatgccagggaaggagagtcgagcgatggaaactggacgcaaactgaacgcaaagtcaaacgaacgacgaggaaagaaagaatgaatgacgggggaaaggagaaggagaatgaaaaagaaagaaaaaggaatgggcgacgttctttttgagcgatcgggttgacaggtaggaggaggagaggcaccaggcacgaggcatcggagtgtcaggcattaggcacaaagcactaggcaccaccgatcaccgaccatgcaccagccgcgagagaaagagaacgccgaatgaaaatcgctcgttcctgccgcccgatgaggctcttatgcttttgtgctcgactgaatgcgctcactcggaccaagagttgggaatgagcggggtttgtgttgcgttgtgttgcgttgcgttgcgttgtgtagtgcagtgcagtgcattgcgtattgtgtattagatagtgtgtgatgtatagtctagcattctaatattctatagtccatagtatacaattcacagcacctactacgcacaacacactcactccatacagacaaacaaacgagggatttttctctctttctctttctctttctttttttcctctctcctcttcccctcctctcctctctctcctttctctcctctccaatgacttcttcctcttggcaatcggctcaaaactcacagaacctcttctttgtcgcctcccacaggcctttttttttcttaggtctttttccttcgcctcttcttccccttccggctccgtttctctcggctctctaatgaatgagcaattttcgctacaatgccttttctctctttctccctcactttctccctcaccctctgacgtgctctcttatctgatttggccctccatgtaaatcatcgacgtgcacacctcgctgtgacatgggctgatcgagcgatctcactcccataccggttgtatccaaacaatccatgttgacaaacatcatctatatccaagaaactagacctgctcagaagaagaagccttttgtgccgtcaacacaacggaaagagcagtcataaaagcaagcaccacagaaacaagcacgcaagcgcacaagcaaacacagaaagcaagaggacaagagaattagtcgtcagagttctgccgaattatactgctcttatcaacacacccgcccactcacctcgtccagtctgacggacggtctgttccacccaacaaacacccgtcggccgaccggcaggatcaccccaaccacgcccagaatcgctagcctggtccacaaaaaggcggcagagtacttttccaggtgggcactctgatgcttcccgtggggcggatgaagcccaatgtccatcggtttctcgccaagcatcgcaggaagcacattccggatcgcgtacaccatcaatccaaccaacgtgatgacgatcaaatgtaaatctatccgccggatcatcgccggcttcgtcacggtgagcgaaagtagcgacagcaacgacagatagaactagacagtgtgaaaacaacatgtcagtctatctttctatctcttcacaagattaaacatctctgcccaacacatacccacacacacatatatatatagaaaagaaatacgtacaaacacacaacactgtccaatctcaacccattcttcccttccgaaagcctgtctcactctatcctccttcttgttcttgttcttgtgcttgctcaccccaaccttcgatccgtcctcatggttcaccacctcgctgtccaacaccgcagacgcgatcgacagcgccaacagcgagagaaagcctacgagccggagagcgttcgccgaaaagtccacccacccacccaccaactcgacatgagccttcagatccgcccagagcgatcctccggacgcagaaagaaaccgaggaggagcagccgtcggctgcccgtcagacggtccgtccgcctgctcctgccctaaagcctgatcccggtcgacatcgtcctcgtccagaaagatctgcggtcggaaagagagtcggatcttttccaacacgtacttccatactcgtcgaccgaatgggaagaacaggatcacgatcgagaccacagacagatacaccagcaccgttcgtccgtccaccaacgggttcaccgagtgtttctttctagagtatatttccgtgtgtgtgagagtgtatatgtatgtgcaaatgtagatggattggtgtgtctagtgtcaattcatgcctctgtatattcacatgtgcatctctcttcctctctctctttgctctctacccacctgcctgtgagagtgttttgagaaagaaagagagagaggaaaattagaaaacacgtacgacgaggcgggtacggtagaattcgttagcgtcatctttgaatttgtttctgttcctgctaaaagagaggaaagaatgaacgaatagaggtcaaggacagaaagcaacgtcgtcaagaagcagagaaatcaaaaattgctggggtgtagagagatgaagagaggggaagaagagaaaataaaaaccgagactcgaatgctcacacgacaaacaccgcgttagggttataagtaatatgagtgcttttgtaaggctcggtgtttgagtgtcagggatacgggttgggtatcacgtgatctcatacgtgggttacccctacaggctattctttccctccatcccttatgtctcttcacccattttccatcatgctccagtttgcatggttcatgcctcgttgtctttggctctcgtgatcttgatcctctctaggctcgtcatatgtatatcgttagtggcagaccaaatgcgcaaggggtcctgatataagacggggacgccctcgcgccttcttggataagagttttcctcaagctgaagttcttgtcgaatcctcttatcccaagtacattgttaatagtttggtctgcttcaggtatcgtccttgtatcttgttgaaacctcttatccaaagtatattgttaatagtttggataagaggattcgacaagaacttcagcttgaggaaaactctcatcaataaggcgcgagagcgtccccttatatgtcgggacgtctcgcgcatct

SEQ ID NO: 1112 - DNA, 679 bp, Xanthophyllomyces dendrorhous
ctgaacccggaccctgacagacatttcctatatgtaaccgtgatctgccacgtgataaccctaattgcattcgcacgtggtccgccctcggccgatctgtcctttggcggcctccgctctctttacgatttgctaaagcacagggaagataacagaagaagacagaagattggtacaaagggcagaacgggaacggcagcagagcaagagcagccaggcaaaagcatccatcataagcaaaccccaagtcattgtggagtgagactcttttccttcggtcaaacaacaagagacaagagacaacctgatgcaagacgcccacactcaaaggcgcacaagccgaattgcatctgatgttttacattctaattctatttcgagcctcattctctctatctctcttccttcagctctctacaccatctccccttgatgccggacactgtaaatgtccggggcatgagaatgttaatattctttattcacaacctctctgaccttgtctagctgtccatcccaaacccaggccagtcgttggacccgactggtaagaaaatttcccgaagccgatcagcaagtcgattgctcgatcggccgatcagaatccctctacacaccagcatccgcagtgcttatcctccggcgtttgcctctctctctgctgccttccatgtgctgg

SEQ ID NO: 1113 - DNA, 7195 bp, Xanthophyllomyces dendrorhous
ctcctagggcgtctacagtagccggctcggatccatggcctttgaccataaccgagccgatccaaagataaacgccatgttctgactcaaatctgggcacacacacactctctcctctgtgcgttgttgagatacggcactcggttttctttctttctccatcactctatatgaccgacgctgagaccgtccgttgtgtacgcgtcccaccagctaagctcagactcagactccggcttgggacgtcatgcgttgagaactgtgcttgttgtatatgcctcgctgcgaatgaaaccttgtcgcttcttttacttggtgagaccgatggattaaagatgatgtaattgttcgaattcgatccaccacatgagtaaagaagaaacagtacacgtcccatactcttgcagcttctcttgatccgactggcctagaaagatttcgatgaatttatccggcaaatagaatgaaagaaagttgaaaaagagagagagagagagggagaaagaaacatcgctttcgtactcctatctttctcaagcattccagtcggtcgtctctttcctttcttgtcccttccctcctttctaccatcattccttccttcccttcgtgctcgagaaagagtcacaaaccaagcaacacagaaagaacgggagacagaaagaaaggaagaaaaaaaaagagaaaaaaaaagggaagaaagaaagaaaggttgtttcaaccttcacttgcttcctcgttcccgactgcttcgctatcctttccaatcctattttccgtccgcctcggatccaaccatgcccaagacctcagcggattatacacgtcctgtttgtctctttccttgctctctctctctctctctctcttctaattgttcttcttcgacacggaaaccctcactctcgatacctcaccttctgactatctttttcccatgttccgaccatcttctctccgcctcgcctcgcccctccaaagtcgaaattcgtggtcccatactttttcctccaaatctcttgtttcgtctcgctctccaccctcctgttcaccttccaacgtatcaaaggaatccatcgggatgcgacgctcaaaaacatgctgctcatctttatcatcaatagcttgttcaattccttattgtctgtcctctgtcctctgtcctctgtcctctgtccttttgtaattcgctgtccatcctctgaccgaaccatcgtgccgatcgctacctaccaggatcttcaatggaaacctacagtcgcgaacgaaagaaccatcgttcgggctatgcctcgtcaacggttctgccgtcatgggcggctcaagcggtcttgccggttctgccttttccgtggtcttcagagtgagaactctcttcctcgtttgaccttcacttttctctcaagaaggccttgacctcgtcgtgctttctctctctcttcctctctcggggccctatctcatatcatttacctccccccctttcccgatcgcgttcattcctccatcattttctgcccgctcgactcaaaaaggtcttcacgaggatcgttgcctcccagggttatgccattcgcatcatcgattccaaatggttctccttcaccctcctcgccttgccgtgggcactctggggtggagtagcgtctgccagtgtagccgtgcggtcatttcttacgctatctctttctctctctccatcaggcttgatgaatactgacccttctgttctgttcgacattctctcatcttttccctctattctcctctgggtaaatcagatctcattacgcaatagaaccctcattcacagagcagtgtacgtccttcctttcaccgtctttctccaccttatcagactgtctgatgccgatcgttgtgcgcatccgttcttttcgtttccccttccctttcttactccagattctactgcactgtagacgaaaaaaaactcgaagtcaccactacagccatcactgcatctgtcaccggctttaccatcatcatccaacgtacgtccgatctctctctctctctctctctctcacgcacacattggctctcttcctgataaaacatgcttgttcaacaatacacatgctaatatatactttcactcttacgaccatgtcatctcctctccccgttgacatcccactttctctagtcatgatgttcggtctgctgatctaccaccgacgagcactcagaaaagtcctccgaccagcctcctcgtccgtcgtcccatcatcctctgggtctgaccaacagagcaaccagctcgacgaagaaaacaacattttcctacagccaggtgtgacttttccaccagacagtccacaagaaggcgaagaatcatcatcatcagcagcagcagcagcagcagcagaaggagggacaccaggagcaaacggacgcaaaagcggacagaagcaatccgcaacacaaaaaagagcgaacaaaccgagacagctcaaagggttgcatggtggtttggttctcagaatcgggctctttatgttctgtgtcgtcctcgcttttgtgtatgtttcacccgggatttttattgatctcttctttgacttgctcatcttcgccttgttgtatcgttctctgacgcaatttctcgctctctttctctctttcgatcggtctgtctacaggatatctatcgtcgtggccgataatttcacgtccgtcactggtgatttagctatcggtaagtttcttttttttttctcgaaatttttcttcaagagtctgttcttgctgaatcctaaactcgggtcttttatcttattatcaattttaattattaattttgttttcatagcttccatcggtcctggtgggtttattcttcttccaattcatataataatataatatttatcatcatcgtcgtcatcgtcggcgttctctacaattcatcgcccaggtgtactaaccttctgtcttctcttttctcctttattttcttgacagccgtctttctcatctttgcttcgcagggtacgcgctttcatctgattttcacttgtctgtatcgcattgggggttcttttctcttcttacttacccatcctgaaatttgattccatctttcccttgtccgcccgctctccctagacgatgtcctgcgcgcatggggcttgatgaaacccaaaagagatcgcctcaacagcatttcttccccgtcatggctaccctcacccgacccacatccgaacacttcttccatcttcaacgtcatcgacactgcccgctcttggataagcttcaagtatctctcccggtcccagccagataaaccgatcggacagggaagagatctcgagaccgattcaacctctttccagatcgggcagatcgagataacagaggaagaaccgttcgtggagatcctccggcgagacggaaagtcgacaagcgacttgaatgagcttggtttgacggatatcaagtcagcaacaaaaagctgttcttgatcgttcttctttcaagtctgaccggatttctttctagattatcttttcgtttttttattttaatctcttgccctttccctaagtttatacatcatatcttatcttgttagcgtctggaagcgcattgtgcttctaaatcttgaaccgtcccccaaagatgttgttatcatcatcatcatcgtcgtcgtcgttctcccttctctcgccctgtccgttttctgtttgctcttctggttgattttccctttcatctgtctgtaatatacccctctctccctacccatccgtatcggctgtaacagcatcgtaccgccttcaccactcccagctccactctgctttgctttccgtgtgcttgcgtgtctctgcttttctcctttatgtctatcattgttccccttcatctccttgaattctttactcgtcatacgtatctcaaaagcaaagtctttacttacctcccttgtcttgattttctatcctatctccttcggtcaagttgtttttccttttggtcgactttgcttttctcttcttgactttgagatcttataattttaactacaatacattggccatatatatatcaatgtcttactctcatcctctacatagaattcagactgccagaacaagacccaagctaagctaagaccagagcggagcgatactgaaaaaccagagaacttcaatcaaataaaaacaaatagagccaggagaagacactggatgaaaacagtcgtgacgagatgagatatataatgaccagaccgatgacgtcgtttaccttgagtgtttgggatttctacttaatccttcgttcagccacactcactcactcagccacccaactttacaatctcacaccccacttcacgctcttctccccttcaaccaaagaatcaaagagaaggatgtccgatctgaagcatttggagaaatcgataaagaaggaatcgaagcagtctgtcaaggagctcgaccaggctcacaaggatctcgaaaaggccattaaagcagagaaagaagcttctgtcgttcgtccctcttcttctttgctttctcttcttttttttcctcgtcaagaaggggctggccgacatcaacatcggatgagaggcctaccgatagaggaatctcacctgtctgtgttgtccgatgcacgacagtactgaccagtccttgttcatattttcatctttgacatccgcccacgcaaacaatcgacggtaaaagtctgaacaaaacgcgtggaaggccagggagaagacaatcgagagagaaaacaagactgcccacaaggttctttcctctctctctctctttgaccaagagtttcaactcaacacgcgccgtcttgtcttcttgccgttctatcttacgtatccatcgcccaacttctatacgccgatagctcacacatgcggagcacaaaatgcaaaacgcgaagcgggatgttatgaagtcagagaacgagattgcccgagcccaaggccgtaagtcgatcgatcgttctcttgtccaccctttctgaactttgaggtgtgtgaagctcatcctactcgatcatgagcagtcgtccatcagctcgatagtgaagtggccgagaagaagacgttgattgataatctgcagtcggccagcaagacccaggaggtttgtctctctcgtgtttttcctctataaacgtctctttcctcttgagcgtgacgtgtttcgcgctctttcagaatccatctcttcctcctggcgaatgtttctaacccaaatttctctccccaacttttcatacggcgcaggctcaacgatcagctcatatagctcacgtgaaggaaacgctctgatgaacggttgacttgaaactcaaacggctgtcccgatactcaactagctgtctctccccttttacttctctctggtagaatgtcgtccgcgagagcagagtgaatacgaaggtttggcgatttggagatccgtggcaagttttggatgacttgggtagttcgtagagggagcgcgcttcttttcttttctcttcttttccgcggttgatacttggaacctcgatctagtttgaacaatgatttctcgtgtagctggtgcatggcttcggactagcgtttcctctttccgtgttgtgttgtaatctacgatcatctgaataattatctaatcattttctttctttcgttcacgtattctcttcggtccatcatctttcccgatcaatgtccttctgactacagttcgttttatttattgatttatttgttctgctctttcgcacaaaagttctccggaaaagatgaggaaagagacgcgcaagaaagtaaatatatacatttgatccatggtccaatttgacttatgctacatagtggccgttttgtttttatatatatattcaagaacgaagccgcttgaaagacagagaaagagagagagacactattcgaagagcaaggattggaaggacagttttaattaggatagggcagcgtctcgttaatgttgttcttgtttttttaattaaaaaatcatgcttttacgaagcctggtagatagaaggtccggcgacaacgtagtcgttgatgagcgacaagttgtaagaagtcacaggcaactgctcagacacaatcgtcacgaaagaagttccgttgacgatcgcgtcgtcgggtgtcgagtcaaacacagttccgttgggctggatggtcgttccggttccgtttccggtaacggtcaacagggtgtaggtcgtgttcaactgggaagtccaagcgacgtagagcggggcggaagcattggtggtgacgaggtctccgatcgcggtcgtctggttgtaaggaccgacgacctgcccgggagtctcccaagcgagctcgaccaatcggccagggtaagagagagccgttcggttgtgagtgatagctggtccgccggtgggataagggagcttctggaaggcctcatcaattccggacggtccgttgacaacggtcaagctggggaagatgttgaaagcgatcggcgtgttctcagccgggcaggaaacaatgtagggcgaaagaagcgtccaggcgaatgtctgagggattccggcctcaaagtagacgggcatggggaacaagccagaaagctgtcggaagatcatttgctgtcgagcctcggtcgagatcgactgaaggagtagctgagcggccggtcgagagtccaagtgaggaaggaacccgtaaacaccggactctccccatcgagtaagccgctggcagaagtcaacgaactcgggcacggtggtgaagttgtacctattgatgaataagagtaatatggataagagagctgagaccaagagtaaagacacaaaggaggatgctcacttgtaggtgcactgcttgggagctccaccggggtagccaccgacgatgttgctgatcaacgtagcgtgtccaacctcctggttggccatgaactgaatgagggacctctgctcggcgttgattccatactcgtcaaactctgcatcggagaaggtagcaagaccgtagtggaacaggtcgagctcaatccactcttgatgaagagccagagcgagagactggtagtcaaagtcagaatcaggcgcgtacaccggtgcaggcgaagtggcattggtgtcgactcctccctgcattcggtggtggtggtggtggtggtggcaaaggttatat

SEQ ID NO: 1114 - DNA, 1031 bp, Xanthophyllomyces dendrorhous
gtggtggcaaaggttatataaatagcaacgtcagtccatatgagcttcaatatatgcagaggaaggaaaggggacagccacatacgggaggaggaggaggagcgtagatcgagccgttcacaggggcggcggccactccgttgagggcggacagaataggaagcgcggcgaggaggacgttagcaatcatctcaagaattcttggcaatggaagaaggatgtggcgaagaagaaacgaggatggatgaggtatatgtcaggaagaaaaacattcgatcctacaaaggctttatatacacgaacgatctcgatgtcacatgggcctgccgatggttggtccaacagccctccacctcatcatcccaccgaaccgtccatccaacctccacctgaatgtccacatatgaacaaagtatgctatatgtccaagttaaatctggctcaagcgaatcaaacgggatttgatcgcgtcatgccgaactcggagattagtacgaacaaacgggaagaatctgatcggaaggcagctttattgtaagcatgttataatatctccgatcccactcgtccggcggtgtgcatgtagccagtcagcatgtctgaatgtgtgtggtaacgtatgataccttgatggaaagagggtgtggtgtgggatgtgagcggtctaatcctttgaaggatgacgtttggaaacttgccgcgcagttagatagagtgacgtcatcggcatgtttcaactcatcgtcactacttgctaccacccacaccaccacctacaggaccatcgccgcctcgccatcggtagatcccattctgtatcgttggatcgggaagaggacagcccatcgtatgatctagatcgcccgatggattgtcgacctttggtggtttgaaactaactataaatcgcgaagtctaacgtatcagacatctcatcccgtgttagtagcacagagatcgtttcaaatgtcgattgtatctcgggtacatatatatatatatatatatatgtgtgtgtgtgtgtgtgtgtg

SEQ ID NO: 1115 - DNA, 13723 bp, Xanthophyllomyces dendrorhous
  misc_feature (13428)..(13437): n is a, c, g, or t
tgtgtgtgtgtgtgtgtgtgtgtgtgtgtgtgtgtgtgtcatgaagcgtgttgggcacagaaacagaaagaagtgccttgagaacaccagaagaaacatgttgacctatccgtcttatgcaaacgaatcattcagatggacagaacccgtagttccggcgtgctatcaaacatgtcgttcgatatacaagttacgcaagaagaacagacagatacgcgcttggttcgtgccataagcgatatcatcacccgatcgtgagcagatcggctaccagcaagacatcctccttcctttctcaatataaagcaagctggtcgagcctagactcagtcatgtaacatcatccatgacataaggtttctaagagtagaagaagaagcgcaaaacggccgaggcgtacgcgggatttcgggcgtgcagtcttggtggatagggttacgacacacaagagattcgaatggggtcgtggaacaatttggtgatcattcagtgtaagcttcttaggacgaaactcatttcaggcatgagtgagatattcatcaggcaagacttgattgagtaggtcaatcaatgaattcttcccaacctcctattcagcaaggaaagaaagacaagaagccatacgaaaaggaaccgtctgtatactatctctgtttactctattcgcttatgattcatcgatagataccgctcaccgtcttactgagcaaacaaggggaaaggtaatcaaacagtttgagtgaacccggagctaccttcacgaagcaaagctccgagagagagcggattggaagattctggaaacgggctgaagagggcctaagaaaacaagcgattacttcggctcaactaaatctaacaagtgcgaagcaagatagacatagaatcacataaaagagaagcaagaagaaaacagtgatacaggtaaacaagcaaggaccacagccaggaagctctcgaaaatttatcgcgcgggcagagcaggtaggaagaggaaaccttctggagcaaaacgaacggatgaacagcgcacggagcgaagttcaagaaacatagaaaaaccgcttgaacctggatgaaactgatctagttaagtcttccagacttgtcttggctgcggctgataaggtccagcacagaacagaacagaatagtaaaggttaccagacggagacttcagctcaaggatgagagctgatggaatccgagcagtcccagatggcccaaaagaccccatattggacccacctgaaaccccaaaaacacccaaatgatgggcacgggttttgatccaggtttctctaccttcttttgaaacaaccatctttggatctcacccacagtcagatacagtagtccgacacttctttacaccacactgagcatggcgaatagctccatcctgcccagcagggcatacgaggaggcgttcattgtgagtctatctctcatttgcttctatctcaagactgtccccttcttttcccttgtcttcttccattctctattttctcccgcatcaagtcgccagttctcaggatctggttgaagtatagcgtctatgagagagacaaggaagaaaaggacccgaaaggactaaggttgatcctgatacaaggacgcatccaatgagcgaacggatggttggctgaatgaatcgagcgatcgcgtaggtgcccaagtcggattcaatctcaccggaaggagcctcttctagacagacttagagatatcatcaacccaggcttcgtcatcacaaaatcagatccttactgttcatatgttgacatgtctgttctgtcgtctactctcacttggtgaactctccaatttgatacctatctacaatagaacgcgtctccaccccgctcggctcattcgacactccaatcccgaattcaactcgcgtcaaagcagaatgagcaaatggccgacatctttagagagcgagcggcgattgagacccagtacattgcgtctctccaaaagtttcagactaaacgcggtggtggaggtggaatcaatagagatggcctcggtgggtttgcaggcgtttgggagaaagtctggggtgaagttcaagaggttcgtgtgctttctctctattcatcagtagccatgtcctcaagggtcgccgctagctcgatcaatttttgatgaactccttacaattcatacaaaccagactatggtaactcacacaaagatagaacgcgttatgcgggacgaggttgaaaccgctctacgagcgatgagcagccgaggcccttgggccaagcagagtaccgtaagcaatcaccctgacttgactgtcgagcgtttcatttgataaacttccaaactaacggttctatcttggtgatcaaaaacaaacgaacgcattagttcgactccaacatcgataagactttgaaatacctcgagtcttgtcaagcacggctgactaaagtgggcacttctcttcagtctcctatgatctcgctcgatgccatgatacccaaacatgtttaaacctatatataacaggctcagaaaaaggccgaatcctctcgaaaagaaaagactatggccgagctcgcagatgctcaatcgagtctcgctgatgcccagcagggttggttcattgaggcgccccaggtgttggcgctctaccaggagatcgatgagtctcgacttgagagactgaaagagatctttgcaaagtggcaaacaacccaaggagatatctcgagagagaacttggagagttgcgaacgaagacttaacgggatctttggttgggatatcgctagtgatcttcaagagtttttgctgaagaaaggaatgggttccggcgatatcgttggaggcagcaggatggacgtcgagagagccagacaggtctctggcgtcagcgttgctagccgagctcagagtacgttgaatcttttctctcttctctctaccaagaagtccctctctatcctcacccttctaaatctgacacaattctctgatctgcacatagccgtccgccgacaatcctctgccgcgtcatactcccagttcacccaaaacaccaacggagccaacaacgagtttggtgagaacggttctatacactccaacggcggtaccggagctggcggtcttggatccaccctcaagcctctcaaatctgtctttggcagaaagaaccgagcatcatctctcgccggatctccatccactaatcaacgagcaagaagcggaagcgtcactggctctggacacggtgaacagggaggaaatgggttcagcacgttgagcgatgccggaggcgaagaggatgatgtctcgcctctgccgacgagaagtggaagtaactttgttactaccggatctaaagacgcgaccaataacaatggatcgagcaacgttcctgctactggattaggcgtcagtctttcctttaaaaaaaaataacctcaagctctattctcctcatgatatcaggttgaaactcggcactaaattcacccacctcactcacgtccgctctgtagatatcttcgccttcaactaccgtagatgctgaagggttctcgatccctcctccggatcacaacaagaaaccttgggagatgggaacccaactggaggatgaccatgaactatcatcggctatctcttcggacagcggacctctcaagatggctatcgcgcccaccccaatcaaagagaccgaagaagaacgtcaggcagcgttattcgcgatgaagacagcacttcaatctccagcgatggctccccctcctcaacgaagaggcacaatcgcccgtggaaggcgagacgtgagaaacacaacgttcggaatggtaccggacgatgtgccactggctcaagcgcttggacaaatctctcgaatcaacacaaacgttggtggatcaggtacgaccccgagtccttcgcaggtgaccaactccggtggattggagggttcctcagtcgcatctccgttcttcacttcaccgccagcgatgtcacctttcccatcgtctactggttccggagatggaagccctgccacagctcccactacctccatcgctctcggatcgagcaatccgttcgcggcaggtcaagcttccggtctgtcttctgggttcagagcgtccatcagtgagacatgcaatgtcgtttctcgttcgggttctgtcatcaaagcgatggttaccggtcaagtcgcctgtacgttcgctgggatttctacagacgagatcgcctcgaatggatcaacgatcttgctccgactagatcagtttgaacagctcgagaaggtcgcacccaacccacagttcatccgatctctcggaccgaatcaaccaggcgaatactctgccgacgtgaatgcgctcgtccaagcttcaaagacgagtccgggcagaccgatcgtgctgttcaaatatcagcttcatatagccgaaggcaaagctgaaagagtcgtgccgctgtcgatcgtacctcagtggaagtgcgaggactcggaaacaaagttgctcatcaactacaacctcaactcgaacagtactatgtttgccggactcgcttctgagccctctccgtttgatgagccgtcaacgacgacgatcgatcaagtctccttcacagttcctatcaattccagttctgtgtctaacctgcaatcgaaacctcttcaggcgagctggcatccagaattgaatcaagtcatcgtccctggagaagaggtttctgtttcgcaaccatcaaacaaggtagtagctaggatgggggttgataacaagtcatccgttcaacctatccaggtcaagtggattgccaggggttcgctttgctcgacactgagtgtctctgtgatgaacggtcagactggatggaagctggacgaggtggagaagatcgtgcaaagcggaaagttcttggtcgattgagacccttccttcttttcccatgttgcttacctcctttcgcaatcttgacttttgtcaacttttctggtttctaccatactctttctcttgtttccaacgcatgtctttatagttcgagatttaatttgtatccgcttcctttttcttttcagatgaatggaatgctatgctatgctatgctatcaatccttcttcaataaaaactatttccccgttcgattcttctttatttgaatggcttggcaaacggcaacactcgtacttttcgaagattaaacacattgatacatagtgaatgccacatccaagtctaaacctacagcgtctagaattttgcttatagctttggataaataagcatgtgacggaggtcagtttgggaaggagaaagaacaaaaaacctatgccggagtggtagaaaacatgaataaggacatacctcgccaaggacgcccatacctagactttgaacaaccatgccacccatcgtcttctcaacggcctcctccaaatgccgtttcgggtcccgctttcctacatgtctggttgccaactgctctggcgttaatgtcgattcctccttgacggaagcggtatacagcgatgcgagcttgagcatatcctgtggacgtttggtagtttcgttcacgaagaaaagcactctgattagcaagatgagcccaagcaaactggtaaaggaaggtgaacgaacttgaacggctgcctcattatgatgtctcatatcatcgaactgctccagcttgagcccttccgtccaaccctgtttgtgaaggttcatcaacattccctgctcggcctctgtctttttgtagtcgatcgcaatacctgtaagagttgaattcaagaatgaaggtatgttgagcactcggattagtctctaaaggagagggcatcggctgatatgtcaatacgcttatgaacgtactgtaataatgccggttgagaccgtgaatgagagcctgaatggaaggtttgttgagatgaccaatattcgaagtcgtctgacgaggctcctgacccatcatctatcaatatccatggaagaaattaaatttatgttaagtaaaagagtcgatgcgcatagatcaagaagggtcaacgggcataccaaagtctggggattgatcgtcctgaatgcatctatcacgacctttcctttgacagattggatgggatcgatgaccactgctacagctcgcgggttcagctgctcgaaagactatgaaatcgaagaacattgtgcattagaacctctctgttcgatacccataatttagctagacagagatatggccgaacctgttgagtgttcacatctaccgaggacagccaacaaccgaaaccaggatgggaatggtaccagcctaccaccatctccggtctatcaagaacataagcggacgttatgaattggaacagaataatgatagaaatcagatgagtacacatgtttgcgtttatagcccgtcagtcaaagcatacacttaccgaccagtctgtttcaacatatcaagcatttttgtttggaacacatgatcaaccgactcgacagtgaccgacgttccggattgaggcatagcaaagacatcaaccacatgcacctatgatatatcgaataccagcaatatgggcagaagagggtcagaagtcgcgcagcttgaagacatgtgttcttcctgagaagcgtagcggaaacatacagtgtactcatcaacaaattcaccgagcatcagtcccattacctccatcggaactcctgctcgtccatgcttgagcatctataaattgaatttgtgcaacaacaatgagtggaaactccttcagccaccatcgatgtgattcattctaccggccgagggcggtaatttgagacacaccttcaaaagagcgagagatgaaacatgaacgatctctccactgtttgaccctcggattttacatgggataagaagcgtgttagcgactaagccatttcttttcaacaaaccttgaagaaagccatattcaaccaagcgattgaaccaggagtatctctgacaaagcatctccttcagacctttttctctcgaaactttgaatatcttggtaacccctcgtactatgcacatgtatcgaacgcagctagagatccacatactctgaacttgtctgatgtatttcctcgctcaatcctgaaagatggaaaaatataggaacaatagactcacgtatctccgatctgagtctgagctggaggtccacccattccaccacctccaccttgttgtaataatcgagcaagtccttccatgatctatgtgagtgtttgggtattcgaatatctaggtataagatgttggattctttgtgtcggttcggtcgtttggtcggggtgtttggttgtagtgatcgaggaagagacgtcagtaagggttaagagatggccgaaagctgtcgaggtggaacttaaaaaaacgaacgacgcaagtcaatttgaccggccctaagcttttattgaacttctcaagtcaacatatagagtaaatcgcataaatcgttcgcaaaaacattcattcctcaatcctttgtccagccaagatctgaaagtggctgagaacgtcgacaatgaagtcccagccataataatttactgccagtcaaccaaggaccatctaggtttgtggagcaaagctcacaacagcgtactttccattgactctccatttaggatcctatacatcgagccagacataaacatatattatcagcgcatatcctgatcagcctcgatacctagagatctagcaaagatctactcacttctttgaccgtgcgctcttctacaccttcagctagaccgacgctgtgtttgaagttcaatatttggtagaagaatccacgagatgagtgagctcacacattcttcaaacgcctgatgaatgttattgggagagaacgtacatgacctcagctttgttggttctcagagacaggatctgttgcgaagatagtgaggcaaacaaaatttcagtctcaaaacatgaacggagctatcagcgtcccccaagactcacaggaattcggccgttgatggggcccaacaccttgtcaaaaggctcagtagtcttccactgagcatccgccgtcagttttcgatagcttcaccagccataccacagtacacagataaggatgatcagacacatgttcgcttcatcatacaagaccgagaaaggaagagtggaagaaaataatcacttgaggtctcccttgaaaacgaccaagctacttttgcccagccctcctttctcatgccctaaaacaccgtcaaattcctccatgcgttgatactctgcgcttgtcgtccagaaatcgctcttgatgtgtttagaacccagttccgtgtccaaaggaaccgaaagatcaaacgccttcttgtcaacaagagattgccatctggctgcgagatcggtaagcgccttgaagtcggcctcgttaagcgacgtcgaggtaaagaatgaggatggattcgaaagtgtcgaaaggatccatctgcccagagaacggggaaggtgagagtaagcaaaagagattttgagtcagatactaatggagttatataatgaccgatataacggcacacgtgatgggaagaaaaactgaccggaagtcggtggggaggacgtctgaaacaaaccaggggatagtcttggggctgttgtaaatccatcaaatttcagataaagacaactgtgacggctcatgaataaagactattgaacgtactggaaaacggcgtggtcgaagaaaggagtcatgctgataagaaaatcggcaaagaccatatcggtgaagagctacagtcagattaggcatcgaatgaggaaggaaggccacgaatgtcagctcataatcaagttaaaggagtctgacgaaaaaggaggatcatgcggcggcatacctcaaacccggctacgaaggttgaatattgaaagaaataaagaccgatacgttaggcagtatagcaaagtaggagcgtttcttaatttaaaaaaataggttcgtgaacgattaccaaccattgtccaacacaaagtcgacctgcttctttccaccctgactctctaggcgcttacaccattcccaaactggagactcatcatctcgcaagatgaacttcttctcctcaattcctcgggattgaagcgcctgaaggctttcctctgtggccccaccggcaaggagcgaaaggtccgttgcgctttgtagaaaaaaagaaaacaggcgaaaagaccactgctcttgagcgtttttgttcaagacttgaacaacatgaaaatacacaagaaccgatcgcttacttcccccaaagacacatctgaagcatcgagctgaatattggctgaagctcgtctaacgttgtgggaggcttctcggccagggctagaagcgaatgagccagctctgtagttttgaagttggattgttagcaagcttcccggtaaagtaaagaagaagaagccatctccaatagagagcactgaccaacaaccgctttagaggaacttcggaaggtctcgattttggacgtaaagtaagggtcgtatgtcttccattcactctcgacagccacgaagtttcggattttccgatagctagagaaagaggacattagataggaggttaaatcgagtttagtcgccttgtgcgctcatagttctccgtcttgggaagtttaaaactgtgagaatactatagctgagaaagcagaacgtacagaaaacactcagcccataaccagggcagttgatgccaggtcttctttccttctttcttcagtctctcgacctcttcattgtaaatgcccacattgggttctccatcatcgaccaaggggtggaattcagaattggaggtgatttcctctagaagatcgtcagtcttgtcaacaatcgtctttacctgagagacagcaagggtggaggtatgtgtggttaagctcgcattcaaaaaagactgtctagtatccttgctataaggtggaaacgatgacaaggtcaagattcagacgcctgtgcaagggtcaacggtaagaaacaagaagagacaaacatgattacaggccatctgcaatataaaagcaaatccaagcaatcagcctgagaccggtgtatccgttttaaatgattgatatcaaatgagagacactataaacctaccgtgtgatgacagtggctctcctgagaggaagaagaaagtacaaggctgagtgaatttatactattgcctcgatagcagagaaataacatgaatcagacatacgcaaagctagacaaagatggtttagatcggaccaaatgtcagtttcaactacccagccagacacaagagtacgacaagagcttagaccaaatgtcggtactacgaacgttccctcctggtcgaatccccatctcggaacgggtagatcgtaagtagacatggttgatatttggagcagattaaaagctagatgggttgaaacgagatgaatactcggagatggttacaccgctacgttagatcgctgggtaaatgattacgcaagagccaagcgagctttcttaatctgatagtcaaaataatcagttgataatttcttttcctcctcatcttgaccacaacttcttttgatttgctcgtttgcttgaagaaaaaaagaagtaaggcagatcgatcgtgtgttcatcctgcacagcactcttgtgataaagcaggctggagggccggatatgtaaaccttccggtcgcttggtctattgtttgagggcttcttttccctcaattctccttcaagtccatctataagagaaatacaccagagaagaagtgaatgctgatcgtttcttctttcactcggaaaaccctctctagaagcgtcatcgtgaaatacactgcacacagaatgtcttcaacttcagctccagctatctccccgagggttctcaagtccctggccgatccgaactcgactctcaagacggtccttgttttggggggcgcctatggagggctccaggcagccaccacgatggcaaagagcttggttagctctgacggaaaaggctttagagtagtgatcgtggaccgaaacagccatttcaatcgtgcgttattggatttttttcctatctgcctcatcagaggtcacagctttccttaagaagaaccggtatctgattggctccatgtatattttatttgacatactgcgcgcaaataacagatctgtacatctttccccgatgctctcttctttccgaccacactcctaaagcttgtgagatctcggttttatcgtttagcattctttggcctagtcgcgctgataggtcaattctcattgattctctttcatcttcaagtcatccctgttgcgcctcagatcgaagcacctcatatttatctccaatctaccttgctctcgctcgattcagagaccgccactgtcgccatccctcccactctctctcccacttctgaaccggaacaggtctctattccatatacctatctcgtctatgctctcggaggctctctggccggcccgatggatatttcccagggctcaggcatgaagccggatggagctaagcggttgtcgatcgtgaaggaaaagatggatgagttggtaagacaacagaaagaagagatcatcaagggtcgagtgctcatcatcggaggtggagccctaggtgtaagttgatctgaattaagggcggatatcactttttgaatgatgagaagcgagcgttgacaagaggtgtcggaaaaaaaaaaactagattcaattggcgacggatatcaaagagatttacccaagcctcgaggtttccttgctgcatagtagggaacggctaatgcctcggtttgataagttcttgcacgaccaaggtatgtcttcctcatctaaacctgatgtctgtaggcttcactgaactctcttctcatttccaacgcagccaaaaagaggtttgacgccttgggggtcaaatattttctcggtgaacgggctgtcattccgcctggcgggttcaaagatctccgcgtagagagcagggaggttctgactgttaagggcacccattctataggaactgattttgtggtaggtcttgttcttttctagtttccttgccttcaatatactttcgtctgggtcacgacgaatgagtacggctcacctttcacatctaccctttactgcccgtatctgtacagatcacatgcaacggccagtgtccccagacgcagtatcttctgacttccttcccggactctgtcaaatcagacacctcgaagcaggctagggtgctgaatacgatgcagctcgagtctggtcctgatactggcttacccgtgttgggtggaaggttatttgccattggagattgcgcagatagtcaaggtgtcatcgatgccggctacagtgcgttttgttgatcgtttcacttttctctgctgctgctgcctgtttcttcgaatgtatcatttagagaaagatcgtcgagagactgatagtgtaaccttgtttgctctgtcatcagctgcctggcaacagggaaacattgcatctaggaacattctccggatgatcaggaaggaaaatccggaaatggtttcttcagacttggacctgcccaatgaccagcttgaagattgtgcgtccctgtcctctcctctgccaatctcttctatctccaaagctaatcggctctatgtatctcatcaacgcacctattttattcatgtgtacaaccaatagacgagttacagaagccggccatcaagctcacactcggtctcaaacattgggctatccagaatgccgaggaacttactgaaggcgatgacggcaaggaagatctgggtgccgaactgatgtggacgcatatgaagtgtgacccgacggacaagtgggcctgagaaggaaataagtttaattgggccacgagaagtgtacatcggttttgtttatcttccccttgcatcgtccatcgatttataatttgttagatggtcatcggggttggagcaatgtatgaattgatcggcttcctccgggaagggcggctgccgaaagctgtgccgaccggcgtctatttggcttggcatgggattcacgaaccggttcagaccgaatgatcttacgtatgaagttgagcaacaggtgtttgttggtgacatccgggtatcatataaagcacgttgaactcttcgcaaagctctcaacctcaatcaaccgtgttctcatctatcatctacttcttattgatgtctgactcaaaggcgcccaactacgaacaaacgccttcctactcttccttaaacccttccaacgagcctgatgcacctccctacagaagtgatgcatggcgcttcttgaacctgtggctttcccttttgaatgttgcttacatactattctcatgttacttctattcaggacaactcactnnnnnnnnnncccgagcttctttccaatccatgacttcaaatctgctccactcatctcgatctccgagactgtagattatctgctccttctcggcgcgtttgccaagctgaaggatgaggtagtctctgttccaacagactattcgcttatcgacgcttcggtcgacccgaataatgagttcaagcttgcaatctttgtcaaacgagctttgaaccggttcgaggtctggtggaatgcgatggagtccgttcgggccaaaggtgatgctagctcgaccggcgagctggaggtggat

SEQ ID NO: 1116 - DNA, 1183 bp, Xanthophyllomyces dendrorhous
caagctcaccggtgagcacctcgctctcagacacgctacctgtcaattgcgccttctgtggaaacatcaacatcgttccttgggtgacccttccgcggccaaatgagttccgtctagtagactccagaactaaaacggcaatggcgctgcctgcggttggccaagggtgggctcaaataggcttcaaaatgaactgcaccatctgtgatgagacatttggtagggatgagctcaaagttagaaagctagcagacgatctgggaaggtgcctcttaggaaaggaaggagggtttttgccgtaagtttttctagttcatctcttttgcatttcaagtcggaggttcgagttgtgcttttgtgctgatcctgtcccttctttccatagtcaactctccctttctcacatcaccgggttcactcagagctcagagactgcagtagttatgaaccagtggcttctcgccgagttgtcttcgcacttcccaaacccatccgatccatcagccaaattcgatctaggctcagatcagctgaacgaagagcgcaagactgaggttcgagagttcttccgaggaggtatgaagagcgtgcaagaaatctgggacgaccacaacaggaaaattggtttagatataagaaagaatgcggcgctcgaaaagaccatgaaagaggtttgtaaattcatcttctcgaaagtttaactgtactttacggatctgacctgttttgttctttgtctatctatcttctccatactcttgattgtatacgccttaagacggaagttctggggcaggtacgcctcaaccgaggctcgatttggagttgatctaactggagcagtgagggctctatctgttgtctattgtaacgcttcttccgatgcttactaaacctcgtccccgctagagcaatctatagacattgaggcttaatctcttcatcgaaaagatgtgagcctgctgactttcctcaggatatgatctcatgactgactctttgtgatagatccaagattggatggacaaacccgacttttttgagtaccaagcgcactttcatcgcttaagcgatcgcgaggtctattgatgttttcttctttcgatggaaatccctgcgtaccactggctcccgttgaacatccatgtttcactcttatcgtctggtcaggtaccatcgtttc

SEQ ID NO: 1117 - DNA, 2635 bp, Xanthophyllomyces dendrorhous
cagttgaagatcgagtcttatagagatgacacttctcggctgttgaccaactttcttaatcacccggacaaggtggatgaagcttcgctagaagaggccttcattggcaaggctgaggcctggaagagtaagcgattccttttgcctgtccagtaaagatgataagtgaaaaaacggactgatcgagcattcggtaatgctatcttaggtcaatatgacgaactttagtgagcgcgttatcatccaattgatttgggtagtcacaactgaacttacacttgctttcttgatcattgaagttccactgctgtccttgttcgtaaatttaaatcttttcaagacaacactgttgtgtccttctgtgctactctctccaggatgtcaaaggtctgactggaaatgagatgctttacctttgattcacgattgaacaggaggcacctcggtcgacctatttttggagcagagaaaacccgtcgactccgtccgaacctgccaaaccggtggacgaggaatatagggatgctacccaagcctcgacgcataactcagtctggttggtagcaaacaaggcgtgcctcacgaaccgagaaagtcgagagcataacaggttgggatcccgtttttctctctcttttcggaagtctaggatgaagacgatttagacgaagtcctttcgcatttattgacttgcttgattcgtcactgggtgagatagaattcagcagaccaaagtagcggagaaggcctgggccaaaaaatctgtttccaagcttccatcgaacaggtacaaatcttccatgtccttgtgtcttcttttctcttccgtttcattcattgatccacagcgctgactttgcttgcgactctttatcttctctctgtgactgttctgtaggacaagcgagaactatgatccagatctgttctatcaccaaacatcccacagtcttggtcaatggggatgtaccaaagtaggagttccacatcatccgttggctggttggggtatgggttcagagtgttaccctcacgatttcgttagtcccgatctttcccgcttgtctcctcttcttttcctcttgtgtattgactgtttgatatcttgggtcggatgacgtcacatcagcattggaaagagatgcagcgtgcgccctgtctgtgtggacgttcgaagtgctgtcttggcgagggatgtgagggtagcactgcgacgtcaagaaacgaccgcttcgcgcttgacttagtcagtggcggaatggtagggttttgaatcgtgtattgaatgttgagagcgagagaccggggccatgcgagggcaagcaatgatgagatggagatctgttgtagttttttatttgtcactttctataatgatatgttgtaatgaagtttgtccaaaactctaatgttcctcactggtccacctgccgccacgcctttttttccttgtagatacaaccgtctttctgtttgccagcattcactttccgtcctctccttctataccatctcttgtggacaacaaacatcgtcttgatcgtctttcacatacatcttttctcgaatcaacctcatgacgtccaggatcaacgttccttcggcctctcagcgactacacgcacagaacgctgttccccctccctcggcctaccagccctcgtatcaacctgccgggccatcgcaccatcttcgcaaacagtcgagcatcagtggtctcgcctcgaccgtcggtatcgatgactcaaagttggatactgtcagacaggtcaccgatagaatcgaggatgtcatcgagaggttcactcaacctgtcaaaccttatttgccagcagctgctaggtctgtcctcttgaccaatttttttcctctttctttctttagtcttttcttccttctgctttctttacgtacaacagaattgtagagaggatgaactcagttcgaattggggatgacttcctcctgaaagaggtcaacacgactcttgttttggttgtatcaacggaaaacgagaggaaactacggagatcattcagaacgatggaggggttgggtgtgagattgaaactctcatcagcttgtataggttgtgcatgcgtaccatgcttgattcgacatagtactttgatactggttgactgaatagatggccttcctctatcatcttggatcttttccattttctaatggtcgaaaccaagtcgagctttggcttctgattagaaacctgaatgattcgtgttgatatgttcctgatggctgatcctcttctctatcttctccacctatgcctgttttatgcgtcgcatcactactatagattcctcatcgtcgcgaccttccttgaagatgcgttgaggatcatcacccaattttcggatcagttgtggtatcttcaaacgtaggtcttccttagctctattgatcgatacctctattggacgtggcttgatcccgtcctggagcttgtcaattaacgctgcctctttcctcaatgtagccaacgaaaattctactggggattttctcatctgtttcttgcgaccaacgttgttgtcagtttgtcctcgcgccagacctctctttctgtgcccatgttctgacacgcgtcggccctcgcactgtgtgataa

SEQ ID NO: 1118 - DNA, 60930 bp, Xanthophyllomyces dendrorhous
gtgtgataaaactataggtcatgatctcttgctctgctcttgtcatcaagcgacttcatcctcactacgctgtcattggtctccttggagttgttatctctcaagctttcggttacggtctcatcttcgatctctcattcttccttcgaaacttgagtgtcatgggtggtctcttaatggtacttagcgagggcttggcaagcaagaaaggactttacattgctgggttgcccaacattagtgaaacggaccgaaagaagtagtacgtcatgttttcttcctcaaatccaattgatttgagcgcgtgaagagcttacttgatgcggttatacttggttttacaaaactgaaccaccttacttcttgtatctctacagcttccaactggctggtcgggtgctccttatcttcctcttcctcggtttcgtcttcaagggcaactggtctttggctcgagtacttgtttcactcctcggtctgggagcatgcgtcatggtggttgttgggttcaaagccaagtggtcggccacattccttgtgctcatcctctcgatcttcaacatcctgatcaacaactggtggagcgtgcacccgaaccatcctcagaaggactacctccgatttgactttttccaaacattgagcatcgtcggtggtctgctcttgttggtcaacatggggcctggaggcatttcgatggatgagaagaagaaggactatgtgagttctttttcttatattcgaacgggctgaacgatagcatatgggctaatgacagtgatggcttttctcgatggatggtaaaatcagtaaacaagaaaaaactaaaggctaagacggatgaaaacgggtaaaaccaagttttatacgcctcgaaaaatcttcggattgataccctttttcctacttcttgccttgtatctcgatggtcgcatgaagatatttctatttactgggtctcgcgtggtttataccgattctttgtcttttccttcttttgagatatacatgtatttttttctctttatcttcctgttctttcagatcagatgagccgctcaatactacggtcttgacatgtcgcccatctcagcgctcctcgagagttgttctttctattttacatttcatgctctaagactatttggttcttctatatgggtaaagaatacagtcaagtcgatgggttctttgaatgacagagtttggcttgagcggcacgtgatcttgatggctgataccagaaacccgtccagtcgaccatcagcccttccacatccatcatccatccgtctctcagccgaccctttctccgtactactctactcgaggtgagattacctggctattgaaaacttatcgactttaacactataatttccccaacatgccaacggatgtggtttcgaacgaggaggttcgttgtctgctgctgaacttttttccgcttcagatccttaaacaagttcaatcctaacatcttttcttgagatcttgtgttctttatacacctttgctatctttgtcttctggtttctttccgtactttcttcctctggaacggaaccgtagttccttgtgaaactccagagtcttctcgggacgactgaaaaggccggatctgtatggatcacccagaaacgatgttcgtctctcttttcccttgctcctttcttgttgacttccttagatcccttgtagatcagttcaaagaagggcaagccagctgacaatgatgtttgaatcttcacatcgtatttcttcaacttcaacctatgtcgatccgttggctgtatgcttcggatggaacggaattgggcttgatgtagtgacatggcaggacccatcagtgatggaaacggtggaagaagacgagtcaaaaaggacttggtcgtgtgcgatcaaggccagtgatggaaagacaaagtttactactcatgtacgctcctttcttctgctctttgtgatttctgtccagaaagaatgttctgacccaaggcttgtattgaaaacactattgtcaccaaataccctgccctcgtctgactatctctctcctattcgttctctttgaataccaaaaggtgccctcaacttccctcgacacattctcaacctcatacggcacacttctcaaagcttcttttgctccacatctccgtaaacgagacaagaagaaggagaagtctaaagcggaaatattggtcagggaacgaaaacggttagaggtcgtcgttcagaaaggtttaccggacgaaacaggcaaacgaggaaaaggtagaggacgtgagtactgatttttttttctttccaatcccacccactctgtgctttcattctgtttggctcttactgttgaaaacgatgagggtccggaaatcacgctgttgaaagtacgaagagaacaggaagaggggaaaacgtcccagtagtcagaatacactgcaaagaaggagcctagacgactcgaactcatactgatggcttatctctcctatcttgctgttctttgtgacgatttccaggtcatcaacgtaaagtcaaggcgctccgtaaagctgaggccgctctatcaaagatcgtgggcaaggaagagagaaagaagcaaggcgatgctgctgtggctgatttactggttggagtaagcccgagttcctgataccaatgaaggtgttaaggttgtattagttttgttcttcgatatttcctctctctctctgactagctacgtgtggtagcaaacggtgccagtttttttagatattaaaaaaaaacgcaaaacgagatatctcgagcggaccatgataactgatacaacaaacaagtgacgctgacgactagctaaggaatcagatctatattaaccgacctaatccacgctaatctgaattacactttgtctggaccagactgcttaacctccctcactttctccttggcctttaatttcttcttccggttcttcttcgactgctttcctcggggcgagacttgatgtttatcaggagaggcgcgctgttcagaaatcttgggattggtatatgaaaaaagaaaaacaaaaaaaaatcaagagacaggaaggtccggttgagtttaatccctccacccctttcagcgtatcatgtttctatcaataaagacagcggacctcgacatctctctcaacgaagttttctacatccatccccagccggatgactgtctcgattggatgacccattcgaaaagattcgtagtgggtctctgctccttgagtttgatcgatctggtaacaggggcatgaatgattcagaaagtgttgggcctaaatttgtagagaaagagagggagggaggttgatcatcttgctttaccagttcggttggacatactctgatcggattgacgtcatcctcgagcggcatatcggtgctcgtctcttccatttggagcttgattggtatatgttcagtctcttgatgagtttcatatgggtgtatctcatcagatatatcaggcccagcaaggcttccttctctttcgattatggtgctgtctgcttgaatcagtgtgatgggaccagcaacttatcacgtcaaatgtcttctctgtgtgacgctatgctcggatgttaaaacgcatgagaaggacgtactggatccagaagacgatgtgatatctgattgagaggttcgagaatcgtacactggatcgtatacatcatcaataatcaggtgaagactgccgtcaaatcgatcaacaacgtccaacgattgctccgttttggacatggacataagcggatgagaatcatcaatcgttatctgagactagaaggagggcaaggaagaaacaacaaaactatgtcagccgattagatcgaccgttcatacgaacaggtacttgtatcggttagagcttctgctatgaattagtaaagagcctaaccctcgtgcgttcgtgggaaccggtcgcgttcaacaatgcagtcctgttgtcattggtgaccttctgagagtcgcctgcaacctgttattgggaacggcaccttgtcagtcagaagtttgcgttgatgcaccctcatgtatgagggtaatcagtttgaagagggcacacccctgtatcctgacatagttggacgaatgcgatggtcggaatcaagacagccacgaaaggaacgagagccaggctctctacgtatccgaggatgcctacgaaaggatgaatggtcgaacgagccatagaggcaggattcagatgagatatagtatacatctgagcatccaaaaaagagtagtggacgttgctggcttgatcagacctttggaggcataaagaagaatgtcttctcatatggtgcctgcatggccgaggacatatctgatgcctgatgcacacaggatcagttcccttcctcggcagatcatagttgagcgcaattgttccttcttgttctttgggtctttccatacgatatgatatgtacgatattccttctctagctagttcttattctctgactcttttctctctgatcagttcgtcagttcagctctgacgattaggatgctgtccggcgcagagcgcagagaaagacatgaggtgagatgtaacgatcgaatgtcacgtgattcttctttacagtcgcctgctcagtttcaaatggaatcttcataggagacaacgagaatctgaaccatcagcataactcatcagacgatgtcctcaaacaccacatcttatcctctctttggaggagctctctctattgacctgccagctggtctgctagacgcaaggtcagtcgtacgtccactcttctcaactgtttggctggacctgagcctgtttccagaagtttaatctagctgtttgatctctattaatcttcgacccctttcccttgatgacgcacgtttgggtctgttcatatagtgatatccgtcaagtacctgatactcaggaagtctttctcgcgcatgattcagagctatcttatatcattgagattctggaagcagtcgagtcggacgagtgcgcaggagccataaagtgagtttggtgagaaagtgatggtgaaaggaggggaaacgtgttcttatgtagaacgctgacgttcgttttcttcctgcctgattgtcatctgttggcctacgtaggtttcactttgattcactcgcacatgacaacactgcgctctcatcgacaatcacctctatcgacagcccatcatccctatcgactgaatcagctgtcaagttttcagatttcccaccttcgccgccgaatcagcctacagtggtgacactttgtgggaatcaggtggttcagaagttcggaaagaaagaacttgagggcgaggttgtaatctttatggctgtctggcgaatacaaggttcgctgtctttcctctatcactctttcgtcgtgttactatctttgatactaacaaggacgaaatgaaactctgaacatcgaaccaccacatattttcttaccacttctccatctccatccttatctttcaaatcgacgttaggaaaaaacaccgatatcgtgttcactatcaactgccctgagccctcgttccgacaagcggcagaacaagcttttagagctgccgttcctatgttcaaagtcaatgattggaatctgttcgctggttagacgattgatgtaaggattcaatgagttaacccgtgaataccgtcgatcgatagagtttaaagatgataccgcttagacgagtttcaaacattcagccgtttccaaacaagtatagggtagttgataaaatggaacaagaaaagggggtatcgtatgatgacaaaaagccgagtgatatctgaaagacaagaacgataagaatagaacaagaagtttcaaactttcttcgctctcttcttcttttccctctaaaggaagagatggatgagactcaatcacaaccagaagaaagagtatagctacaaaacgagacggtacaagacaagataagactttcaacaaatgaaacgaaagacagaaacagatagaaaactctacaagatagcagaagcgaaagaggaaagaggaaagaggaaagaggaaagaggaaagaggactaatcactcagtgtactggaagatagatacaagagaaccaagctctcgccctcactctcaagcgaagatcttgctggattcgtcaagttggaattctcactactcgaccttcccaactgataaagtctcctctctcctgccatcgtattttcctctcgaggaggggaacgaggtggtagtgaagggagaggacggctcatcttcgagtaaacttctggtatgatggtgggcgttggggagttaggaacgggcgtaagttcaagtatcgacggacacagaaccgagttcgtaaagtcgtgtgttcgatcgggtgatttttgagatgaaattttgtgcggagaaggggatggcaaacatgagggagaaacaggaagatgaggtaagagaagctcaaacgggtttataaacgcaggttggttatcggaggatgggtcacgatctgttttgataggtagagaataggatcgaccaagccctgctggtgttgacgcggctggggttgctgctgttgaaaacagaggctcggatgcgttcgaaccgcagggtgatggacgaagaggacgaaaagcgacagggggtggttcaaggacaacggacgtgcgaggaggaagggtgaagaggggtaacaacttggccgtctggcaagaaaagagaaagaaaaagcagacgtaagagaatgtggttgaatgaggcgataactacaaacgataggacgtacgacggcttctatatcactctcgtaactccgtctgagctcgttatcaccttcatcccggtcaagaagcaaaccctctctctttttgtccattccgttcttgccttcgtcttctttctccttctcaaatttccgctctatatacattgtacgcttctttcgaaagaacgatcccttaggtgaatctgtatgatgatgacccggaccaccacctccttctagcgggctcggaagagttcgttttgccatatttcgtcgttctttacactctcccttgtcagctatggacgacgtccgtcctaccatctcaggcaccggctcagccttcgagctgctgaaaaagagggtggtgagaatcttcgaggatattcttctaccaattttaggggccggggttggtaagatcagatgttctagagtattcggagaaggtagaggtgaaggtgaaggcggaatgacaggcggctgagagtaatgatgatcgtcgtagggttgaaagacgggtgactgaggggagtgacgagggtatggtaaagggtatttagggtctatgcatgaagagttcgacactgtggatgatgcaactaggtatgaatctgatggatctcgcgcggaaagactatgtgatcttataggtcctatcggatgttcttccctgtatgccgatgaagatgatgttgctgatggagagggagtgagaggaaatctgggaaaggtgggttgggtggtatgtacagccgtttgagaaagagagagagatcggagtcgagggggaggggatgggtgcttagacgtactctgtccgattgaaggagggaccaaggttgattcccactcgtccatcgagtagtcatcatccaaagcgaatcttgagctttgggaatccactcggctaggtcgagaatcgaggtcgatcgaggataaagtacgagagccatcaagtgtagtggcccaggaggctgtcgaatttgttcgagcgcgataagacgaggtgagagtcgaatttgagtgatcaagcgaaagatgtatctctgggacaggagggaccggagggacaattgtaggcccattcttccttcgttcggaaatgaactttgattttcccttcttttcctgccgagctcgaggaggcgacggtgattcatggccaagctatttggaatagacttgcaagtcagcaaccggtatcctgaaagaaagaacaaaaatccagagtcactcttacgagaccgtccaatatgaccaatgccggtttacttccaaacggcttcaacgatcctcctgtcaatgtgctctgtaatctggatggtttctttcctcgtttggaactcttatatagagatgatgatttcgacgatgagccattatcagactcagctccaaaatcttgatcgcttttggactgatcgttacgagacaggaagtaatgtgaagaaagagcgtcgtcttcattgtctttgtcatcgtctatgctggcaaaagtttcaagagtgtttatgctgaatgaactcaagttgtgggcgagaccggtctggtaatcgctcagttggtcgtttggtcgctagagacgcgccaacaaggaatgataccccatgatgatgtccaagacgatggtgatgaatatgaggacaaggatcaacattcagacgatacagtgaacgaaaacagatcaacttaccctggagattgttcgataaccttcgcatccatcatcgaaagagatttgggactaggacgaggaacaggaacgaaaacagggaacaaggaacacggaacatgaaataaggaacaaggaacaaggaacaaggaacaaggaacaaggaacaagggccccatcgcgactcagtaagcacagaagatattagagcggaggacacgaccggtccatcttacctctctgttgatagaattcgaccgagctctcgatcttgaagactttgacattgcctattcaatccaattccaaaacagaatcagttctcggtctgtgaactctcttgtttctgttgtagacactgttggtcttaaagtcgttgttgacggtttagaagtatctcgagtgatttgccaaagcttaccaagagggactaaacgtccaaacgaagcaaaagacaccaagacgacatcatcaatgtcaccacaagaacgcgcagacaggacaagacaggacaggacaagatttatcagcagacatgcgaagttgagagggagtgagaaaaacgttatgtaccgacgaccaccatgtatggagaggcatgccggtatgacccttcagcgactactcgttcgaagcgggcaggaaggtgaaggaagagaagagaatgtatgtcttgtataggacaggtgcgagaaacaaccaagctgttgattggagaggaaggacagaaagaaattcgacaagcgcgtttccatccctatgggtctgagcaagaagacctaggaggatgtgaacggtatgatgcacaacccttatgggtcatttaactaaagcaatcaaaaggagaagaaaagaaggagagagatcgaatgagtgaaaacttgactaaagaatgtaggaagtcaaaaacagagaaaaaggcgggaggcaaagcgtgctataaggtttatattgcatccggacgtacttagatctaaatacctcagatgacagatcaaaaacttcgggttggcaccggaacgagatcaaagagagaacgataagtagagagcaagaagataccaagtgatgatgatgaaggagtgaaatcaagaaaacatcagcgcaagatcacatcaaaaccgagcttacttttggttgaaggagaaatgaatgataactactgaacgcctacttttgattcatgaagggatcgatagcgcgtctagctaaaatgaccgtcacagtgaggatcaaccgtatggatcgcctaaatatataaacggagaggatgaaagcagcgatacaacaataccggacctttaaatcctcactggcgctccgccaagttgaaagtcgaagggatcaattgaacatgacctgcaagtaggataacaagcagaaggaataaggactcgactctaaacagatactcgagtgttgttcgtctcagtgccgagcggtaatctcgaagactttcgtctctctagatgcctcttgaatacgcagccaaacaatcgaggccggacgaaaccagcgcagtcaccacataagtttgaactgataagctcggaatattctatcaacttcacgcgccttacaaggcagtgcttgtgggtcgcgttagctcatgacgtatgatttgctggctgagattttgtttttgaaactataattcaaatatatgcttcgaccctgacaacacgtcttccccacactctctgttacgttatccttctcgttctgttagtgatcataaattccgccctacttaaaccttccccaacatcattctcagttatatcctaccatctcccccttgttagagaaagataaataaaacgttctctatttcacccatcttaacttaactcatctcgtttcatcctaataaatcagtcgtatggctcctcgaaaaggaaacgaaaacgggtcatgggagcttgacccggatttaacaccaagcaagggcgaaaccaagactcgtcgaagctactgtgtgaaggatctagtaacccgttcgtcccagctgcttggagacttctcttctcgcccttgtctgaatagatatgttattatcgatgtccagcaagctaaacctttctgtatgatgttttaatttcctgctcgttcacctcctctgttcgttcctgaacatggtccctcctgccctggacatctctttcatacacatactctttcacctccaaaaccagaaccccttcccggaataaacacaacactcgatgtggtcaattacgccgctcaaaagtcacccaacgcaagaggctttggcatccggcccgtcctggataccatcaccgaaactaaacagatcaccaagatggttgatgggcagccccacgttgagagcaaggactggaagtttttcagactgggcgagtatcagtggattacttatctcgagttcaaacagcgcatcaacaagatcggtactggtctctatgaacttggtcttggaaagagagagaacggggagagtgggttcgtcaatatatatagcatgacctggtaagcatctcatctttcgactcttgtgttccctcttttgccaagagttactaagatcgacgccgatactcttcattctttaatcatgcggccagtttgcattggcagatgatggctcaaggtaagtctttccaagtggagtaggaaaaaacgtcttcatgctggcatcacacagtttgactaagatcacacacattttgcatagcttgcgcatcaatctctgcgccgatatgtaccgcttatgataccctcggacccgacgggctctcccatgctttgagcgagacatctagtcaagcagtcttcaccaacgccgacctacttccgactctgctcaaagtgatcaagaactgtcctgatcttcgtaccgttatctatgacggagagccatcgaatcaggtcctaacttctttccaagaattgaagaacgtccgattgattagcttagaagaggtcgaagagttgggctctaagagggaaacggtagagatccctccgaaaagagatgacatttgctgtgttatgtatacttccgtccgtatctcttcttccttatctcgatcttcaataagaatcaatgctcaagcaataatcttgcgggttcgtccggttctttgatacagggttcaaccggaacacccaaaggtgtggttctttcccatggtaacatcatctcgtccgtcggcgcggtctacaccttactatacgagatcttgagcattggggatgtttatcttggtaattactctcatattcaggatagctttcaattcgcctcttgaacagctcacttacctaggtaaaatttctgctttattttacagcctacctgtaaggatcatgtttgcttgtgtcgaagtcagacgccagaaactcatctattcactcaatatctccccgtttatcagaccattggctcacattcttgagcttgtcgtcgagatctcctgggtaagttttgtaacttacatcttgcagcatattgaatttcaaacgttctaaatcatatggcttccagattttcgtcggtatgcctatcggttacggccgtgtcaagactcttaccgacgcctccgtccgacagtgtaggggtgatattgcagagctcaagcctacaatcgttagttgaactcttcgcttttgtacttcacgtttcgtctcatactgatgatcgggctgccccaatcgctgttttctgtccagatgactggagttcctgccgtcgttcgtccctctaccactcgacttttaaaagccttattttcaacgtatcggtagatactcaccatgttatgtttggtattcgatcagtgggagaccatcaggaaaggtgtgaacgcaaaggtggccgcaggctcaactcttacccagtatgctttcaacttcgcatacaacctcaagttctttgcccagaagtatggtatcccaatactccctcagcttgctgacacagtcgtcttcgtgagttccttcgattcgattcttgcgaccaaactctagttcggtagctttcatcagccgggggaagatctctgtgaactgacctctgaagaaatgtttttcatttcgtgttgtacagaacaaagtcaaatctcagacaggaggaaggcttcggttcgtcttgtcgggaggcgcggccatttctagatctactcaggaattcttgacgaccactttggtgacgaccctccaagggtaagcctctgcatttattttgcattgtgttttcccggtatcttgtgattctaaataatattgttattcatctaggtacggtctgactgaaacggtaggcatgtgttgtgttcttcctcctgatttcttccgttatggggtagccggagtcccagtacccagtatggagctcaaggttcgtttccactgtcttttgcccctttgtatatctctggttaagattaatcggccctccattgccccgttttgcatttgctttgtgaacaaagcttgtggacgtacccgaagctggctatcttgctaccaactctccgccacagggggaaatttactgtcggggcccatctctcttccaaggttactttaaacgaccagatcttgaccaggaagcattcagtgatggaccagacggcagatggttcaagaccggagatgttggacagttcaactcggatggaacagttagcattgttgatcgagtcaaggtatctttcttgttctctattttctgacattggggtttcatatagaccgatgagtatacggcgcctaattcgttgtcggaatgttgatttgatatatagaatcttgtcaagcttgctgggggagaatacattgcgttggagaagcttggtttgttccggtgttgttcttctagtccatcacaactggcaactgattaaacatggttgaactgcttcagagtcgatatacaagtccaatcagctggtgggcaatatgtgcgtgtttgctagtaccgaagcaagacagccgatcgctgtcgtccttgttgttcgtataattttttttacaaaagcctatcactcgtcccgctccttctcgacctcacgcaaactcttcttgatttcacatacatccagcacgaagccaacttgaaaccgttccttgcctcgaagaacctcgcaacgccggacgctcccctggcacaagtcattgaggattccaaggttcagaaggcggtgctcgctgatattaacagtaccggtaagaaggccggactgaactcgatggaaaccctgcaggcagttgtgttgacgctagacgagtggactgtaagtttcgacctattggttcactggaacatcataaggtccgatcagttgatccttgaagctaattctgaactgtctcttgcgttcatacggtccaacccaaattggatgggttacagcctgagtctggactcctcaccgccgcccagaagatccagcgaaagccaatcgagaagaagtacgagtcggacatcaaggtccgttttgctttctcatatctaatttgttttaatcttgtggccagccgttgttctcaaagactgacgttcttttccatgtggttgtgcacatgtacagaaagcttacgcagtctaatcatgatcctaatctagtgatcgctccaaagcaccgatatataccttcttgtgaaacctttttatccttaatctaccacactcttgttgcacaagcttgttcctctgtttttctctcttacctaatcttgcgcgatcgctttagctattccagttctcatcgattctccctactatcaccatcccgcttcattgtctccgcccgagtatcttcctgattctactaatacgatctgtacaaccagcttgatcgctcaatgctcagctctcaaaaggtatctagaagactggttatcaatcgtgccgaccctttttcacccgtcatctatataatgcagtccagatctcgacctatgagaacaagaggaacaagtgatagatcgcatttcaatcaaagctttctggaagataccatgtatttcagtcaaccaagttccccttttttttttctttagtcaactcttgtttcctagtggccaactgcgcccccactgataaatccagggttcccacctcgaggcctaagctgactaagacatgatgtacaaaaaggggttcaacgttcgagtgacggatggtccggtggaaaagtcgagtttgtcgatcttccgatttcggattgacttgattcaatgttagattcaaactcagattcagatataagtttgatcgtcggttcgggtaaatgctcggtctcgagtgtatcttcagctctatgtttggattcatactcagtgttggattcgagtacatcgagatgtgcatgtacaggggcagatgaaggtgtaggttcgattgcgacctgagagctgggaacaggaaggaacgaccatagttggacagaaggatctctgggtcgggcggttcggtggatgggcgatattttatcgactcgttttcgtttttgttccgtttccggatctaactccgattcagaatcagaatcagaagaggacgagtcggtgtccgatgaagaaagtgcagaacaagaagacgaaggagaaggtagagaaggagggagatgtcttgagcctgagacgatgctaaggatgggcaagtacgggtgaagtgataccgatgggatgacatctgtacaattaaggagaatagataaataaatatcgagatgaaaataccgatagataggatgagttgagtacgagctcttgaagataaaaagagaagaaaagcagacaagagcagagaaagaggggaagagggaaagagaagaagtagagggaaaacaagaggaaactcaccttgggcgattgaaggtaggataaatcctggtgagagcgacccggtgagtgccgtagaagaagaagcgtcaaagaacgagacattcccattctatcctcgaccggaaaaaagaatggaagagcgaaacaacaatcgatatgaggtgaaagacagtaagacatggcgggatctctcgggtctgtgttaatacaagaagtcatactacgaaatgaatgacggacctgatcacctgtgacgaggtacctgccccagagatccaagtcgaacagcattctctggtttgagctcttcccatcggtttcatcaattgaaccgactacagatgaactgaaagtagaatctgatgggagcgaagaaggtgatgcggatccaagaggctgtttgggctgccttatgtcccatgcttggaaaagctgggttgaccgacgagaggaagcgaggacgatcgacgggtcgtacggatgaaatttgacctgcgcgtaagattcaatgcatcgagggaagatcagtttgggtttgatagataaaaccaatcaattggtgtcttttcgtcgacacaaaggatgtaaaattctctcgacagaccttggtgacacctgcgccttcgaccccttttagagcgcacacccgacggtgagtggcagcctcgtcatataaatgaattgaccgactgaacgagccagcagcatataaaccggacccatcaggcgagaagtcaagagaggaaatgatacctttctgaccggattttgtctttttggaaggtgacgtatggagccgctcgcctgcatctccaggacgcgacaagtcaaagacttcgatagcgttctgaaagccacagtacagtctattggcaagggcggacgaacgatggttagacggctgatcagatttaacttcgagatgtgcgtatactagagacgtaggcgtgtctttgcttacttggttgcggacgtattgaaggccatacagtgaggagctacaaaacgctcctgatggtctatcagggggtacgatccccgggtcttgtttgagcgcatgaaaagacaataaagattccatcagtatcctgtggtgcatagatggggcagaagtaagacacacacaccttcccagttaatccatcgataagtttgatgggtgatccgtccacggctagtaggaaacagaatgaaccttcgatagctttcgaagcggaaggataccacagggaggagtagatagcggcctgctgaggaagcaccagggatggtttgaacggcaacagatcaaggcttgaagacacaatgtctgacggcctactcaaagcaaagagaagagctttttagaccggaagagctgcatgttaaacacaacttgccaggcaacacgagagctcatagagaacgacgaacaagtcaaacagccgaacagttcgatcttcaccaacggtcaataatgatgatccatccggcgcccaggcggccgacctaataaagttggatggaccgagttcggattctgaagtcggatcccagcttgctatctttctgggcgaagcaaagtcatatgttgcgaatgagtgatccatcgagcggacgactatcggggtgtcagttgtggatgtgcaactctggcggagaatgatttggaaaaatctctggcgttttcgagtttcccttcgacttctctccacctccacccacagtagtcgacgacgacgacgacgacgacgaacacaatcaacccctcccactttcctatctcaacatgatcaccattctcaagagaaacagggaagaactagaactttctcagaagaaatatttcaaaaagacagctaagggcaaagttcaaaagagtatgttatatggtagtctttcgaattatctcgatcgtattcccgtcgagctgaacagtttctccctttggttctcgcttccacagtcttgaaggaacgatatctgagagacgatatcccttgtggttcaaagttctgcagtgtatgctcctatgaagaagaggctcagccgagtctccctgaacagggtttcacaggctccaaccttatccctagaggccactatgtcattcctgacacgaacgcctttcttcatcaggtttgtctttcaagctcgctctatttaccaagcctgctagttctgcttcgcaaaagcgttgatacaactgccaattcttgaacttgaaaccagatggatctccttacgtcgcccttactggcctcgctgcctataattgtgctgcaaaccgtcttggacgaagttcgtcatcggtccctccctctgttcaaccggctcaagcagctgattgcagacgaagacagctcggtctgggtctactggaacgaagccgcaaagtgagcctttcttctttgacagagaccattgctcacaaagagtcatctaacaatcgatcatgatcaacaaattgatagggatacggctaccgttcgagttggtcttgaaacccctaacgacaagaacgatcgagccattcggtcggccctcaaatggtacaatcatcacctttccccttcatccagcaaatcaagcaagaacacagttcccacgccgtttgtaatcatgatttctgacgatgcggacaacctgaggaagacgaggcaggatggtttaacggcgtatactgtaaggcagtatgtagaagggctgaaagaatcaccggcagcattgttggacctgttggctgtcactggatcaggagtcgcggaggattcaggggagaagagagaaggacgaaaagcgctctatgaagacgtaagttcaatctcgttgataccctctcacttcaaacaatatctccgattcgcttacaaatcgggcgtcccatgaatgtgactagtacatcccctcggcgactttgctctcaggaatcaaatctggcaagctgcacaagggctatttcaatgccaatcagtacaattaccttgaagttagtctcgccttgaatcgtgttgtttagtttgattattgaccaaataaaactcgatacgcaatttattattcatagggttccgtgaatactccttctttcgccaaacctatcttgctcatcggaagacaagatatgaacagatcagtgaacggagacgaggtggtggtcgaggtgttccctgagagtgaatggaaagcgcctggtgagagtgttgttgatcaagacggtgagttcttcccataagtttttctatgtattggtaccataatttgattgacaacttttgaattataaagatgcactaaggaacgatgacgcagatgactccgagggtgaagatcttgtttctgaagaggtggagagacaacgaaaggaccagtcggacgccgctcaagttggaaaggccaacccgctcgagaagcagcccaccggccgggttgttggaatcttcaagcgaaactggagagcgtacgtctcgttttattcgactctcgctctttggctttccaaaggatgttgatctttgaacaaactcgacatataatagttacgtttgtcacctagactctacctcactctcaactcataacccaacgtcgcttgccgcccaaacggtctttgccactcctctctctgcacttcttcctcgaattcgaatcagaacgcgtcaagctccggtgttgctcaaccagaaaatccttgtttcaattgatcggtgggacatctcctcccgatatcccgaaggtcactttgtccgatctctaggcgcggtcgaatccaaagaagctgagcaagagagtctgctgttggagtatgacgtgccttacaggccgttcggaaaggctattctgaactgcttgccgaaagaaggcgagagttgggtcgtcccccctaaggatgacgatccccgaggtgactggcgaggaagagaggatctgagagatatggtgatttgcagcatcgatccccctggttgtcaagatatcgacgacgctcttcatgcccggcctctacccaatggaaacattgaggctggagtacatatcgcggatgtctctcatttcgttcatccgtcaaacccaatggatgaggaggctgcatcgagaggaaccactgtttatttggtagataagcgaatcgatatgttgcccagtctgttgggaacgaacctgtgctcgctccgaccgtttgtcgagcgactagctttcacgtgtatttgggtgagtgcgcttttgcagtatccttcgacgatatcagcataattcatgagtccccccactctttttgaatcgacaggaaatgactccggaagccgagattgtcaacgtccgatttactaagtctgtcatcgcttctaaagcggcgttcacctacgccgacgctcaggcaagaatggatgactcgtccaaaaacgacccaatcactcttgggattagactgttgaaccagctagccatcaaactcagagcggcgagaatgaaagcaggagcattgaacttggcttcgcctgaggtgaagagtaagtattcctatactgctctgcaagcatgcagtataatcattcttccgttcgaagttcacgcccccactcacataaaaaaatcattttttaatttcaaaatctgaatcagtcaatcttcaatctcctgagtcttctgacccaatcgatgtggagcagaaagaattgcttgcgacaaactcgctcgttgaagaattcatgttacttgccaactgcagtgtggccgctaaaatcgaggagacgttcccccagacagctgttcttcgacggcatgggtatgtcaaatttccttctttaccacttccgtagcttgatcgtttcgagcgagaacaatgttgactttttcatgatgatataaaagggctcctcccaagacgaattttgagaacctcgatgatctgctcaacaaaacgaggggtatgcaccttgatgcgtctagttcagccgctcttgctaagtctcttgatcactgcgttgttcgtcccttcttttcttccctcaccgcttctcgtgagtccaaaaagcttacagtttgtctcattgggttgacaggtcgagtcagagccggctttcaacacgcttgtgagaatcttggcaacaagatgcatgctttcggccgagtacatctgttccggcagtttctccaaggattcatacatgcattacgggttggcagcacccatctatacccgttcgctctgttctgttctcataatcttcctctcgaacctgatctctcataaagccttgaacttcccctactgtttgtcgttcagatttcacgtctcccattcgacgatacgccgatgtgctagcccatcgacaactctctgctgccatcggttacacccaactacacgcctcactttcttctcagcaatatgtcgagcgtatcatgcacaacatcaacaagcgacatcggatggcccaacaggcaggcagagccagtgtagagttttacgtgggactcgctttgaaggcaagagggatgagagaaggtaaacctgttgaggtcagagaggaggcattcgtgattagggtgttcaggaacggagtagccgtttacgttcacaagtaagcgtcctcttccttcagctctgatttccttgcttctctggtctcgatcgtccattaaagaacgaatgctgatctctgattttcgttcattgcttgatatctcatcgactgaaggttgggtcttgaaggtctcgtcactttcaagaaggaaacccacacgttcgaatctgaagaatacagcatcacccttcctgcgtcatccaaatctacccagacagtcgacggcgcgcccatcaagaagtctttggtgaagaaggaagacgtgaagcttagagtgttcgataaggtagctgtgaacatcacggtcgagaaagacaagaacacacaaagaggaaaggtccagatgtcattggtctggcctgtggattctaaggatctttgagacgcggattcctttccttcctttttcccactcgttagatggaatggtgatctattgtaaatttatattttaaaaaagaaatatcgatgcgagatttggacgctattccgggcaaaatttagattcatatgggaagcaatcatgatgacttgtttcttatttttctattgtacatcaaattttggattcagtccttgggcggaggccgaggaggaagagacgaggtggatgacgaggcggcataagtagaaggtgtggacgaagcggagatcgttttgatcatctctccacctactttcgtggcctcatcgaatcttggcgcaaagaattctgaagtttcccgtgtttcgagagagaaagaaaggagggaaggaagaagtcagtcataaatagcaaggtgaacacagtgggtttttagaaagcaagggaaagaatgaaagaaaacaagaaaaaacccacctcgggttctttcaaatctccttctataagactcccagcttccaaagtcaacacactgactccaccctcttgccgcgatgacaaactcggtatcatcactcctatgggctgtatcgttcaaagccgagttcaacgcgtcgtccaacctgttctggtctctgaaaaggtactcagctacaccaatccacatccggaagacgggtgtagctgccaagtccagatgttgaaatggcctgatccctaacacatgccagcagtcaaccatggccaggagagatagatgagaattccgaggagatgatccagcggctggttggggacctagggaaaattggtcgaggatcttatcggacaacagaatgggcgctcgttcgagcgtggaggatgccgattcagggaaaacggtttgttttgcggccaagattcttcttcgtagttcaggttcgttcccttcgatcatcaacttgaaaagctcagtcgtagaagtagcatattggtttatctggaggcgagccgacgggtttaggatagccagaccggcatagacatgccatttgttggcgtagattcggagagcgatgttgattttgacgatctcaatcccaccgacgtaacgaccagattcccaagggtaggaagcggccgaatgccaagctgtacccatcctgttttgaagcaagccaatcatagatttccagtgagaaactattataccatatgaaaattatcaaaagagatatggtagaaacgaacgaaaggaaagcggcatgtgtcacagcttgggtgttggcagtgacgagatcgtgctcttcgtacgtcatgtagacgtaagaactcttgaagcaagcaaagatttcctcgactagacggagtttggagtctggagctcggtgttgaatgagaatctagaagaaaaaacgagagtacgaaaaaatagagaggaagaggaggtctgatgggaatcagtagcagcctctagaaaagtataaaccgtactggcaagatgactgaccatcggttgaccttccggactgacggttggtccatggagagaatgcatcgagatgatgtggacatcctgaggcaagtgcttctcgaaagcttctttctcaggtgctttgacggatgtctgaccggagacgattgcgcccagcttggttgctgttttaaataaccaagatgaagtcggtgtattccgtttcggtctgttagcgcagaggacatgcgttgagatacacaaagagtgggcgaacagggtccaaactcggcaacaaccttgtccatgaaggcggcttcaacggagtagagcacaaagtcgcatagtctggagacgagatgaccagaggaaaggatggtgagagaagtatctagtcaggagtgaaatcgtgagagacgaggaagaggattagcgcgagagaggaccgagaacgaaagcgaaagaaatcttacctttgaattcctcagtaaggacttcaaacttctctggcagatcgcatgcatagatactgagagagacgtgtcggttgtgttttcatcgaagacgaagcaaccgttgaagagaatatcagatcctgaatggattcacatgagaaagagaacgacgaaagtaagagtttctggaaagaacataccttgtccagccaccggcgagcaacctcctggcatacatcttccccatatcacccatcccgatgattccaatcttaggctgctgtccgtctgcgtgttcctccatggctagagcgacgatactgtgtatgttcttgatgatggtgggtgagcaggcctctagaacgggctgccgaccgggggggggagcatgactctaaggcgtaaccatcaagtgtgagaccctacgcgtaaccacacgcatataccacggttagtcaccgagcactaacccactcaccttcctctctctgcccatctcatctctctggtcaaccacactcacagacatggcatcttcgacttccgtgctcgatcagtaccactcccagaacccaaacgatacgtctaccgtctatccgggagacccaggtgtcgaagacttctctaccaccgggccgggattcgcaggggacaaagcaaacgactttgccggagcaaccggaggtacagaccagttcagcgagacaccaaactcaaagtcgatcgatcagtttgaaaaggaaaatggaggtggagatcagaaaggttggttcaaattttcttgtcctgcatatgtgtgtgtgtgtgtgctatagtgatgatgtcaaagaaagacgaacagaggtgctgaccatgatgtcatcattaggtgctctcaaaaagatcaaggatgctttgcatataaagtagaaaagcaggaggaggaggaatagacagatggaatgatcaacagacacataaattttgtatgaagagtcagcacgtctcagagttcatcagagagaaagaattacatgctgtgaagagcagtcatgtacagcatctcttggtgtatgtgggtgtgctctcaatgtatcggatgatgtatgagtagtatcgactcgagagtacgatgtccgaactccttccatcgtcctccagacaaccaacgaacagatggatcttagatacacagttgagacgatgacccgagagaaaaaccattctagacagatggacatgcaggtgctaaacgagataaacagattgaatcccatcagaagcgagacaaacacctttctttccaacatccacctcattcctcatccagaacatcagagcatcagcggtcgaaactgatctcattcttctctcttgttgtcatcggctctttcctctgctcatgttctatctttctagagtaccgccccggacgacctataccgtgctctctctcttgctcattcctccgatcgttctctctccgctgattgctttgatctctgcgttttctatcttttgcaagtcctctttctctttcagcccctcttctttccgtagctaagaaagcaggaacgtgagaatagacgctctcagagttctagatggtctgatcaactagctgaccgatcgtcgaatgtgttgatatcttcttgaataccctctagtacctctaatcggattcgcgttcgtaccctcgctggtaggatcgctcacaggtcagttcagcgattggcagtttgttcgtttggttgcactttaaagaacattttattctcctgtatctctctctcacaaggaaacgaacatgttcaactgacgctgattcgatttgataatatacatcgtctcggactatgaattacgtatacagtcctggccttcaccctaccagctttcgggtatctccaatttgcacaatcagatcctcctccgagagagagacttcctttcgtctctctccatcctagtgagtcttgaaattcctctgtattttgttctccctcttgaagtgtagccaagatctcgacgcatggtgtttgacgaaattggttttgttatgcgcgcgcattcacttcctgttcctggagcacagaacgcaatgtgatgttaacgttacaggcatttcgatggggttggtacgtattgagtacggcttggacagtattacgacagtggtgcttgcagcaggttatctctatttggaagaggtcgcaaagagtcatttcgtttgtctttgttccttcttcgttcttatcaacgagggcagacatgtactgacgactaggctttcctcagaacccacatccctttcggaaaaggcgagttcttgactgtgtatcatccaaaagacctggcccaatctgcttcttcgagcgccgaagattccacttcagccatcactaccatcactaccaaccctaacctccgccccatcttgctcctccttcccactccgacatccccatttccttcatctgtctatctccctcttctcgcgcttcaccttcgggcgcacctccccttttcaactttaatcatccatccttctaattctggaaaagattcgtatccgcgcacccgtcttcctcaatctgctcgatcaactagacgtattctcagatggataaacgagaatgccgccacatacggaggtgatatcaccaaagtgtatgtgtgtggacagtcgagcggagcggtcgttgctctctgggctggtggttggagagaacagatcatcaaaggcagagaagattgggtctgggagaaatggaaagagggacagatcgggctggatggagatggcgacggggatgaaggattaggaaatggtttgaagagggtcgatctatgggaggaagaggaaaagatggaagaaggcgacactgatgatgagaaaggggccgtcgtaaaagggatgatactgtcagttctgttcaaccgctttgccaaaccaatcatcccctctccgactcacacacatatcgttgcaataggttatcgcccatgacagatattcctcttcaaataagacacgaagccaacttatatgcagaacatgtctcagctaccagacgattctttggaccatcgcaaacggaatcaatgttggcttcacctgctcacattctttttgcagctagaaatgttttgaacgtgggggaaaccggtctgaacacaaggttcttgatcatccatgggtttgtacatcaccttttcgctgtctgctctactccagtttgtatctacaatactgaaaagatcgcgcactcttcatttacaacttgatccttcttttgggaaaaagaggtaaagatgaatgggtacccgttagacagtcagttcttttacgagagctcctcgtaggtttaggcgtgcaagaagtctctttcagagcatataaagctatgggccatcttgatcctcttctaggtccgtcccctttctgtctatagcgtcgcttgcctatctgaagtcttgcgcgttctcgtctcgaagagacgcggctgaacctccatccgttcttggtcgtcatgccgggtttggaaatcgaaaaaagcgctgatgatcggaatcaagaacgattactcaaccactctacttcgagacagttcgctctcctctttgtgttcctattctcatattgtcaatcacaagtcactgatcgtggatcgtttctctgccttggcttccctagtctcgaactttatcgcacctgacggaatcccgtgactttcctttttctttgattatctgtacactcaacatatcgtatatattccctccttttcgtgagcacgcttagagatcatctatctactgaaagatggccgccgttttttgtttcctctctacatccgataatcatattattcccatctctttgacataccaatagattgatgaaaagtttgaaatcaaggaatgcgaagtgtgaaagtaaacataaaagatagatataaggttgtttaacctgattcctcttcatcatcctcttttccctctcttgcccaataatcctcatcgtcttcctcctcctcttcttgttcttcctcttcttgttcttcttcttcaccttcttcctggtcagtctcatcttcctcttccctgtcatcgtgatcaacagtctgaggcttggttagagattgagttttgctcaaattcgtaaacccgaaacgacccgatgcagcacttgttactggtttgggcggttgaagtccttcaaacgtgttcgagaagctccctgcggtgtctaacaacaccggtggagggccgaacgagaatccagacggactagctaacttcgccgaccctgcatgagctccaagttttggcgcactctgatgcgtgctcatccgacccgtccgtcttctcggttcatattctcgtccgggttgtaatggctgaaaatctgtcgaggcaaaggtgccaatgtcctgacccgatggaagcgctgagaaagaggaagtcaacccaagaccaccaatcggaccggctgtcgtcaccggaggcgtgccgacaggggtggaggacagcccaaaagcgggccgaggaggcttgctgggggtttctaggaacgaggacgacgattgaaaagtcgtgtcgggcgagaacgaagagattgatggggatgcactaggggtctcttttggaagagcttcacttggcacctcatgtgacatcgtcccaacaagagatgtctgggttgtcggggctgcgcggcggggcgaaggtagagcttcaaactttacaggcgatcgtacaacgaaaccatcagggataacactggagtttccaacagatgcaatcggaccccctgttcggtcaggaacggaggtaataataggtcctttgttgatagtcaccagtcgtttcttgagttgcagcgctttgctctcggagttcaaggctcgggcagccatagctcctaccttgggagtcggttgggccaccgtggatcgtagaggtgaagatgttaaagaaatattttcgttcaacggggttgattctcggcggcttcgctccgaagcgttcaaacctttgaaagacgagtttttgttggagccagaaagctgcaggacgtgaagtctaagagagagatcttcaatctcgaacgccttctctcgtacggcagcggtgatgttgcgaatagtacgggagatggagtctagcgtaggtgctctaccagatgagagaagagaagaagaaaatcatgagtaaatatgttccttgtagttatgtctaaagcgagaggcaagaaagaccactcacttcatagaagctctgccatttttttcccggattacttcctttcttaagatgtctagatgattctccagttgtccaatccggtctcgcacagtctgtaagtgggaggagaacatcttacatcagcccatagcattaccatatatacctcagaaattgcatcaattacctgggttgtcttccttagcctctgctgattctctagatgttcgggtcccagctgacgaatccggaccatctatagtatatgtacacattcagcaaccagaaacacaacagagaacactggatgaagcgttaaggcatatgagactcgagaactcactttagcaaaatcaggatcatctcgggcgcgaaggaatcgcgcgacttcctcaagcttggtgtcagctacaagatcaacgagatcgaatcaaagtttcgatcaagttacacgtcagtatcaacatgaagacgagtcaaaagatataggttgagattctttcacctttcaaaaggtagctctgaagttcaccgatcgttcgcttcatctcctcactctcatctttcaaagacgacgtgtctttttccttttctttgataagcttgctgaacgacctgatatctcctaacgtccaggttgtttgagattgaagatcaccagctaccggggtgggtgtaccagcttccctctggaaggtggcgtacgcctccgatgtagctttcatctaggatttaaggcaatatcagattcagaaacactattttaactagatctcaagattctagcttagagcttgacactttcaaattaatcacatacctttgcgaaatcagcttccatactctgatacgctctaataaactctccagcaagcccagtctctcgagacaagttcgtatccgaaaccctaggagtaggcgcagaagaccgctgcgggaatgcaggcttaacgatgtccgtctttggtgtagtcgatccattgttaaaggcgttaggcgaaagagtctttgaagtttccgatgctgtcaataaggataccgaggacggcttgggggcttcaatccctctgaaactgagtgtggacccggaaccgaatggtgattcagaagtgcttgatggttttgaggtttcgaatccagcaaacgcgttggaagaagtggaggtagcaggagcggccggtgctttaatcaattcagagccggtgaagggaacaagcgcgccaggtttcgaggaggcagcgctatttgacttgggtactccagattccgcgaacgcattcgaagcagtggtagtcattgaagaagatttagcaccggatccagcaaacatgttcgtagaagttaaaggagcaagggcaggttcggaggtaggcgttgttgacttgaaagaaccgaatccattgaaagccggttcagatggaggagttgtagtagcagatgatctcggggcgccaaagctagcaaacacattagcaggggaagtagaatcagacagtggctttgaaggcccgaatgctgcagatcctcctgcagaggtctcgggattggatgctccgaaaccagcaaaagagaaggaagactgggaattagcaggtttcgtcgatccaagatcagaagccttgctttgcgctacctcccctgcaggcttcgtaccgaaagaaacccctcccgaaggcgctggagtcgtcgtcgtcgtcgtcgtcgtctccgctgatgatactgggttggaaccaaatcctgcaaatttcttagtaccagctggttcagatgcggggccagagccaccaaacttgagagccgatccaaattgtttcgttgtatccttggtcggaacgggtaactgagactgaccaaaaccagcgaacggggaagcaacaggcttagcagactccgatgaagatgggtcttttgtcgcctccgctaccttctccagttcagcttttgcggttgtcgtgtttggctctgatgaagagaatccgagaggagaactgggcttcgaaggggcagacgccactggcttagttccaaacgaaaacggactagcagatgatccctgctcaaccttcggtttgacaggaacaggaatcatactggccggtcttgtaggactatcgggtggggttgtagtcgatgaatctaaagagattggcgggctagcgagaggagaacttttgattggagccgaagtttggaagcctttacctgatgtaaagatggactttgagccgaatggagagggcttctcgaaggaagaggttgacggtgtggagaccgccactggagcaccagaggcggattgagacttctgttcaaaagaagaagtattctcttgggcaggcaaaggaaacattgaaggaacctgttcggtctcctttatctctacatcaggcttctctgaaggttcgaatgttactgtcgaagatgcttttccctctataggtgatgaggcggatgtttccgacgcagacaacgattccttggctccaacatctgcacctgtcttcccttcttctctatcttcagcaacttcctcaatcttgacaacggttgcagtcacctgatgtgcttcgggagcagggggtgatgcagaggaggtgacaggttcaggatcaattggtgtgatgttcgaaacgggttccaaagattcgggtttaaaaaccttcacaactgattctgttgcttgatctccgtcctctatctcgaccctcacaatatcttgtccttcttcctcctcctgcgctctatgttccgtttcgtcctcctcttcctcttcgcctgtatcctgatcctcggcttcgtcttcgtcttcgtccccgtcctcgtcctcctcgtcctcctcctcttcttcttctcctccgtcgtattcttcttcttcttcgtcttcttcaccgtcttctgcaccgtctccattatcctcaagaatgtcttctttgtcatccttcttgactgtcaaccctccaaacatttctgatgtcctgtccttttcccttcctgagttctgtccacccagtcctccaaacgagaatgcggttgatccgaacaagttgtccgatttgcccgctcgaggagccttcttgacgttcaccacttcttcacttccatcttcgtccgagatctcatccagccgagctcctccgtcgtcgtcatcatcttcttctgcttcgtacttacctcttccgaagctcgacccagctccagatccagttccagctctagcaaatgctcctccaaatgcggatgcaacagggcttgatccgcttgacgccggattcttagagccaaaccctgcgaagccacttgtcgttgtggatgaagacgaaccaaatgcgctgggcatagctgaagtctttccaaactttgattccgtaggttcggacgtgatgggcgtaccaaaggctgatgtttgaggttttccaaagactgacgtcgtcgaagatgacgtggccgaagtcggaggagcagtgttggtggatgcaaagacggaaggcttgtttgcagacgatccaaagcctacgaaaccgacacctgctttggggccggagaaactggcgaatgcactccccgaagaaggcgaagaggatgaggtcgagggaagtgtaggcgacccaaaggcagatgtactagctttagaggtcggaggagttccgaatgtagaagatccaaaggagggaggggcgccaaaggtagatactccaaacgctggcttcgacggttgtccgaatgcggagacgacaggactgggagaggcaggagccgcagtagatgtagcggtagcactgggtgtgggactagattacatgtcatcaaatgaactatgcgtcagtcacttgagatcttctttttaaaagcagtaaaatcttagaaagataaaagaaggaaacaaattatctcacgtcgtagaactagtggtgtttatatttgaaaacgcgctaaatccacccgagaatggactagccggtttcttgtcgtccgctgcagcctccttcttgtcgtcttcgtttggcttgacagcgtttccaaaggaagacggcgttccagctccgaaagtagatgtctgtccggaagttctaccagcggagccaaatgtgaaagatgtagaggattcactcgtcgctgtcgtcgtcaatgaaggagaggcggcggctccaaatccgaatccagaggctctcccacttgatccaccaaacgcaccaaatgcagacgaaggcggggctgtgttggaagtagaagaaggggaagcagccgaagatgatccaaatgtggatggctttccaaaggcagactgctgaccgaatgcggacgaaacaggaggagcagaagcggttgtggatccaaacgcaaagggcgtcgttgatgcaccgaacgcagagggcgttgttgatgaaccaaatggagagggcgttgttccaccgaacgctccgaatccagtaggtttaagatcgttagtttgggtcgacgacccagtcgacgaagtagctccattggagccaaagattgaaggagggtttgatgcggaagaagggttggagccaaaggccggtaccggtggctgcgcgcctgatccgaaggcagaggcttgcccgaaggcggacgtactcaacgtcgaaggcgctccaaatggagatggggaagatgacgagccaaaagcagatgacccaaaggccgagccagatgatactgatttcacaggcgcaggcgaagatcccgagaaggcagaggatccaaaagcagagggagtcgacgatgaaccaagaccaaagccggcaaaggcagaggccgcgccggctgtagcggtacttgtggaaggtggggaagctgtaggtgtacctgccattgagacttcacctgtcaccttgcctatagccttggcggcggcagtagtagctgaagagttcagcattccctcataagaacccatttgttgatctacgttccaaagatcccaactggcgagaacaccatcactagtgaaaaccatcagctttggtgccggttcgagatctttcagctcttctcccccctccattcctcgtttgatttttttgtcggaccgaagatcgagagccattcctagaatggctgtatcttcggctgtgttctccgtcatgggaacacctggcctggtcgcctcgtccagattgaggattttccattctccagtggacgtcccttggatgacgcccaactgaggactaggcgaagtgcccaaaaatccgagccagtttccttttcctccccagccagaaaggaaagcagagtacctcataccgggacggtcgatcatgccataagccggagtcggatctgagaatctagtatacttgacctctggcgaagggaatttgatgcgttgaatgatgaatgtctcgtacgaatgttctggttcttccgctgggttcgccgagggaagattgtacacgacaaggaagacgtcgttctcaagccagttgacggaatgtacgtagtagccttcaccctctgccaatccagccggacgttcgattggcgtccccttttcctgaccgtctggcgagaagaaccggagtctagcttgagcgtcgccaaggacaaactgcttgcctttggcactccagcaggcggccgtgtaagcgccctcgagccgagtagactcctgctgagtatcaatgtcaaccaaggaaagaaattctggcagaaggattagtagcaaggacggaaaggctgaagggttggggagaagtgagttgatgggtgatggtagagagggaaatgtctgagtcggctgaggggaggaagcagactgggagcgaatgtcttgaagagaatacaagagaatctgagagctagcggttccgacgaccaagacagtttcctctttagccagtttgagccactaggttgaaacaggtttggaaccattagcagaggaggctactttatcatcgcgatcgagtgagagattggaaggacttacgatcagcctttgaccgaccgtcacgcttttgaatggtgacgcagctaccgttgtagatttgggtgagctgccgagaagggtctccaggtcagatagcaagtacacattgaagcctaggaagagacagaaataagagtatataccaggcgttggatagacgatcagcattcgatgtctatgataatcttgcactcaaagtgagaaggataggaaaccgaactaaccgttggctcctccggctatagccaaattgtatctactgctcgcttcaaacaagttcaggtgaccaggaagggaagtcagatcgattgatggctgaagccttgcatgagtgtcgacgtttggtttccggagagtgagccacttttcagcgagaacgattgaagacagacgagtagagtttgtcagaatgtacgtgtgcacaggaggatgtacgaggttgggaccgcttacggtgatgtcctcctcctccccttcaacctcggaggtgttagaaccctgcatggagagcaaaagagcgagatcttcctgttttgtgtgaaaggtgcccggtagcaagatgcagcgagttaagtcaggtaacagacgctcgcgagagagaaaaggcaaaagacagaaatcttgaacagacagagtctggcagaggttgttttcttctttctttgagacgaggtttgagtcacttacctcctgtgtgaatctgacgaggtcgagggcgacgacgatgacggtgtcgatggaagtaaggatagagaatgaaagaggaaggaaagttgttgaaagatggaggagatggcgtggggcgtcaggcgtcaggaacgtagtaggccaggaacaggaacagatttaggaacgggaataggtacaggcacaaacaaaatattccgtagtcgacctcgcacttctgtagtctcttgggaacgatcgctacaaaaaagaagactaccgacagactttgcgaaggactatgcagaggactatgcggaggactacaagacgactacaaaaaaaacatgatagatttaaatacgacacatcactacagatagactaacaaacgaattacaaaaactatatagcactgactacaaagaaagcactacgatagaaactcgatacaaaggtcgatcttgccgcttgaaagaagccaatatttctgggtcgatcctgatcaagcagctagtggtcacacagaaagcactcccatagaaagattgttctcttcagatctttacatgtataaccacatgtgccaactggtgataaacagcagtcgttcaggctctatacagaccgtggctcctcggccagttgcgctgaaagattgagaacaaccagacgctcatgtatcattcgccatacatcaaccgatatcgtccatgccctctgcatgatctccaccgtgcggctgcccgtatcctctccgagcaagaccaggatcaactagaacataaggactgttacctaaatgctatagacaatcgatatatgaatatgtacccgcctgaataagggtttcatctaagtatggtaaccacttcctgtaaccatcttacacaacccggggcagctcgctctcactcttttacttcctaccgaggccatctttctttacgatcccactcaagacgtatcccaacaccgacaactctatctcccttcatctcgtcgccaccttggtatcctctatagatcactcctttgacttgttcccctggctttactgtaaggccttagtcaacgtgttcatctaggtacgttcggattaggtcctctttcgtccggttgaagtgccgatttttcttttcttttttttttcctttctctcttttttcttttgcttggacctcctgttctattctttccgtcaatgggatctctatattgggttcaccaggtcagaagagacaagtagtgtccaccggatctggtttattttgtggtggagcagcatggagtagatcgagacagaaagcaaacttctctcggctttccggaataagggggacgagcagtagagctcgaccggtccttactcttgccattcattcgtgtcgtccttcggctctgtctatcttgttttcgtcttgatatcctcattggtttactggccggacattccttcgcttcgtctagtcttacaaagtcagctaacgacacctttgtcttttccatcggggtttttctcgtgatacatctagttcaaacgctcctcctctccctcgtttgaacgtccctctttcacgagccttcgtctacagcacacccccctatggccgtcaagagctcacagtcgacgactcagaccccgacgacaggtcatccttcccacccaacgcttttaccgccggcttcgaacgtgccagctgtatcgagcagcacaaagaagaagaagaagaaggctgcaaagaaagctgctcaagcggctgccgccgcctctactcagcaacctctgcatcccaacgctcatcttcaaatctatccggatggacgtctgtctccgcctggagtcgaccatttggacgagtacagcgacgaagaatacgatcatcaccatcatcacccggaagactacgaggacgaagacgagtttgctccattagatcctcaccatcctgggtcagcaggctttccctatcctccggccactggattcacaaagaccgccaatggagccatcgccgctatgggagctgcatttggaggtatgatgagcggcttggactacccggcaagtggacttagtccatcagctcatgctgatcttgtcaatacggccaccgagctttgtaagtattgatcatccattagtactttccttcgatctctgcctttgtgtttcattcctttatggtgctcttctgatcgtgacatatttcgcttgtgtcttacatacttggatgtgtatgttcggtgaacgtgctgaattctgtgcgaatggatgggtttgtgatgcttgtatgattctttggctggaaaatcactatacaaaacggtttgggacgtctatcgaaaaacatgaacagatcgtcgaatggaagatccttcttttggcgaaaccgaggaatactggacgagcctaccctcccatctccgtaatttcattcgaaatgcccttccgatctccccctcctccactggaacattccccccgttcgctcgcccaaacgcttccccaccgaccaacagtctgtcagtcgctgccaatagcaataacactggtactgttggtggtggttctggtcttcccggtcaaccatccacaacctttgcaggagaatcaaggacaaataccaataatgccatgctcgctatggctcaacaaattgtttctgccgcccatgccaatgctcgcaacaacggatccaaccaagtcgctttcgattcgaccagtttggactttgcgctacagcctcagttggatcacgcgttgatgatggaaggtagagcaagagcaggagtgggaatgggtatcccaaattacgctgtcgaaggcgtcatgatgctcaacgacaggggtccagacgattacgacgatgagtaaatatgttctctacccttttttttctctccttgctcctctgttttctcttctgattctcatcattgctcttgtcacaaactgaacaagtagggtggacgagtttgaggaggacgtgtgcacagatgaggatgacgaagatgagcactacagccaacctccgcagcctaatggtgagaccgtatcgacaaagaagaagaacaagaaaaagaagaaaaaagcaggagcgaatagcaataataatggcgaacttggtcaatcactccccggtccaccaacatcagctctccctccgacacctcaatctgcacctgttccgattcatccttcactcgctcgaggtcaagctcaaggtcgaccgcttcatcttcaacaaccttctactctccctcaatctaattctcctctgcctccaacgtcgttgataaaccctcaaccgaactctcaccctcactctcacccccaacaccctcatccacttgctcaacctcttccgcacccactcccatccgccagggcaaaagggaagaaaccaatggcatactcacccgtatcaacccatcagtcgacaggtttgaacggaactgggtcccctgccttctctacaccattgtcagcaacaaatccaggagcagcagcagtcacagcatctggaaactcgccgatgattgctcccgcaagatctgccaaggcagcgggaaaagcaccgtcgaacggtcctccgtcaaatcagatgcacccacatgtccattcaccaagtacgcatggtcaacaacatcattttcaacctcagtttgattctcatagcgcttactcacatgcttattctatccctataggtcctataggctcgacgggtggttctgctctaaacggatccggtggaaaaggagggtcggccggaaaagcaaattcgataggaggcggacaaggaggcggtcagtccaaatcattaccaccggccaaaatatggaatacgaatacaaacgaagagagggaacgtatcaaggatttctggttggctcttggagaagatgagaggagaggattggtcaaggttgagaaagaggcagttttaaggaagatgaaggagcagcagaaacacagttgtggttgtgcagtttgtggtcgaaaacggtgtgtactttctctcatattccttactgcaagacgcgtgaaaaggagttttcccaagaggagagggtaaattcaacagaaactcatcaactttgcacatattgattgccttcagaacggccatcgaggaagaactcgaagtgctgtacgacgcctactacgatgaactcgagcactatgcaaattatcaacagcagtatgccgcttcaggcggtacgcttcctccacctgctggacctggtcctttccctggctctgtcgagctcgacagagatggcgctttgatcagaccggatcatcttgctcctacatcaaaaccgcatcatcaacaacaacagcaacaacaccatcttcatcaacaacagcagcatcagttacagctacaacagcagcaacagcaacaattgcaacagcatcatcatcaacgtaaacaagaatatgaacatcatcatgatgaggatgacgatgaagaagaagacgaggaggaagatgagtatagtgatgagggagtgaatgatgacgaagaagtccgtcatttctgctttctggtcctctttgcacctccccgtattgacctttctctatcgttttcaccgtactttcactttgcaggacgaagatgatgtggatgaagaaaatgaagacgatggtcgacctcacaaactgaaccgtcaggcttcatcgaatcagaaccaacagatccctctacacgaacaggccgattcaggagactttttccggttcggaggccctttgacaaccgttaaaggttagcgcctatttcttccatcttctctctttcgacatacctgtcgtaaaggcggctcacgctgagcttattcgatctttgtctttgtctctgtcttttcttattcaatttgcataccttcctgccctgccttcctttcacgttcgcctcgatctctcccatatatcactacgaacccctcttcttcgcatggttctcgttcttcatttcatgcccaggaggtatccttaccgtcgcggacgacctgcttaagaacgacggccaaaagttcttggagatgatggaacagcttgctgagagacggttgcagcgagaagaagaggccgctctgagtgtagaggaggacgatagtgatctagatgaagatgatgaggacgaagatgaggatgaagaaggcgatgatgatgaggatgaggacgaggatgaagaggttcgttcttgttcttcatcttcgaaactaaaaacctaaggttttttttccttttttttacaaaactgacgcgtttttcaaatatacaaataataattaaggatgatgacgaggtaagctcaatgttctctcattcccctcattggaatctgaattctaactttttatgcttctccttgtgactctcgtcctacagccactatctgacgaacaaaagatggaagaaggtcgtcggatgttccagatctttgctgctcggatgttcgaacaacgtgttcttcaggcatacagagaaaaggtagcacaggaacgtcagcttcaacttcttcgagaacttgaggatgaagaaggcgctgccaaggcaaaggaggagaagaaggcaatggagaaccagaaaaagaaagagaaacgaaggtttgtgtttctttatcttagtttatttgtcttgaaacctcaaatttatttggactaaacaacatggcgacacttgttctctgagtaaatgtagactccagaagctagcgaaagacgaagaaaaagctcgcaaggaagctgcgttaaaagccgaggctgaggctctcaaagcaaagcaagctgctcatgaacgtgaagtcgccaaacgtcgagaagatgaaagagctcgtcgggaggcggaacgaaaagccaaggctgaagaagctgctagaaaagaggaggagaaaaagaaacgacaggccgaagagagggagagagagtttgagcagcagagaaagaagaaggaaaagtacgatttttttctccttactgtgagatttctcactttatgggctgtacttatctgaattgtgatttctctttctctacagagaggagaaggctcggcttgaacgagaggttcgggagaaagagcgaaaggagaaggaagagaaggaacgagccgaggctgcgaagaaagctgctgaggaacgtgcccgtaaagccagagaggaagaagcccgaaaggaggttcttcgaaaagaaaaggaagaacgggaagccaaggaggaggcagaaaggatgttggcgctgaagaaccaagaggctcaacgagcagcgaatgctgccaaaactgctcagttgaaagcccagaaggcttctgccgcccctaccgccgctgcaactggcattgctacttccaccactttagtgcctcccccctcgtcctcttcgagacagacagctccttcacctcgcaaaggaccttcagccaaaccccctcctgtctctacgactcgacagggatcgacgcctggtcctagccgagcttctcctgcccctcagcaggcttcccagcaactgcctcaacaagtcctctcccctcaactccaaccctcggctcaacagcagcaacagcaatccagtatggctcttcctcccagtatgattccccctccagtgcagttctctcggcagatgactatccatcttcaacagcagcaaacgacctatggcggtgtaccgttctcgcttccgcctcaacagcagcagtctgcccagttgaacggtcgatcgataaacggaagcttctctggagtttatggcattcctggttaccctgggtaccctcagtcgactggatctcccatgcaacaccggccttcaggcgtgactgcttctcggccatccccaccaccgtcgtccatggcatcagggggaggtgcaggatcaggcggagcaggaagtgctggctcggcttcgttgaccggcatgttctcagctcaaactcttctgccatcttcgcttaactctgatcctttcgccatttcacctgatcctatcggcggtcgaagaccgtcggtacctcatactcccataggtgtcggattgggatctcacgaccacgtcgcctcgccaggcccttcgcctggcttgcttcgaggaagtgtatcttcgccgatgcctagcttgcacgacttccgagcgattcaaagaccgacgcccatcagtcgaccaaactttgttaatggagatcctctggattcagtggatgaaagcggtccattacattcggggtcgacgtcgaggcgatcaccctcgcctgaagagggtatctttggttcttccgctttgagtccagatgatgagatcgttcctcgacgaccatcgaacgtagctgctgtatggggtgctcccggttcgtccttgacgtcccctcttgggccttcaccatggggttctgcaggtggtcaacaagctggatctgcaaattcgtttgcttctccttctagcgcctccgcttctccaggaatttggtcgtcctcaataggagctgttcgagcgggaagcgtagggaacggagctggtttgagtggttggggcgcagtccctgctggtggtagcccattcggaaccgtaggtggagctaggcagggaacatcttttgcttatggttcatcttcggctgatataaagggactgaattctgttggagggggaggacctcataatcctttctcgcatccttcttcaatcggagcaggcccaggtattggaccaatgggcagagtcgtcaacggctttcctccttttagtccacctcctcagccttcccgataattgagaacctcttttctttctcgtgatcctcaatctttcgactcttaggtgtcttaaatctttcctcttctgtttttctcgccaactctgttgctcttctttctcaaactctgtctatctaatggggcatcctcttctcaaatatcttcgtacttatcgacagactcattcgttctctctgcccaatctcaattcacctatttgtcctttctctacattcatattttttctttttcccttctgcttaggtctttcctcgtttgctctttctctccttgcatgtctacagaggatctcttgtctttccctcatgatattcattttctttttccaccttttcccaaccaaatctgagtatgtttggacaacgattaagcgaaaacacatcatgtcatatttctagaacttgttagagaaacctcatcctctatcgactctaatagaaggaatttgactaaggcagaaaatgaataaagaaagggagaacgccagatttaggcatcctcatcatcttcccagtcttcagaaggagcgaacccaaggtctttacaagcagaagccatgaaaagtaatctatgagctgaatcgaaaaccgataacgtttttgtaagttggtcaattgcctgagtctcttctctctcgagctagtttttttttccgatgaggagagtaaatcagttgccttgacccattagaaggaagaagggagagataaaactaacagagtaagcagcctctttctcttcctcatcccactcggcgcttctctacaaacatgttcacatcctgatgagtctgtcgttctcttgtttccgagaagtcaatgtgatatcaacgtacctccgctctaagttttcttcgatcagagagatcagtcaattggctctcggcggctttctcgaaagacgctttggcttctgagctgacattctcgactcctgccactcggacgcctgcagtgatcaagaatgattatcgagagatagatcagcaatggagttaagatgtgttcaagttcagtatgccacttacagtccgcgaaggatttgctataagatcattagaaaatataacaaaggaaaaatttgagcgccaagtctcaaagagaaataatatcaccaaactcaagaaccagatgcaacatacaagaaaatctgtgtcgaaccgagcgcgcaaacaagtttttatcaacattgatcaaattcacgtaggtacatgaagctcagaacgagaacgggaaaagaactaacggcgagcataggagcatctgactcggtcgagaggcaagttgtcaatttctcaaacacagtctggaggagttgaggcgtgatcgcattcccgatcttggcggttgacatcaggatcgggatgattctataacagccagccccgcaaatttgtatgagccatgaatcttaacgaggaacacaaccggttgaaagtaagacatacgtagcagcgttctctcggacgctctcctcgaagaagaaagtcaaattctttaacgacagacccatcgtctcctccatgtaaggcacaaaatggacacccattcctgatatttgttatccaaaggaataagcaaaagagtagcaacgaggtccaaggtagagcacgagccgaagaagtgaactcacgagaagcgtaaatgaccagaagctcgaaagcctcggctgtctgttcaattgacgatgtcttgattccgatggactgtgacagggtaaaccaaaccggccaagagcctcttcaatctctatccttcttttcttgtcctttgaaacaatttacacgatcagaagtgacgaaaagtcaagtcaaacgaacctgaccgccgatatcaacaacgtcccagttatcccccatctcttcctggttgtcctcctctagagaagaccgtaccgaatgatcttatcatcagttaagaacggacgtaacttgattgatttgaatcaagatgtagatccaacgaaccattgacaacagacagctccgggctaagcgcagccgacttgagaagactaggcatgacgactggtaggtaaggtgcaaagtcctccttaagcgcctcacaaatctttccccaagctatcaattcaaatcataacatgatgggaaaatacatgagtatcgtatttgattccgaaccaacgtgctcagatcagagggaaggaggttccacttactcataattacgtagctgaacgtatcaaatggatcaatgcaccgaggtcttagcagcaatactttaaacggacatctactgagaggtacaaaaaagacacatacgtctgaagaggatcatcatcgtccgtaacaccagctataccaaggagacagaatatcaaatgcaggtgatcagctcgagttccatattgtctgcgagaccagaatattgaaagactaaccttgaatctgcttcaaggcttctgccaactgcagagcatccggtctgaagatctctggtccaacggcgagacctactcaataaaacatcggcatcaatcactgcactgataagataaacggatcggaacgataggagaccaagggaagctctactaaccgataaggccacagcattcaagcactttgcccttgagcatctttccctggagatcgtcagcttccggtgtgggtgctgtaaggaagttgagtaagataggcatgatgttggtatagtactattcacaaaggaacccaggaaaaaagggatgttcagtccttgatcatgtctgcaaacgagaagaaaccctcaccttagcgaaacccatctcagcggcgttggcaacggtggccaaagtagtgaccgcctgctcctgaactcccttggaaccggtctctagcaagcccaacagacccttgacgatatcatcgaggtacgggctgatgacctctgggtcatcaattccgtcgcagaagttgatgagagcagcagcagcgtgagagtagactttaggaagaggatggtggaaggtggatagaaggattcgaaggatatcaaccgggtggagagcttggagatagccctgagtgtacatcgagtatttatcgtaagttcttttggactttgattgagtgattgtcagcgatgtatcgatatcaacgcacctcgaaatcggtacagagctggccgagacagtgcacaagcgcgaaccggactcggggatgagggtcctcaaccattgggcagatcaactccataattttggacaactgaggctgcattactttagccgttccctctgcaatagaagcgatggacctgtcgaaaaatggcgcgcacattattacacaatcgactacagtatgtttctcaaaaacgactttctcaaattgaacaggcgactcacatcagaccggcgtatcgacctttccactcagctcctttgcacaggccttcgacgagatcccaagttccaggcaagaatgtctttcctcccaagccttctgctaacctatccatgcattcctctccccaaacgctccagcttccctctccttcatcagcatcatcatcttcgtcgtccaactgagtaccccactcggcgtcatcacctaatcgggcaagacactgaatggcgactctagctgcgtcgttagcaaagttggggactcgtctgaacacagccggtttgacctcgacgagagagaggagaagctcgaaagctggctgggccgggtggtccgagggaatctcaagtgctggctcatccgcggtgggctgtggtgggtgagagagttgaaggaggaacggaacaagaacgggaagatgaggggtaaataggctgggatacatcgaggcaatcgggatgagagtctgaatggcatcagtttgttgatcctccggaagcgaatggaggagctgagaaagaaaagatcatccaaaggaaagtatggacggtcagactcgagagtgaggaatgaaggcaaacgttcgaaacttggatgcgcacgttgaagactgcaagcataagatctccggaagcctctctgacactgttcgaagtgttttggaggaatgaagacgtccctctgagagcagcaagccgaacttcaagcgactgagggtcgttcaatgcgttttgaaatacacctaggtgaggtatatacgcacgagcgcaaaaatgggacgcaatatacgaaatcaatcaggtcaaatctcgatgaaatcagatcataatgatagccagaccaacctcgaacggccgctggatcctctttctcaatcaaccctggtgcgtcctcccagatcttcagaacgctttccctgacggccgggttttcatttctgatcaagccgccgagtgtggctccgagagttgcccatggttcgtgatccttctcaagcgagaccctggccaagccggcgatggtatctgacagcctgtttcgagtgctcgtctcaggctcaagaggaagcgaggcaaggagagtctcgtacacctgcgcccgaggttccggtccaatcgattggatcagcggtttagacggcgatgggttagtagggctcgctgccggagctttgagtgagagcgttcgaaggagaagcagagtgagtgatcgaagctgaagaaatgtcggaattggaattgaacagggtcaacagacggtatgaagatacgtgatgataaagagtaggctataggaacagacctcggggttgaaggtctggctagttcccatgtgactgagagcgaggagaacgccggacgcgttagcctccatctgagcattcaaggcggtctccgccctatttgagtaacggacagggatggatgatagaggaaagtcaagtgaatggcgacagagcaaggagagtgtatagacatgataccaaacgacagaagcgatgtcagtcctgactcacaacactccgcataatcaagaaaaccaaggaaagcgagaaggaaaaaaaagaaaggcactatacatgtttcgggtgttgttgtcatccacgaaaagatgttcgaggatctgctgaagagcagaaatctgtgcgtccatgttgttgtctatcctacgagctgatcaagagaaaaggaaccaatcgaagagggagagggagaaagaacaactcgttgcgagcagaagatgagttggaggattgggaggtgacgaaaaaattcgagccgagaagtttgactacaaacgctttgtagtggatactacagatggtgtgtagttcagggggtcaatacactttcattaggatacttgagttcagcttcctagtaagctgtagtagaggtgtgtagtttggggggttcatacaaaacactacaacccttccgtaatgggacactacgacgagttgtagtccagtagtcggccggatactaacagaacttttgtaatagaacactacaaagctttctaatacgacagagtaaagccgtgttctctgccgtttcatcttccttccttcaacagacatcatcatcatcgacgacgacgacgtctcattgaacatctcatagatcatctcttaacaactatggcttcttcaagtgcaaatcctgtaggctcctttaatttcacatgtcgtttgatgttgtgtacacatcttacatgtactcattctccggaaactttcgcttttccctcgacaaatcaactcgcctctcattcccgattgtagatccgtaggaagctaggtgagagatgcttctcttcgagtcatcccaatcacatcttgagtgttgatgactgacaagttctctctttacccttcttcattatgattgtccgtgcattctgatgggactctgacatatgcaacctctctaaaccacagtgatcgtcggtaagacttggcttcactttcaacggttctctccatctgttacttagacagatagtatcctagcagagataatgcatgtggatcatactgacaagcttctgtttctctgtttcttttcgaacctgtttcctcgtattgatcccgctcgtggtctgactataggcgacggagcttgcggaaagacatcatgtgcgtcatatcactcttccttttccggtccatgaaagatatcagttcaggctagaatcttgaagactgatactttctttgccctcttcttttctttcctcattttttcgatactcctcaactctttctctctctcttctcaatcctgctgggtttcgtcttctttgtccgtttaccgtcgcgcaaaatatatctgggttgtgcagtgctttgtgtgttctcgctgggagagtttcccaaagaatatgcgagtcctctttcactcaggcttcgttccttccttcctttgtttctctctgctcctctcctcacgaggggcagataacactaacgcatacgcacacataccatgtagctttagaccgaagtagcttgctaacttgagcgcttcttttttccgtttcattcctgcccattctccattcttcccgataggagccgacaatttttgaaaattatgtggcagagattcaacttgatggaaagcctgttcagctcgcactttgggacacagccggtcaggaagaatatgaggttggtcttgggtactttctgctgtcggcctcttcccctctttcatcttttgcaagccaaaaatagagcgcgcgcgcagaagcaaaaagggggaagatactaaagctgacattgctgtggatgacttgtctgtttcacctatccaaagagactccgtccattgagttactcgaaagcacacgttatccttatcgcctttgccatcgacacacccgatagtctggagaacgtgtctgtcaaagttcgtgtctatctgtgtctttgtccatttcaaatgcgtgagtcggtgactcacgttcatctattatccgttctcttcaaccatccaatgggcatgtcagtggattgaagaagtaagaaatatttgtgggttccatataccggtcctgttggtcggatgcagtatgtccctttattttcctcctcacatgaaccagtcactaaaatcgactcatcgactcggttgaccatccctgcttctttataaacatgacttgcctcctgatgtagagagcgacttgagagacaatgctccagaaccagaacgtagtgacccaaaccgatttgttcagacagctgatgttcgttctctttctctctttgtgttctgtccacttgcctcctttcatttgctgatgtcttattcgcgtctttctcttttgttctttttacttgcttctcgcaggctctccggacgcttcaagcgctatctattcgatcgtaccatgaatgttcctctctcgcaaacataggagtggatgacgtattcgaagcagctaccagggtatccatgctcgtcagagacgatccttccggtcctggggcaggcgcaggcgcaggttcaggatcgggttcggccggaggaacagacaggaggagacatgatgataggagggagaaggatggcggatgttgtgtgatcctctagttcttctcttcacttcctgttccctttcctctcaaggtaagaaggaagaactgataaagggagagggaaagattcgataacctcgatatccttaccttcacctttctcgactcatcagatcactactgtaaccgcttgtgtggcctccacccaaaagaaaggaaacctcctaaaatatgtgcctactatacttcacgcatacattaccacatcacgctcggtacatcacaaatgtcttcttcaatacgttaatcacaccattctattccatctcatcgatcctgttttacgacatacgtgaatccttattcacttttacttttccccttctgtcttgatatatttggtcttaatttttcttccttcgtttcaagatatcttttttttttcatttttattctatatcaatcacctttttgtaccagttgaactcacaacttcttttattcttctacattcttcacatccgccgcagtttccatccattgacaaatttctccctctctcttggtcggtggtttccttcggaattctccgaacacgtaccatccctatgcctcctgttgtttttctcgatgtctactcttcagttttgttttatttttcaaagaaaaagacaacatgatgacactgacgaaaaagagatcagatagatatttgagttcaacatttttttaaaaaaaaatacaaaggatgatattttggaaaaattccatacagtgacaagtcaactcggatgtaagaaaagggaaagaggaagaagaggaagaagaggaagaagagaaagacaaaaggcatctacgacgtaggtctggcaacttcttccccgatgacgactccgtcttctcctttctcgatcccctctccggcctgctcagcttctttaatctcatcagccactgcgtcctcgatgatcgcggcctgctgagcttccttaggaggttccacatccgggttggcctgggtgactgctttcctaaccgaagaaaggacgagctctttcaaactggaagcggtggcgatgacaccgtcgttctctttcaacgttctgccgactccaaagtcaaggtctcgtccccagatgtcaccaacccagccgccggcttctttgaccaacagccaaccgcttgcgtggtcccatactttttccacgtattttttcccgccgctgtacgcggtcggcactctcaggtagacctgtccatctcctctagcgagcgctccgtactttgcctgcgagtccattcggacatgctcacctagcccaacgaggtcggcaattgattcgttgatcgaatgtgaagagtgaccggcctcgacggattcgaggatcttcggctttgactcctcggaggctccagggatgggagcggagagagagatcggctggaacgcttgctccgcggcagaaggtgagggggcgagaggaagggtgagggatcgttggaaggacccgtgggaagcagtggcaaggaagagggatcctttagaagtgggtgatgcgatggacgggtacgggaggtttgggcatccaatcaagcctaggataggcttggactcggagacaagtgttagacacacggcgtactgctctcctcgcaagaaacctgtgaaagggaagaacagaacgatacgaagaagagaaagaaagaaaaggaaaggattagaagcaacttgaaagaaaaggcagcgcagaatcagagtaaaggagagatgccctcgactgaccaagagttccgtcaataggatcacaagtccaccacctgccctgtttaccaccttccgagtttcctcggtcgattgcctcaagcaccttatcctcagagagagcatcgagcttctgaccgacctggtcactctcgagtgctagggcctcgttgacgaggttggtgatgctctctcgcatcgaggcagactgggcagaatccgacctgagagaggtggtgtcttcctcgccgattagtggatcggaaggaaagtgaatggaaagcaggtgggcgagaagagcctgagatgcataatcggcgactagtggataagatcagaagggcgaaaccaaccagagagatgaaattatcgtcagggatcgagaattcaagcgccatcgccatccgatagattttcagcctagccaggtttgattttgtatggaaaccatcttgcgatatgccttcgcatgaatcgttccacaaacgatcaaactcaccagtcactggactcttgtcgaccttggtttcggtgtcgtccttcttgattgcgctctgtaccttatgggtgatatggcaggctctgaggacggcctgaacggcgagctgagcctccttctggagatcgttggacgtaggaacaataacggacatttgagacctggagagagaaatcgtacgagctgtcaggaatggctgtcgaacctgacggacagcaagaggcaggaaggatcgaagcatacgatatagatgggtttgatgagatcgagacagtgaagaagagagaaagaggaaaggctggagaaagaaaaaaatggaattcaagatggagaggttgatcgaggaaatccgaatgaagggaccgtgcgagtgacgccatctcttacgtaagcgagtttggtagggttacgggtgaggggcgtgtgtaggggtgtgacctgcttgttacacagccgtcagctatggcttgagatcgttgcgcttgctcaactcatcatccccttccaacgcatcgacttgccaacatgcagtcgtccagcgcatgtatgttcagtatgttgtacgatctatcctttagcgtattgtatcttctcgccattctgccttcgtgcagtgcgtttgacgtctgaagatcatatataagaccggcttcctttgcgtttcaaagctcaaccccctagcctgaatcctttgttattcttttctcttttttcttgtaccctgttccatatcgccctttactcttccatcttggttggtttcctacctcgattctttgttcacaagcgatccagcaagagttctaaacacccctcttgcccggtcacatcccacacctggttactcccaatgtaaccttcctgagacattctagctttgaatgctgacagaacacacgcccaagcacagcttctgacacgcgcccccacgcacgccaacaagtatgacgcgttcggccggcgaacgttaccactggccgtgtaagaaacacgaagcgctcggttctttctggctggtcgatcgatcttgcccccactggaagttgtgtttccttcctaaacccatccatcatctctttcctctgtcaagtatacatccttgtctgatccctacaacactcttgcttgttcatcctcacacaccttatctcgatcaaatatgcctcatctatcttcttcctcggcatcaaagacggcagaagagcccagtgttgtgcccgctggccaacgttcgtcttcatctcttttgccttctgtgtttccttttctctccttccgtctctctctccttcccttccactcttcttcgacgtcttcccactatcgtggattcatctcaatttgtgtctcactaacaccgagatttacttgaactgatttactttatttctgtttttatttcattcaaacattcgacactctactttcctcttctgacccttcgtagaggctggatggtcatcattcatcaagcagtacgtctctccttcactggctcttcctttgttttcttttcttctcttcttttttgtacctgtcagaatagcctcagccatccattatccggactgaacaaagactgatctaatctcgctctccatccttatcattcattcaaaaccaccatcttgtcagactggccaatgtgtccggagatctctcctcgatgactgcaccgcctttcatcctctcccctgtggttcgttcttcaaacacagtagtcatcctgcttaccctatctctagacacatcctaaccgtcttaactcaactttttctttcagtctctcactgagtttcctgcttactggtgtgagcgacctgatctctttgccgctatcgccgacgggcgaactgctgaagatcgatcaaagctcgtgctcaagtggttcatcgtaagtcgtctttgtctcaccccttatcgttcatcgcaatccacttagcgaactgtcttttcgtcacaacaaatgcttcgtttcgctccgagctctcagtgcacgctcaagggtcagtacatgagtcgaaatgaaaaaatgggatctgaaaagaagtaagtgcatgtttagtgataaacgtgctgttttggacggttttatccctgtacataacatcaaaaacaggtactgaacatatggtctactggaatccttctatttggatgtatgcttgcaggcctctcaacccggtgcttggagagtgagttttttctttgtctctttaaagacctggccgagaaagagttcttacctgtttcaactttaccataaatctaggctgtttttcggatcttggcccaacttgaacaaccgaggtgacactcaccttgctgtcgagcaggtctctcaccatcctcctatcaccgcttagtgagtggactctgccttctctgagttgcgacacttcctgttgataccattcaaaccgattccacgcacttcttcagctacattgagaacccccagaagggtgtcagcttggtcggtgcatccggccagaagaccagcttttcgttcccctcgatcgtcgttaagcagaacggacatgccactttgagcgtcaagttgcccgatggtcaggtcgaaaagtacttgattgggctccgttagtcttcattcttcattcgtgctcaccgggttggtattgattagatctctcatccgccttgttgtgtatgtctctcacttatcgcaaaaacctgccagccaagctccgaatcgatggtctgatcaccggatcgccatacattgaaatcactgactcatcctttatccagtcatcatccggatactcgtcccttgtacgttctcttttgactcagtttgatgtcatcttctcctgtttgaccgatgaactcattgagttgctatcagattcactattctggaaagggctacatcactggaaaggctcacacgttcaaggctacgatgtcggaccctaaaggtcatgtccttctgaccgccgagggacagtgggacagtgagctctttcctcatctttcagtcttgctgtttggctcgatcctaagacttttcgatggttgacatcaccccctttgactaccagaaacctccaagctcgcgaagagctccgaagtgttcaccgacgccacggttcccaaggaggaggtctctgttgttgatctcacttatcagggagagtacgagagccgaaagttgtggtctgaggtggctgatggaattcgaacgggtgactttgatcgagccagtcgggccaagactcaaatcgaggtttctcaacgagaactccgaaagactgagcaggctcagggaacagagtgggcgttgagatacttcaaacatacggcttctgatcctgactgtgagtttgtgctctcgtcttgttgggcgactgggcagtggtagaatgcggacgccgagaatcacaactaatcctctgaactgtctttgtttctcattccatcagactctcacctcgctacgctcggaaaggtccagcctagtacggaggagggttgggaattcactggccctttgcctacggccaccggaaagactctctagagtttagaaacctctctttctctctttcgtgtgtgtgtgtgtgtgtacgttctaagctactagtagatttcgatcctctagaaatgggttaaattcgctctctctgctggaaaatttgtgtgctcctgcgctcgtctttcggaacaatacaccatactctcttgactatctacctttactctacctgtgtctactgtctttttcgctctacctattgatcggccgttggatgttgaagctctgtacaacaagtaaatgatgattctcttcaaatcccccatagttttcgatgacgtcagtccataggagccccgggggaagctccttccggcgtttcgaatccccctgactgcgggattcgatttctgggccgattggcgatccggccggcggttcgaaagatttgcttaatcttttttttttcttcttttgctgctccttcgctattctggcatttgtttcagccacaacagaaccgcacgaacggcgagggatcagcgacgtctaggctctaggttcgcgctcaagccagtgcttgagccaggaaggaaggcgagagagcgatgctgttccacatgaactccggctggaatagcgaggtcggggaggaaaacgaggtgggagctggatggatgacgatcgtctaacctcgctcggagcgttttttgaagatagtttttttttcttctcttttttcaatcatataggatgtctgtgcaatcattcttcccaaccactcatcccaaccacccactcacccactccgactcttggtttctcttctttccctctcttctttccctttctctctgtccttttttcttttggtctggatcggtacgtcgctaagttggaatgacgaatagcacaacacatatcggtggtagtagtagtagtagtagtagcagcattagtagaggtagtactcgtccaacagagacgaacaatccatccgccactgacatcgacgataatgataacaacaaagacagcgatggcaacaacaacaacaatgctcggaccaatgacgagaacaactcccatgatcaaaacctcaacgacggcaatgaggaacaagaagaaggaggcagtagaccgagcttaatgaaattcaatatgcattctatacttcagtctcacaattctttacgccgattgccgatacgacgacgaacaaactctaccgctcggtccagagaggaccgaggagccgagggcgatatagatggtgagcatggtagtgcggatgatacgtattccgaaggctacagcgaggaggatgatgataatgatggtggagcagaagcgagaggacgagaaacgaatgcctctttgagttcattggtcagatcactccatgaggagtccggtggagactacttatccgacgatctcgttcgatccgaccgacccgataggaagagatcgaaaaaggcaacaaagaagaggcagagtttgaggaggaatcagagctcgacaaggtctgtcactgtcattccagaagaaatgatgctccctccgagtgacaaggtggaggataacggattaccggtcgttcaagaacgaccgtcctttgctgacaaccgacaagaacagcgccgttccagcgcctcatcagctcgactcgaaactccggctgcttcgagacaggcctcggtcagatcaaacgtgtcaaacacttatcgtccgtctcccccttctgcttctgcctcttcatcaaatcatccccgccgtagcctccacgacagacgtccagaatctgaaaacgacgaacccatcaccaccgctcctccaccgactcatgccgacaccggtcgttcgtggtttcaaacatcttcccatgccaaacattatccccatcataaacatccccatctcgaccgacagaagcttcaacaatccttaccgacaaccatccaagatatcgcccatcatacttttggaacaaccgtccgtcagcccgaagatgaacatttacccaaactccaacaagatctcaaccagccattcatcccttcatcaagctctcaccaccatccaagtcctcttggccgactatggatgaagatcacctctttcgacgcttcagccacctcgggtcatcttccaggtgggaacgctgctagtaaatctccgctcgcggccacgtccggaacggacaacggagcgatgcacagtatagccgctctgatagccacaacaggaaatctcgtaggtatctctagtccaacggtagctaccatcggtccggcgtggtcctacgaggacggagcggagaccgtgcctgggacgggtgggaaacgaagagttgccaggtatggaaggagggaagcggtggcggacgaagcgatgagagcgaatgtgcaggacgatcaaaatcaggtggacgaaagaaggagacgaagaacggaacgagagagaagaaggcaggctcatcatgcacaggaggaaggaaagaagaacccggttgttccactcaagaaaatcgaccctcagtcaagccgaagaaggtctcaggaaagaacctccgagacaaaggacgagaagaattctggaggtcctaccacgagcagagcgcaagatccggagaagaagagccaggctggagattcgaatgataacaaaaagctggacgacctagcagataaaggcactcataacctgctccacaccgaaggggccggtgttcaagcctaccctgccgagtacaatatcggagatgaagatactgtggttccttcaggagatatctcttccgtctcggaaaactcaaactcggatgacaatcgaggagtcaccatcaatagagatgagagagaccttgaaaagggagcgaggaggaggaatacgaagaagaaaaaggggaactacgcaggttggattggaagtaaacgtggagagcgtcttcagcaagagatctttatgtgcgtcttctgttgtgcttctttctgtgctttccgtctcttgatgggaatgtgttgtctagatactgatcctttacttgtcgattagtacggacaaccggagtacagaaacccaatgtagagatttcctcgtcagactagcaaacgccatgatgatctgtaagttatcctcacactacccctctatcgtctcgcatgatctcatcacctttctcttattggtcccatttttcacctacagatggcgctcctagccatcgacttgaaggccatctcgaatcaaccgcaagagtcctcgaaatcgacgcccacttcttctatctgccttcgaacctgatcatgtctttctccaaaccggactcgggctcagataccgctttcttgagagcagccggagctctggacacggagaaactcaagcaagtgcacgcagtcgttagtcccactccctttctattcttctttgttcttccctcctcttttttgacgatcaggggtaaagatgaatccgagcgcatgctgaatatgtctttttggggggcggtcgaacatagtctagaaaagtcttgcatgatgtcatttctgcggcggagggttcgagacaacttaaacagatcactgcctcccgtccacttcatacgacttggatgaggatcttcatcactggggttcgctctctctgttctgtgggagatagactaatacgcggcataggtggctgactttcttatcttgattctttgctcggttatctttttttttttgggaactatagatgtgctcgttctttgcttgctctgctgtttttagcgggtctcttgtgcgtctgttctttctgttcttttaatagactatggttcttgacatacgcttactctaaatcttatctggataacatggtgataggtcgacatgttcgcttccttcatcctaggcagcctcatgggaacatgtcagcttactctagcaagctcgaaccctttgtttttgaattgtttcgaggtgggtccttcattcgcttccttcacatgtggttctagatacatcgttgatagacgttagattctgccttttttttcgcgatgaccaatacaggttgccatggctttcatattgagcttcttcgcaaaagcactctcgtcgacaggatacttctgttataacagcataacatcagcttcgatcgtcatgatcttgccaggtacacatctcttcgtcgtctctgtttttgccatcaagttgtttactgtgctgatgttcgaaattcggttctgggttctattcaggttatgtaatcctcacaggctgtttagaaattgctgtgagtgaatccgcatctctttttgtcttattttagacaagtctgacatgtacgttgaggtgtgttcctcatttagtcccggcttattgttgctggttccattcgcctggtatacggctgtgtattgagtttgttcttgggagtgggaatctcactgggatcgaagttatggaatggtacaactttccgctttccctctcctcttctgtatattcctaactcatctgatttatctatctgctctcgacagtctttcttccttcgcctacggacggcgactcttcgatttcgatcgacggttcattcttttcctcgaacacatctatctccagcccgttcaccaacggcacgttcacgttcacgaactccacctcatcggctagttctggcacagtcacctgttctcgagcagacgatgcaccctggtatttgcagtctattcacccatactattgtaagtcatttttcttgctcttcgacctcctctccctttggatgtttgacctttcccggctgatcggatatgagcgtctgttttctttgtttcggttctggtgtatagtattcatccttcttccatgttttgcgttctccctcgagttgtggacgaaggcgaagatcaggaccagagaggtaagtgtcttgttgcgcgcgctttttctcggcgctttccattgcataaatcttacctcgaactatttgattttatatatatatata

SEQ ID NO: 1119 - DNA, 11426 bp, Xanthophyllomyces dendrorhous
atatatatctctgttctatagactttggtttcatttgtgcttggtgtgtattcgtccactttttcgtgtttttactttataacgatcacgctgttgaaccgccccacatcttgatacatgtttcgtatagcctgcgcttcgttcgccgcttactatttcgctaagcaagggatctcaagtcttcccgaagcatcttcggctattggaggtgccatcgtcggtctaggaggcatcctgtggagtagactcgccagaggaacggcttatacaactcagtcggtcgctatcttgttgctggttcctaatggtctagcagcggctggtgtgagtttgatctatctgtgttgttccgaaagtatgatctctcgtatcgcaaaataaaagaggtctgatcatttttggtcgttcgtttatgaatctagggtttggcgatgtcgagtgtgagtgacggaacaactagtttcgagttgggaactcaggttgcgttgaggcagatagagacctctatcggagcgactatgggactcttccttggttcgttcctttgatctcggtcatttattaaatcattttctcctacttctcctagctgatgattgactttgatttgggattgttccgatttagcttcgctcgtgtcttacgccggcagtagacgaaagcgaggaaacttcttcacctattagcaaaatactacctttttttcttcgtctgcccttttctttctgtattacctcttgtggtgataacttgttacaaccttcacaatcggtttcctgatgatctatcacccttccagagatattcctctttcatctatatatcttgtctcatacctaggattctaacctacttactctcatcctactttcgtcttgccattcttgttgttcatctctttcctctttctaattctaagccacccccgaattagactatacacgaacgatagataccagatttctcctcttagactttatacacatgacttttgtattaccaagctctgacagttatgaaccattcatgtgttgcgctcgactctattggatctaatgtccaaagcagcgaaccaagggactaagataaaacgattaccaccattcaagacgtaaagatagctaggtataatgtgtgaacaagaagatgagatcagatgaagaggacgggtattatatatttgagcaggtctcgtcaccggcagaagactgatgtgagaggttctagataaagatagacactattgaacagaatcgatgagaataatgaatagacagatgatgaaagcaaacgagcggaagatgtttgagagagtacagccagatgcaagagcctttcgccttgaacttatttcgtcttccgcttgatatctccaacatcgagtgtctttgattgaagatctcggatctcttcttcagtcaagattttcttcccgccgagcttcctataaggcatcacatcacgcaaaaacatgttaagaagatcacaacacctaaccaggatgagaaaaagaaatgaggcaagatactaaccgttttttcttctttataggctcaatgtattcgggagatcctggtaatctatccaacgaggtgatacaaacgtaggcaacagttaaggtcatcatgtttaggaagcttcttatcgtaggataagcaaatcagctagactcactctgatggcaggccaagatgctgctgctgctgctttggactaggcaactgaacgtcatccgcagatagtaccgtctcttcccctccctcttcctccccttcatcttcagagaaaataattttcttcgatcgtttaaggggacttgagcgcacagcagggctggttgaagaagcgcgcgggtttccacgagttgatttgagaggagtcgtatctggtgatgaaattgctggaacatcggcttcggcgaacgaagagtcatactcctcttcttcctcttcttcctcttcttcctcctctagctcagaaagatcgctctcttcggatggctgactggtggttttggaatcatcaagcttgatagatgcgagtgaaatctagaacaaatctgatatcagtttccatatacacgtttcctctgatatggatacgcacgtacttcgcctacatctgccgatctgtttttcgaatcaacctcatcatcatcatcatcgttgtcatcatccagagtcccaaaattcggtgcagaagggatcttcttgcctagtataatccctccggagagggcaggtgtaggcgagtcagggtcagatagagcatcctcaaggaaactcgaaccatcgtgagcctatgatatgaagaagactagttagggtgcagaacttcgtggcgtgagacaaagagttacaagtatgaagcgctgaccattgagtcttctagttcagagtcttcagactcttggtcgtcttctgtctccggggtagcaaatcgttgaactcgaggtttcatcactgatcgctgaacgatatcaatctgcttgttcttgagaatctcgttgttcgtggtctgtttgatcgagatcagcgcccacattcataccaaccagaggaacaagacggcgccaggtgaacacttacaccctgcattaatcgttgggcaaacattcgctccatatccgatattcgcttctgcatatccttagcaagctcgtcccgcgtttctgtctcaatcgaggcgcatcggagctccagctcaaacacctgtttcaccgccagacacgcatagaaatgcccagataggatcaaagacagaatcatctagacaagagagacaaagacttaccttgacacggaggtccttgatgacatcgaaaagatgctccaccaacgcatctggttcgtcttcatcatcggtctcttcctcctgctcctcgtcttcctcctctatctgttcttcctcgatcattgcaatcggctcaatgagctcttcctctgcgagacatccaagccatccgacaaatcagcatctgtccacacgcgaggctacgaggctcaccgctatcggctaaaagaggaccagctagccacagcctgtctatagacataccttctgcaacatccatcaagccctgctcgacttctttctcctccggtggtatctctgtgatcaactcctccaccgcctcctcttcggttttgaccctcactctttcgctcgatttttctctttctctctccttctccttttctctcatctctgccactctagctgcgcccattgggccagagataggtactgccaatacccgtccggaaacagtagacggtttctgtgtttgtcccacactagatatccgtgttgtcgatgatctcactgaccctcgtccagtcgattcggctgtgtttgaagatgaaagcgtcgaagaaagtgttggttgagtgaagcttgggatggccggtctcaatcggttcggggctggactggacaacgaagaagatgggaatccgtcaagtttcttcaaggtgaaacgatgaccggccgagtgggtgatcgttcctacgtcccgggcgacggcagaaaacttcatgacgttgatgttttcttcgaatccagtgtcgaaaggattgacgtggatcatcatgacctggataaagtcaatgaagacaactaatcagtatctctgcacgatcgagagagaagagcagaagtcggttgccaggtggacggagaagacaaaccgctcgaccgtctccagcaaagtagttctgaaacatctcagtcaactttgaatgtctaaaaggaaccattgccggtttccgacccgaagcaatcctttgttggttagaatgcaagacctccatacattgtcccaagacctatataatcaacggcatggtctatatcagcttgtattcaatcctttgttggtgatgaaagcattctgatgaacaagaacaaagatgcgcgataagaaaaggaagacttaccatgagagacttgttgatgtttccagcctctttcagccggtcacctgagaagaacaaatttcgcaaaaccatcgtatcagactctgctcgaatgatttgcccttgctggacggcaaaggacagaaaacgaataggtacctacccgtattccctgtgtttttagttcgttcactaccggcaagatcgacaatcgataatcgagcggtctgcatactgctcgtatcctatatggttgcaaaaagcgaatacattttgaacagcccgatctcagatccgaatgagtggcttggatgatatgaggtgataaaaaggacatactaggggcgcgccgttgtggattcgaatcagcttgatggtgaacacgccgtgtgatcgggaagaaacagagttggctagggtgccaaacacctgtcggttaatctgtccttgggtgatgatctcttgggcttcctgatggtcaagattctcccggtcagagatgttagcattcattgaatagagccagcttgccaaaggattaaaagcagcggctgagagaaagacaacgaagccgtacctctcgacttcggactctgatctctcgcatccccgatacgtactttcctcccccttcggagtcgctctttagacccagcgccttccgttttactccggctaggtacatcgagctgtgagattcggcaattcctggatgtgttcgtggaatggttgatgtgctgggttgagggtcttctagaagatcgtatatctgtacgactcggtcgatgtacgtcagagcgctcggtagaagctcagtctaaccgatttcaccagagcagcttgaatgaagtggaaagacagaccttttcgttatagatctcacagtaggagatgaatacggcatatgtgaagtttctgtcgatctttaatgctacagatcatctgacgtgagtctcggatacacaaaaggaaagcaagtgatgaagagtttcgaggccacctacttgtatcatcaccctcctctgcgttcgaacccgctcgatcatcctttaataaatcttctacttggccttcttccagttctaccccacctagcatactcggtctgagcttggtcttgctctgcgcgccatctatagagttgaacacaacgtctaatgtgcgtgggacgacacctctggccgagggagtgccttgaatagtatatctatgtcgagattgattaacggacgaggacatcagcatccgtacatgtaccatgtttctactgttgacttccctcggaatgaccaagatctacgaacgatttgccagaattagtcactccgtatgcgaacaccaagccattctctccgttcagtaaattctagaatggttcacacataaaccgatagtataggcaggatgagcaaactagaattctgaccaaggctctgataaggagactcacctgaaccagaggcagcgcagtcgctttaaagtactcttgttggccaacctcgggttggaagacccgggtgaacgtatacgcctgagcgggcttaggcatgatatgcatcctggagagatcctgtgaatgaagaaaggaaagaaggagagtattttaagaattgggtattggtttttttgttctttctctttaatcaaagaagaatgaagaattttgacgagtggatacaaacttgaggagcagtcatgatgacctcgttatcactcgttgtcgacagatagggaactgcggtatcgatcgctccatctggagcaggtcggatcctcagaaatgactgtttaatggatggacgtcaagcgcattcagtgactctgtcatctccaggaggcagatgaggttggaaacacaccttgatcttctcgagatctccatccttcagagaggccgtgccagcactggatgaatgaactccaagcctactaagagcgggcgccatctttcggactgacgcattggctgcggtgagaaacttggaagccatagaaggtttcgaaggagtagacgacatagtgaaggtggaggatgaggatacctggcgaggtaggtggccgaacgagggctggagcaagagattgcagcaaggtgagttgagagacgagccagggcacgcatgcacatgatacacagaccgaaagcacccgggtgcttacctctacttttttctctgaaccaacggtcgtcgcctgcctgctaccccaaggagctctgcctctgatcgatgctgtcggcgtaggaggaggtttcccggccgacgaaggaacgaccgatgccttcctagaggaagcaccaccggcggtagcagttgttttcatggtcgaaccggacggtgcggcagttgtcctcgaaccggccaagggcggttgctgtctaagcctggacgaggacctagtctggacgggtgtctgtcctgtgggtgccatctgtgtgtgagtgtgtgtgtctgtgtgtgaacaagcgacgaggaagaagaaagacggtatggatgatgggagtcccaagggaagaagaagaacgcgtgaaatcaaacgcgtccggggggaaacaaaataaaataaaataaaaatcctcattaaactcggccgtcaccttccatcgtcgtcttgatcgtccatccccatcgtgttgctctccatcatccactcgcttgcttagacacacacaagatggccaccaagcaggcgcagaaacaggcgatctctcttaaggggtcaacgaagattgtcaccgagttctttgattattccgtcgtttgttccccccggtttccttcgcagttcatctctcggtctgcctcggtttacactgacgcacatcgatcttagaataacattctctatcagcgagggatatatccatcagatgactttaagatggttaaaaagtcagtggtcccttgatctatagggtccctattcttgttcactcacaccatggctctcaggtatggactccctatgttgatgacgacggacgacaatgtcaaagcgtatctcgcttcgataacagaacaagttcatggtcagccgggtgttctttctttctttctttcttcctttcttcctctctctcttacgcaactcctcttgctgacaaagaagtcttgttctgaatttgctgtcctcttgataaacatcagcctggctgatgtctggtcagatcactagactcgttctggccatcatatctaaagacacccgggagactctggaacggtggcagttcgatgtcaagatggatgcctcctcgaccgaaccgaaccctagcgattcattcatgttggtctttcccgtctggttttcgctttcgtcttcgttttcttttccccttgtgaccgcgtcctcgtagctaaacatatgctgatgttgatgatatcatttctctcgtctggctcgtgtcgaacagaccagccggttcaggacagggatcgaaaccgaaaacggagaaacaggtccaggcagagatcagagagatcatgaaacaaatcacctcctccgtcacgttcttgcccatgctggacgagccctgtatgtcgccgtcgctccgtctgctcctccactttctctctttatgtgtgtgtgtgtgtgtgggcttatgatggactaacgtcctgtcccacacccatgcgtgcgtatccaaaaggcacattcaacattctagcatacacttctctcgacacggacggttccaccccgctaccgacacccgagaaatgggtcgagtcggacgcacacctaatcgacgctgcaaaggtcgaacaagtcagactgaggagtttctcgacaaacgttcacaagttggaagctatggttgcctataagctggattgatcacaaagcttcatctatctttcctcgtctgttctcgtttgctcgatgttataccctcccaattctctctgtcgggatctcggaatgtgtcattgggaaagacttccccattggttctcgagttttcttttcttttcttgcggtaaaaggaaaaggaaacaatccattagggaaattcaagagaaagaataataggaagaaaattgccaacagactactgaattgactaactaagagctacctagctaacgaaaagagagaaagaagagaactatacacatgcgcgcatgatgcacacacacacatatacgggagaagaggagtatacagtcgacaacggcccgaaggccacagagagagagagagatgaactggaagaactaccgaatgaagaaagagggagaaaaacagaacacgaaagatagagggggggaaagaaggagatggtataagaagtttcaactcttgacgaaacttcgacagtgaggaagaaacctgccgaggacagagatagaggagcagagaaaagaaagagaagggagaaacaggtccggcaccggggctacccgcacgtacacgagacgaaaagaagagaagaccaaaagaaggatcaacgtctaatcactagcctcctcgtcgctgtcctcctcgtcgtcatcttcctcctcggaagcaggctcaggggccttggcggccttcttcggggcggcaactgccttcttggaggcggacttctttgatgaacccgctttggctccaccgccgttcgactcgtactcggccttggcggattcgtatcgagccttgtcagcctcggccttcttgacgtacggctgaggaaggaaaggttggaacacagtcgcgctgtcagaagacttgcataggtttcaaggagaacataaaggcagaagagaagggtgtaccgaccttcttgtcctcctcagagagggtcttccactgagcacccaaaatctttccgagctcacctagagcgatagaaaaacatgtagacaagatcagaaacaatcgtctttgagatggaagagaaggaaaagatgactcaccaaaggtggcttcggggttagcagccttgatggcctctcggttggactgggagaagatcatgtatgacgaaagtcctctgtagggagggagagacaaaggacaaagaatgcaaaaagtccgatcagccgacgtgagcttcatgtgcgtcaacagaggtatatgggatgtgtttaaagatgaacactaaccgcttgggtgcgtccttgtccttcttggctcgagccttcttctccttgggctcaggcgcggacttggcggctgatgagaaagaaacggaaacggtaaaggaaaaggaaaaggaaaaggaaaaggaagacgggttgaggacatgggtatatgcgcgagaaacagggatagaaaacagacgaacccttgggcttggactctttggcgatcttctctttgacgtctttgggcatctggagggttgggtggtggggagagggagaaggagaggacgaaaggagagaaggaagggaagaagaaaaacggtggttgagaaaagcagaaagaaagagtcagtcaacaatatctcggatcgtgtttgttgagcgagacgcgaaagagaaggaaggacgcgtttccctgggaaccagacatgctaaaaggaagaaagaaggaaaggagaagagaagaaagaaaaagaaatcgtcggacagacgcaaagatgacggccggtcatccaacatggaaattcggacgacacgacgcgtcgaaagagatgacagggaaaaaaagaaagacgcgtcgagaaggaaagaccgaagggtcggacgaatcgcgtggaaaaaaagaggcaggaaaagcatgtgtgtgactgaacggaagggatcccaggtcttttctctctctcttctccctcccagaaggaaaagaaacgagaaggacacgtatgaaccacagaaacgccgctcgacgcgtcggagggacacagcctaagagaagacagcacgaaccgaccatcaaaccggctcgagagatgggacgacggacgaggcaggttttttctattctttttttatttcaagacagaacgatgaagagaaagagaagaaagaaaaagaagcaagagaaagaacagacgagagtgacgaatggatggatggttggacggatgaaaggatggatggatggtactcactatgaaacgcgtgtgtgtatgtggtgagcgtaggtgtgcggtgtgtgtatgtgggtgtgagtgtgtggggtgtgtgtgatgggtagtcttttagaagcaggggggaaaagggaagaaaaagacaaggcgaagaaaagcctggctggcttatttgcccttgtctgagggaatttgcctagggaaaagagcaaatccggtcacgcccgttccgccggttacctaagcgatcgtgtgggaggcgcgtgtggcgcgtgtcaagggcgcgtcactcaacatccacgcgcccaacacactctctatctgtccatctatctatctatccagctatctagctatcttctttccctcctctttctttgttctgatcttcttcttcttctatttttcctttcctcttcttttcttttcctctttccctaggcctttcccctcctctccttctaccccataaatacaaaccacagttctactccatccaaccgccaccgccttcctcgtcatccgtcaagtcctcttctaccatccccggtcgatatcccggcttgcggtcccacgtctttccgtcagagtccggtaacgtcctcaacggaagtgcaagcacataccacgggctgaacccccatttcgtcacgtcagctgagataccttgcacgcgcgcgcacacacacacacacacgcaaggaagaaggataccacaaagtgtgatctgtactcactactctccctcaccaacccggaaaaatcgttcgagattccttctcggtccaaggtcatacttgttttcccatctgacccctcgctctctggcccgattggcatagtacgcgttatcgtgcccttccaccgtggtttcgccatgaacgatctgaaggacatgccagccagccatcacgccaacggccaacccaagcgctaaagccaaagcccagaccaaggtgaatgcgatccgaggcgacacgtacggccactgtaaagggtgtgttcgatgggaaaggcgggagaaagggaaaggaaatcgaatcggtcagtctacgatcagaaacatacacacctgagatcccattctcaattcacgcaccggaaaggaaaggttcatcgacggaaggaatagatgccagcccgtgatggtgaacatggccgagcccaacacgaggtaaaccctttttttttcgaaaggtgtcacgacaagagctttctatgtaagtctccaaattaatcacagcatacgctcagagtagaacgcacatgaacaagataaaatgggtctcatttcgcaagccaatacattggttgacccctgagtgaacggagaaagagaggataccatgtcaatcagatgtcagtttagttgattgccaatccaaagtcatacacaactcacatgggcacttgggtgatacaaaccaaaccaaaccaaaccaaaccaaaccaaaccaaaccaaagcccacacacacacacacacaca

SEQ ID NO: 1120 - DNA, 33517 bp, Xanthophyllomyces dendrorhous
cacacacacacacacacacacacacacatatatgtaacggatcaaacatggttcaagctactgcaaacaagacgagaaggcaagaagaagcgtacgtgatggtcgaactttagaatacaagttttgcatatcgagcagtggtgtgtccgcttggagatcgatttgattacgaaagaccgctggtcagtctcttctgtttcctatcttgtttcgcttcatttatcgagcaggcttacctctggcttggctcctccacactttcggcattttcggaaccttggtgtaggctctcgtgagcggtctgctccggtaggaactcggacctcgccttctgtctggccatctccttcttctctcagacatgcctcgacctgttcggcctcgtctgtcggttggcttgcggatctaatcgttcctgtaggcctggtcctatctaccttccgagtagcccagggccatttcccggctcgttcggtccctctccacagtccatcctgaggtgttccaggcggaacagtacagattagatagtagtgaccgtacatgttgatcgctatcagaccggagagaacggaggaaacgtagtagattgctggatggacggatgaatgtatcgatggtagaacaacctcgactatttatttatttttggcccaaaagtaagtaaagatgtttcgggaaagatatagaggagaggagaggagaggagaggaagaaaagaagattcggtcgtcaagaactcagatgagtgtctatgtacggtaagaattcgaagaaggagaaggagaaaaagtagtctgatggaaagttccaaagtaaacagataagggctcacagaacatgaaacctccagaccccatcataaggatggcaagagcgatgaagacagggccggccgctccagtcagccagtttgcgaacctaaggaagagaagcaagcgtacacgacggacagtcagcacatcacccactctgatatcgagtaaaaccagatcacacagaccactcgagacatttaaagcatctgaacactcgaggtgcacatccagcgcatggtctagccataagtcgattggtacgagagagaatgaatgtatatggccaacacagcaagcgagctagcctactgatctcttccttggccaagatccagaagactggataggttaattgattgaacgggagagtgcaagacattaaccctaacaaggggtgagtacctgaactaaccagcgtgctgccaagacacgtgatatatggctgtacgaaaaagtccgagaacctgaaagaacatccgagaacgtcggaggatgccgatgcggatgccgcgcacggacattgggaaacacgagcggagcgaccgaggggcgaccagggggggggacggaggagtgtgtgaggaggagtaggactgaggagtgtgtgtgcgaacggggcctggtgtgtaagccccagggacggctcaggcgcttcccaggcactttcaggggcacccaggcacggagatatgaaatcaacgatcgacccaactgataaggaaatttgcaaatcgccctgatctcgttcctgactgcgcagtttttctttcccgtcccttttttcccatattttatgtttgccctgccatcttttttcctcttcctccctttttctctttctccaccatcttcatccttcccatcccatctcatctatctcccatctcaccttctcctccacatcttccatcaaccatgtccaacatcgcccgagagcccgagttcgagcaggtgagatcgtcgtcttgatatgccctttctcggatgatttggtttccagaaaggagttggaatccatacacgccaaggggttttttcaaaagaaaagagagaaggaaaaccctacaacagatgctgataggctttttttcttgtgtatcttcttccatctatataggcccttaacgagcttacctccaccctcgctcctgtaagtctcccttgcatttctcctctcaacacgcccgtcttgtcccgacactgatcaatcacaattctcccttcccagttcctcgcccagaaccccgagtacaagaaggccctcgaggttgtccaggtaagatcgcgcgccgtcatgtatcggtccgctgtcgagggtgcaagggactcatccggctgaatcctccgtacagatccctgagcgaatcatccagttccgagtcctctgggaggatgacgagggaaacgttcacgccaaccgaggtttccgagttcaggtaaagtcgcatctctttgctccttatcagtacggagaattgaaatctcatcaaacatacaaatcctattttctgcccatctcattcagttcaactccgctttgggaccttacaagggaggtctccgacttcacccttccgttaacctttccatcctcaagttgtaagtcctttgcatcatgctgtgccactcctcaactctttatccagaaagcgatcgtcttatctaacgttttcctttcgtctcgcttctctcgtagcttggggttcgagcagatcttcaagaacgctcttaccggtctcatgatgggaggaggaaagggaggatctgacttcgatcccaagggacgatccgactctgagatccgacgattctgccagagcttcatggccgagctttctcgacacatcggacccttgaccgatgttcccgctggagatatcggagttggaggacgagaggttggtttccttttcggagcctacaagaagcaccgaaacgagttctccggtatccttaccggtaagggactcgacttcggaggatcccacatccgacccgaggccaccggttacggtcttgtctactacgtcagctggatgatcaagcacgctgagggatcctctgccggctggactggtaagaaggttcttatctctggatctggaaacgtcgcccagtacgccgccctcaaggtcatcgagctcggaggtgttgtcctcaccctttccgactccaagggagcccttctctccacctccgccgagggtttcacccctgatgacatcgccgccatcggtgctctcaagctcaagcacaagaccctcaaggacttccttgattcttccaacggaaagttcacctaccacgccggtgcccgaccctggaccttggtcgagaaggccgatgtcgccttgcccagtgcgacccagaacgaggtttccgaggaggaggccaaggctttgctcaaggccggtgtcaagtacattgccgagggatccaacatgggttgcacccaggaggctatcgacgtcttcgaggccagccgagccgccgccaaggtcgcttctgaagcctgttggttgggacctgccaaggccgccaacgctggtggtgtcgccgtgtctggattggagatgtcccagaactctgcccgaatccagtggacccgggaggaggtcgatgagaagttgtcgaccatcatggagaactgctacaacgactgcttcaacaccgccaggaagtacgccgaggacaaggacgctcttcttccgtctcttgtcgctggtgccaacactgccggtttcatcaaggttgccgacgccatgaaggcccagggtgactggtggtaaattaccccgcctctctcacattcttccccctccccttccgcccttctctgccttctttgatcatctcaatcctactgtaatctttttcctttaaaattcgagatttgtatccccatcgctcgtgtggtttgccctgctatcttttcctctccccccttatattcagtgctctccctcttggcctcttttgtttctcatatgtcttgggttctccttcctctgctggcttatcttatatcgtctacgacatgatgatcttctttcgccattttctttcccccttgaacaacggctcttgcgcgagcttgcccacatgcaaatgcaaacatatatcatttgatcatgatcataaacataaagagaaacacgatacagcaagcaggggcatgggcatacacaacaagcgttatcaaccagaaagaaacaagtatatcctatccgcgctcttcaaatagtcacattctccgtgaagaatttctcccattcggccttcccgaaggaggaagaaacagagttgtcgatcagaccatcaaacaacgccgtcggctagatattttaaggttacagagttcacaaagatagataagcaatcagaccgagtacaaaggaaaaaaaggagataggacaggtaaaacggagaaaggagaaaacgaactgtgacgtggattccgttttgtctaccgattttgactgttcgagtccaagcaagaaaaggggggagagacggatgccagattcagtacttgaaacaaacaggacataattcgtgaccttattcttggaagaaagacgatcttgatatggtaggattccagcacagaggaagattgagccagaggaaagtaagaacaaactgttatatttcagatcatcagtcacgctgactcctccgttaggagtcgtcttgggggtgatcagctcgagtatctgggacttctgagacgggttcgacaagactttgccagcgactttttaccatcggttcatatgccatagaccagaagaagaagaaaaagaagaagaagaagaagaagaagaagaagaacatcaacaccatagatgatgaggttgcgagagaaacaaaaagagggaaggaagaagacgaacgatcctgaagtttctctctgatctggacaacagtcaatccgctactcggtatatcaaagaacgccgtttggttctcgaacaaaaacgtcgtgtactcccaaaacttcgtcggctcaactttaccaaacgccagagctgactcatgcaagtacgtagatgaaccatgcctataggttgtgcgcgggttagtatctgatcaagtgcgatgaagaggagggaagaacgaaccagggttgaggttgaagtcttatgatcagttgaactttcgattcatacttccctccttggttgatcactaagtatagcctcgcccaatcaaatccagtcggtagatcgatgagcctttcatatcgtctgatcgttgcatcgagaatggagaatagagatagaaattgaactagacgtacagggcaaaacgttctcatctagggatttgacgatctttgccgagaacggacagagataatcaatccagacctcaagcgtatgaggagatgatggcgagccgattcggaggaaagaaagggaaggtttaagagacatgttggagcgttatcgatactgttgcttgacggaaaggatgatggttattataagagattgaaaaaaactaagagaaggtgagtatataatcaaaatgatgacagaacgcgcaacgcaaacgtcatctgataagacaagctgagaaaccctcggggatatcattcttgacaaagaacacacgataggacagaggtggttcatcaagaattcttctctcgcagagaagattggaaaagacatacaagaagcgaaacacagatataggaagggaataccatgaggaagagtcaaaggatgactacgggcataggcgagcaaggaaaaagaacaggagagcgaattcaagattatgtacaggactacagcgcagagcggaaaagcatggggttgttgggcgaggccatctagtgagagcttcctggatatcgagatgtgtagagcgtcgaggctaatggcgaagtaaagaggagagaaagaggaagaaagagaagataatggttggatctgagtgcacacagtgtacaatcattctattagataaaagatgaaaaaaaaggggaaatatacatggttattggacaggttaaacagttttgggctgaaggttaagggtaaagtcagatgtagcgatgatagcgctgtttgtatccttaggaatctccgggtctcgagcgatcgcactaagttcgacaacatcatcagttcaaactgtcacagtatttctataaaacaagaggaaaagaaagaagaaaaaaaaaactgacagatctcggatccgatcaatcaaacgcaatctgtttctccaactggtagtattctcgaatccctggatgaccattttgtagttcttgcagatcatatccgccatctgcgcgagcaaccgaatgaacgaaggcaacgccgtagccgagacgatcttgaactgaccgactgggccaaactctgggagaccttcgacccgttgtatggtcaccttaaagaagttgtgctcatctgggttgtcgtgcgttctggatgttccagccgagtgaggagagatgacgatattgcaaaactggaaatccgttttgagagtatcaaacgcatagtcctggccggaatcattgaataccactcggacatggtcgtttccgatcggagccgacttgttcaggtacggtcggtcgccctcgttcaatggcaagtttggcatcaacgtcgctacatggaaggcgaggatcgcaaggtcatcccaccaggcgtaagtgtatgttccgtggatagcttcatccgaggtatccaaccctgttggaatatccttctgatctcggagcttgacaactcggccgagccgatggaggaacctagtgtagttctcggaaccatcaacattactcagtatctcctcttgtttcgtttgaccagcgccaacgtagaggacggcgacctgttgaatatccaccggtggattgtttacatccatatttttaattgttcggagagacccagcgtccgtaacgagtcgagcagaattcgacatgtttgtgggctcaagagggtaaacacagaattgggaagctacaaagctagggtccacccagacttctttccttctctgcgaaggcaccactcctgaccacacgaagtccggatcagccgatttcgggttcgaaggcgccactggtgtagtaagtacagcttgagagatctcttcacggcatgcggtctaaaccataagtaaggaagaagtttgaatatggttagcagcacatcgagagcaatgacgagagcagcaagagaatatggtctcacggtctcttcgccctgatcatcactctccgaccttgggttttggtcaccaaccaatacagccgccaacgatactagatctgctccatcgttccctagtccgatgaacggcacattctccaacttggccactatagaagtcgatcctgaaggacggatcgtgtcaatcttgcaccatcctgacaacttgtcagtcgtgaccttaatgatcgatgtcccaattacccaactcttctcatcgtaatgacttgggtccttatccaaatcaggcaggacaagatcgcccaagaacgacggggccggcttaggatcggcattggcgtacgcataacgatgaaggaaatctacgcagacctcagaccgtttgtccgtgtcttggggcgatcgtttcgcctgcatgagcttttttgtaatgaatggaatgaaccggggtcgctgtgatgccggaaggaagaggaaccaagagtaaatgatcaaatatgccagctgcagcatgtgctgagacaaaaccgctgccgtccgttgagcggctgtcgcatccgcccctggaggcacagtaaccgactcgtgatgggtggtgatgatgttcagaataacagcaaacacaagctcgtactgctgaggcgtaaagtttgagtataactttggtttgtagctcacacaatagagaaactcgagaatgtggatactgagggatacattcgacgttagagcagacaaggtggagagaatgcttgggagctcctttgccaggggaaggacaagctcatcgattgccatggtgagcgcgtggatgcaagcttttccggtcgattcagtcgacccagtggcagataccccggtatggaacgcccggatcaaggctgaatgctgctgagagccaaactgtcgatgataactaataagaacatcgagagactgataggctactgcccgtaggtccgccttcctaacgccaatcggtaggtttttgctgattggcagactcccaccaggacctaaccatccacaaagaccatcgagaagcctgccgagctgctcctttgctctaggaccacagaaaaagtgttggttcgatagctgtgccgggaagtaacaaagcaggtaggacaccaactcccactctcgttcatcattcaggatctctatcaataccttcaaatattctgaaacgggcaaccagattcccctagggattaaagattgattccctgtaccgaccacgaatgctcgttgtggatcgaatgtgttgagcccgaagcttccaattgacatgttggacaactcgaacgccaatgattccccaaagaaccaaagtggattttggataatatctctggatgatcccatttctggcaatctagaccgactcctacttgcattgcccggtcggctacgatctcgatctcgcgtagggttccttccgcgttccattcggtcgttcgatgaggacgactcggcctgagccgcatatctcccacctcgacctcgacgggcttcagctggatctggagcaggcgttttgtcgctcatttgaggatttcttcctagaagcgaggcagtatgactagcatcaatgttactcgtcacgagaagtctgtgacgagtgtccgctcgaagatgaagtaaccattgaagaagaagcaaccgagcccttggacaactcgcatgcatgtttggtcgtgaaaagtcggaatttcgacgagcgggcgaacccgttcgggaggccgaagatatggatgagcccatatgaggtctgagaagatcgagtatgctttcaaatagagtgatagatctgatcgatctgatcgttttgtccgccaagggtactcgttgaaccgcggcgatctgaggacggaaagtgattttgataaagatagtaaccagcgcaagacatgcattaaatgattttgaagctggaggaggcgtaggtggggtctgggcaagcgggctgtgcgtaaacttcgtaggctgtgggatatctgaggcagacaccggagtagacgatccggagggcgaagaggccggcaaaagagagaatgaagggagactcgacatatcggcgattgagccttcaggcgagagcagaggagaaatcatccctatggcatcgtagagacgagatggaggcggaaacgctcccaccgcccgattgtttctgacgatcggataaagagtaagaagagagaaaaaaaccgtgatatcaaatcaacatacttcaatcctacgaaaaaaaataactataggactcacaaggaagagaacgaagaggatgcggaagccaggcaggcaatcccaacaatcagctgtctgatcctttcaaacaataattttggtaaatccgaagaaacgtccaccgtcagacctccttccgctgttccggcaagaggagagccctctacagcctggacgtcttcatcaccgaacgacccatcatcctggtctaatgtctctacaacagccccatcgatcaagacctcccaagcagccttttcaacatcctcgtccttttctttctccaacgtgacttccaacaatggaagaacgactcgttccaagaatgcctgtctatcttcagcaacatccttgattctactataaacttgttggaagagtaactttgccatatcttttctcgcttctgggtagtcgcgaccggaagaaggctgagcaatgaaaaccacgtgtgaaagccgatcgaggttatcgagccagcctatacaagtgggtatacacagatcttccgtccgataatgttcaatcaacaatatcgtcgctggctgagagatatttgcaggaagatcaagtaagagcaaggcgagtcctcgaggtagacgaagcgaaggtacggccgatgtcgctcgaccgtgattgacataggtgaccaatcgtcgagggagaattctgcataatcgtccgaataggttcaatatatccggacagtcgagacttttcgacgcatcgtggagttccatctctcgaacaactgtgaatcttttcccgtctggatacctgacgaacgaagagaattgttttcccagaaaccccagagggagacaattactgtgagcactctgacataacctgactattcgaactagacatcaagaagatgaacgccatacctaaatctttcaacccatcctttagcgtgtcccaaaagcttgacaaccagatcaccctcccctagatcccggtccatccctttatcagccgctgactctagcacatcatccaacacgagtaagacttccagatcaatcggcatccatcgctctctctcctcatccgacgcgttcttgcatcggttcagggccatgccggagatgagcctggttgaaaaagtggatagatcgaacgtagaaaggaacgatgaagataaagtgacgatcggggcggacgcatagagagaggaggcagattcaggcatgtcggatgggccggtcgggttcgactgagcttttcggtaagagtaagcttcactaagcgcacttcggatgcatctatatgattgataaccaagaaaggaggtttcttagcgagcatgcaaaacacttgaacacataaacataacgagaagagcagagagacactcacttaacagctcctctgaccacaccaatctcccagtcatccggttcatcccaggtttccactttttttccaactatcaccgaaccagccagcacttgctccagtacggtaccaaacctacccgagaaacctttcccaaagagctctctgagagctttccaagcctccttctcgctctccccaccgagggtcatcattgcaaacatgatcctactcgccggaagaagaatttcgtctgatagcatgtgtggcagcttttttgtcagtgtggagagcaaccggagtagtgtccgagccaatggatggaccggcgaggtagacagaccaccctgatgggcagtcgaagctgtcgacgagggcgcatatgttcctgggccaccaccaccagcgccgcctgtgtttgacgcggaagaagagatcgcagaggagagcgcagcagccgaagtgagtgatggaagaggaagactggccgccgggggagaaaacgcggtggtcagcccggtttgagcgggagtaacattcgaggtcgaccgaccgggtccgccgctgttgttggtgtagcttttggcaaacgagttagaggttgacgttgtcgaaggcgctttcccccctccgctgcccccgccagagactgaaggcgacctagagtgtcttgtttgggtggtctgctgttgttgcttggacggagagcttgatcgagggtgattgctgttcgcggatgtcgacgacggcatggcttctctgtaggtcgccgagttcgagaatccggctctgcctctaggtggaaacaaattgatcggactggacgatgttgtttttggactgctcccgtaaccgtgataagacgagctcgagcctgtctcatccttttcctcacctgtggagagcgcgacggtacgttcgtattcggatgcccgccgtcgttttggtcggccggcaacagcggagccagagagaccgggtcgaagaccagcggtgacatccaagccttgccaggccaaccgaccgaatagcgccatcaatatttgaagggaattcggtgtgagaagagagccttttttatgaatgatgaaagagagaagatcgagggtatctagcaggacgctctcgagtgatggtggttctgtctcgttttgtcgggcaagccgtgtggattgagaagaattggcctacaaatgcgtattaaatggtcgcagaggtcagtacgccttttgataaaagagagaaaatcctgcatgcagaatgaatggaaaaagacacatactttgactgaatccttcatcacaaccggcatgttcttcgaagctgaaccagattggatcaagcccaaagtggcaaacgttgtatattcacctggtgatgaaccgacagcgacgctcatactccaagcgaccgccaactcttctgcccacgctttaaggccactgacgatctcgctccagtcccaaccatccctagcgagaaattccctctctgtcggtttcggttcatcaagtccatctggttgcttgccggttgcggcatgggtttttcctccgagcagcagggcgcgcatacaggccaccttgagttgaatctcttccacgctaaatgagagaccagccgggtctaaaatacccgactgacctatcgctttcgatttgaccgggcgacaaagaatgatacggagaaaggcagcgagtacgagcggggatagatatgatggcggggactttgagaggagggcgtacagaaggttgaaaccggcgagtctaagagcgagcggatgagaaccgtcacaaaaggtgttgatgaccttgagcaggttatcgatcacgatgtttgacggcatgttcgcagagggtagagaagataaggcgacggccgggctgtctgccgagatgaacaacggaaagagatcggtgatgacatttgcgtcgaggatccggtccgtcaacgcctttgcctgtaattccatcgacctgccgtcttcgatctgaacagtcacaccaggtgcatccttgtcatcgttggttggaagggcgcaaccggagccaaaaattcgttcggaacctaaccaaaggctctggaggatatcctgagcggtctttccttcaaacagttcgccacggttggcggacgcgatgtcgtcggcagaaagaaacgtgcgttttggccgatggacagtctggagctttgaccttgagggtgagtttgcagccgtagccggagtcgacgatgcaggagagggagtggtaggggggatctggatgggaatcgatcgatgttgtctgacggatgatgtcctagagactgtcgagccagaggccgaggcaggaatcgaatggtccggaggtcttctggaaggcgaggtattgctctttctgaataaagaaaaaaagccggctggatgaaagaaaagcggggaaagaaacacgaaagagagataagcgaacgtcttcctcctttgggcactacatgctcaagctagagggacagagagcaagagcaagaaagaacgaagagaacagactcttggtgacagtagcaggctcagagtgttcgacaggtctcgtcgagctggagccagtaccgagggaggcagcggcagcagaggcagctgcagatccagagatcaagccaggtgtagcagtcgtagacttgtcggtcacaatgtttccagaactggaggaggctggaagcggatgatgatgggctcccccggaagatgtcgaggaagacccaaccctgtctcgatgggtcggcgagggcggtgggggcatagcttgtgggtagatgaacagaggcagatcccaggaagctgcttgtaagacgaaacagaaggtgaaaagagccagatgggacgatggcctctgactagaatcgatgtgtacgagccgagacgaacgaagacggcgacgacaatgccgggctgatgatggatggcgggtgaggaatatttaggaacaggattgccgatgagatgccctgattaggatttttctgtagttcccattagaagatctgattggaaattgtaatgattgcctgttcgatttccaacatagatcatgtctattcccatcagaccaggtttgtagtgcccagcaactttgtacagatacgatggctcttctacacgtacatatgggtcgatatcatctgctatgaggagagaacagggtgtgcaagtacgagttgtgtgtatagcaagtgtgaccgctgctttctatgggttgagccgtagccagagattctgcctgtcgatatgtataccgcttgcgcgttgtatgacgattcgacaacaacgagagtttgaacaccatacactctaagttcttgccatcaccgctagtcagtcagcagaagaagatcacttggatagaacagagaacgaagagatcgatagagaggaaaacaccatccagacagactttgcactcgttcatgttcaggcctgatacgtcaaccaggcaaggctgaattcgtcatccattcgtcgagcaattctcctttggacaaaccatcgtatacaaacatcgacaacatgcaacatacacccacacatccatgatcatacccgatccactgccggccgtatggccaacagctgtcaggtacattcttccctgggctcttatcctcgtccttaccaggctgtctcagcaagcaaacactcggccagtcaggctcgtcgtcggtgcgctcaccctcgcgtccgctaggtgttggctcgggggtgtccagttcaaggatccgttctggtactggttcaatcatttgctttccctcggcttggcagcagtgagcctctgcagcttgttctcgacattctatctcttgtctggctcatttgtttcctttgatctggtcatagatcctgttggttgtcccacggctctgtctactctcggatccatacctgccaagtagaaagatggatcacccggttctatgcttcctctttcacccacttggccaagactttcagccgatccctccgttctttcagcctgcccgaccaaaaccgacgagatcgggcaaaccatttaccaacagggaacacctcttccgctctctcagagggtttgcccttatggcgctcatcctcggttacgtccgctcgtatgtgccaactctatggacgacggatgagtcggttcgattctcaattttcgagaaactatctcgaccgagtccgttgctaccggccggaacaccagcctgggtcgaaggttggctgggtgggattgccctgggtggtttcgtcatctgcttcctagacgcaggttatcacacctatgcattcatgcgaggcgcacaaggagagcccggttggggacggatcactcgatccgcttgggctgctaccagcatccattctttctggacgactcactggcatccactcttgtctacgttcacccagttttataccgcccttctcatcccctctcgtttgccttcttccataaagaacgtggcgagatcgttgattgcgtttgccatcaccgcgctcacacatgatccttcgattcttccgtccgctacggtgaacccccatccgtcgatccttggtggaggggtcacaaagttcatgcttcttcaatcactaggactcggcctggaatatatgttcagagcaatcacaggaaaacgagtcggcggatttcttggttggatatgggcgatgggcttcttgggttggacagccagatgggcggtacagggttttgtggattatggtctggtcagaggtatggctcttttgggtcagaaatggtcaggctatctttcttgagctcgattttctttgttttctatcctctttcttctttttctgtttctgtatctctccgtattctgaggttgagttcgcgtttagattgaccacatgtgtagacgtaaggctgaggtttcaaatccatctgtagcgtttttcgtctttcaatcctctctcaactatcttctgcataacgttccgtcgagtttcttatcagaagggcaggttcccttcagttgatcagacgggtacatcaccacctgtatgaacgatgcacgccacatgttgcaaggcttgattaaatgaaagagaagaacaaagaccttcttttccatatgacccatgtataccgatcgattagcttaatgattaaagagggtggtatcagaacaggtagagaaagacgaagagcaaaagaaagacagaaaatacaacagcgatttgacgtccacagtagtcctttcgcacgagtggcaattaacgaaaagagaacaacacgaagaggtgaaaaagtaggaggcggattactgatgaatgtgagcaacgaaaagaacactgtgcgataacgaaaagagaacaagctagccttaatatgagacaaaagaaagaaagaaagaaagaagaaaaagaagaagagaaataagttaattagatccagaagaagccaagaacccccgaaccaaggaggagaacggtccatcggtccagtccagtgatggttctaacaccgaacgaagtcccactggtggacttggatgaagcctgagcgaccactccactcgtcgtcgtcgctgttgtggtagtagtcggtgcgtagtagctctggaagggaattccggtataggacgacacatcactactcgcaccgcttgtcgacttcgttctcgtagcagtagtggttgaagaggcggaagaaacagcagtagcaccggcggcagcggtggtcaatgccgtcgtcaacgagcacgtattctcggccgttttccagagagcctcaatctgagtgatctgagtagtaccaaagtagccttcttcattgagttccacacatgattcacaggtctgaccgtcgttgatgatcgcttgtgtacacgcgcaagtatcggttgtgcaggcctttacaagaaagggaaagagatacacagtgaagaaaatatcagacgaaagagcgataaaaaacggccagttccagagataagcgagcttacagcgacgtctgatcggatggctgcgcagtcggatacacaagctgatgtaccaacgctagcgagccaggtgttaatcgcggtgagtccggttgcgccagcagcagtggtcgccgccgctcgggcagaggtcgaggaagaaaccacggcggacgacttttttttcaagttagaacaagtgtaagtcgacagagtttcataattgaccagaacatgttattaggaaagaatgggacccacagatgatcgcacagatgacgcagacgatgatgaagagaccgaagccgaagacgaagatgtggcagcagtagcagtggtcaacgtaggaacagtggtcaggtatccttcggacacacacgtgtttgcataagctggatcagatgagcagacgagaacgagagagcaggcggatgttagcgcgattagaagagaggtggctagggacaatgattgcatggacgtaccgttgaaccctgcgaggatggtcgctcgggctgatccggcagtgatctcacagttcatgcaagtcaccgtcaccgccgaggccgcacacgcacattcatcctctgtacagctctgtagtgaagccattcatcacagttagtgagaaagaagaagaaaaaggttcaggtttaagcataaccgatggaaaagaaaaagaatggtatgagaaaaacaagaaggaaacgataggcagagtaaagagagacgaatatatcagacggacgttagattgtgcgaccatcgaagcacataaggtcgtgcaaccggtggtcacataagacaccggaccatcgatcaaatcggtcaaggctgcggtagtggtcgtttgtctcttgctgaggaagtgcgagttatcaacggacggatgggctatagccgtttggaaagctgagagcgtgaggacaaggagggctaagaagtcgaaagaggccatgcgtcagtctgatatctgcatgagttctcaaaaccacacatgcaaacactcacctggaagcattgctgttaggacacaacaggtctggcacacaagagaaaaatcgataggatggttgagcgagaccggtgaggatggatagagagaaagaaggatgggaaagagaacgaagagcgataaacccaaacaaccttacgtaaaccgaatcacgtgatttatcgcgcgagaagtgataaaggcgcacccacgctcacgatttattgttctcttacctcaaacactcagctttcacaggcgggtcagtccagttgtcgatagggattttacattgtatctctctctatgggtgtggtttgatctatagaagcataaaggtacatatacatgcatcgcatcgcgtcgtgtcacacctcaatactacataaggagaatccaaaagctactcatcctctggttcttcctgatgaattgtcggtagattcacagcttaccagagtatgaccaaatcaatgatgaaccttacgatgatacctacaccgagaggatctgtcgcatggaatttaccgaatatagaatggaaaattgtcggcgtccataagactaggagtagaaagaggaccagagagaagaaccagatcaataacgatcgagaccggagtagtgatgcagatgaaaataagaagaacaaagagcaacatacgagcggtgccgataacttgagtccaagaaaaagccggaatcgaccctgcgaaagtttttgacctccaattcagcagtatctgcgacaacatggccatcatcgatagtgatgtcctgagagaagctccatattccggcaacctaagccttcttgaccaagtcaagattgtcttcaaagaagagtgagatacacgagaggagtagaatttatcgggggctcggaggtatgttgggctgatgagatggggaagttcaggtaagtgtgttaggatgatcgttaggatgagaacaaactgaattggaagatcggatcagtgacatcccttccatgtaccacccttgacgttaagccgatggtcatgtagaaagaggcaaggggacataccaagcctctctgcgtccacgtgaatttttgatctgatctcctgcttgtcctctccgagtgtgttcttccaaatattgcaagtcccacagggatcaggccactccagccgttccatatgaagccgatgccccaccaaagacaggtccaccgccaaatagaaacaacgttgatcacctgaactgcgcccgctaaccatgcagagttgttacggtcatagcgatgtatccaataagagagtgcttcgtacagactgctgaagattagatagagaatggtcggtggaagactgagccccgtgctcgaggatcgggaaaggagataatatatttgaagtatggacccgagaggatatcggatcaagccgccgatgacaaagaagacggagcgaaggacaggtcgtttggtgtatgtgtggctatttccaaagatagcatctgggagtcaaaagacagacgaacgatatgttaacagacggccgatcaggaaatgtggaagatcagacagccgagaacgatttgtcaggaaaagatgatttactcaagaaatccattgtttccaacgtattgaattcgctataggcactaatatcgtatgggtcatatattccattgccaaaaatccgttcacggctattttcattaaccgtatcgacagtcattatctctggaattgatagcagatcaaaggtgatgtgccagggaaagataaatggatctgcttaaatgttcgaggagcagagaaaggagaagattcgatgagcgcgcaggagatagggagagcaaacccttctgtctcggcttttggtccctgcttaccagattcggtgttagaagactcgttgatacgaggcaggatgacccagtcctcagaccccgctgcatggtcgcctatgagaagtatatacctccagagaaggagacaaaagcgtttagggtgaaagatcgccgtaatagtatcggccagagggttgtcttggaaagaagaaaaataccgagaagattacatacgtagtgtcatatagggtccatagaaagaaatgtcatcgggcacagtaacccaatctccttcggtataatcatcgggaaggaccatatcaaagtactgggtgatctgagaccggtaatgacctatatcactgaaaggagcgcggatgagctcgacccatgggtttagaaaatcccatgtgattgttaacttgataagggaaccgtagcccaaatcgacaagaggtttccgaaccggagacggtaagcgcccacataacctgcgccttgatttcctatgtaacaaactacaacgagagatggccaacctgctcaatccccacatcatgccgctttctattatacctttcataatcatactttggtgtctctttaaccgtagagagccagctcctggacttgatcttgatgttcacatcccgtttgaaagataaccaccttcttggatctggagcatctttgctctcttcggtttgattaagctgacgttcgtcttcgtagacccatcttggcgtaccccagctggcccattcatcgatgacaggccgtaaggcaaactctttgacagctccagaatcataaaatgcgttgagcgattgcgaagcgttctccagacgtgaaccaccatgggtatagttgaaaagaggatctgtaggacgagcgagctgtcgaagataatgcttggtccataggtcgggatttgggaaaggatccatagggcgccatggctcaaactccgccatctctactcgaggtggatcaagagagctcagtacaggatcgggatcggatggaacgattacgaaggtgttgacgatctcgggaaagaaggtcagaggctcataaaactgggatctactttttgcaagaggacggagaagaagaggtcaaagaactgtacttgggatgacgaaagataacgatcaagagatgcccaaactgacagaatatcaagaggaatagtcagattaaccgtctttccgaaagacttttcggtagagttgaggctgattcgagagaaaacgatctggctataaagcgactgccaatctccgaaggcccattcctctggaaggaaattacctaaccatcgaaactcgtcgccatttggcatcctttttccaaatctgataaacacgctggctacgacgtcaaactgaggaacttgtccgccatagtagctagttacggcgctgaaaggataggacgttgtggttttccaatgaggatcaaggaccatgcgccagaaatacctagccgctgagatgacaaggtagacagctccaccacagatgccgagggcagccaggagggtgatcaagacgggtaaacgacgacgagtcagaacgggtttcctacgggttcggagggacaagcggtcatcggctaaatccaagatggaatctgtaggtacgttctctcgagtgagaggagtgagtgtgtattcctccatgatggaggattcaagtagatactctcatcttatctgacatgtcgtttactttcactctaccctggcaagatgatcagacgaacaaggtttggaggtaacgaatccaacccggaacacatcatcgggatctcatcggggccacaccggctcccgctgcgccttctcccgtatcggcgcccgaagctcactcggcctggtcttccgtaccaacatcaagctcagaccagacgtgtaggtgggtatgtcgcagatgattgtctgttgaacaaggagcagcaagggttggtccgaaagcgagatcagtatgccattgaagagtccagttggtctggatgccaaacgtcaatcaaccgcagcgcacacttgctctttgtacacgctcggtttccgacacaagcacccatagcgtacaacgtacacacatgcacactcgaaacacctgacacggcgacgtttgcctcagaaggaactatcacatgtagtccaccggacgtagaacttagaaccgtaggcgttcaccagaccggacagggtgagagaggatcggagacgggaggaaagccaatggcgatcagaaacagaagtataagagtgacaacaaggaaagaaagcttgacataagaacagtgcccataaacccaagtctatagaaaccccggaaccgacccaatgaagatagactgtctctaccgatggttggatcggttgtctcgctggatcagaccatctgctaagcacgatgacggactatagcaaccggcagcggatgccgatacagatcaatgcgcagctatctttcgggccgaaagttcggcatcttcctcaatcgcgacatgccgcaatgtcttcggctgtaatgcgcagcaaatccgccaaatagccggtgttcggatttggccggcctctcttcgtcacccccggttaatgaggcctcaacgccaaccgacaaacagaccagaaagaacaagagaccaaagaaaagcttcaatggtttctctctcttgaccatcaacaacatagattggataccttcgtttactctctttccttgctattcagatcgtcactcttaaactcaacggccatggattctgtgtcagcaacttcaaccctgaccgagttacctaccgaacatcggataggatctgctgacgcacagctaggggagaaagaaccaaaaatgtttggaaacggtacacctggtgacccgttcgtcgtggagttcacaacaaacgatcgggataacccaagagaatggtctaaaccgtataggtggtttctctctattcagggttccgtccagatgctcgccatcacctttggaagtacgtctttcttgttgttcatgtacacacatatagtagatcggatcggcgctctgccagagcgtacactgggctgagattgtgtttttttacgtgactctcctcgtatggcttgttatctactcagcttctggttatactggtggttaccctaccatgacggctgaatttggctccagcaacgagctcaacacagttggcctcacgttcgtccttgtagcctttcctcttttggcctgtcggttttatagaatccgtctaatgcctaaacctctgttcataccgtttacagaacattcgtcataggtctcgcagttggagccctcgtctgggcacctttgttcgtccgatttagactgtgctctaagctccttattgtcttgtgtctgaccgccttgttccaatcataatcagatccgagattcttggacggaggcgaattctactttcctccctgttctcctacagcctcattggaatgggagtcgcgctgagccaaaacatttggtcgatcatcatctgtcgattcttcatggcgatcgctggtagttccatcatgactaacagtcctggaatgctcaacgaccgtcagttccatatatctactcctggctcatcgactcttcgccttgtcctgcgttcatgtttttcctaatcttcgttctcatctctttcttcttattcagtctggagaccctccgagattggtcttccgatgacactgaattctgttgctccgtttatgggacccgttctcggacccgtcctctctggtttcatcagcgtttatgccggtgatcaatcatggcgatgggttaacggagtcatcgtcatgttctcggctggccttcttctcctcgctgtctttaccgtacgtcgaagtgaaaaatagcgcttttcaaatcactctcctgttgaccaaccaaccttgtcttctcctctcaggttcccgaaacatatcctgcgacagttcttcaacaaaaggcaaagaaactttcaaagtcgactggacttgtatacgaatccgagtttgaggtcggtcaaccaaaaaaaccattctcagaggtactttctactggtctcaagcggccatttatctttttattcctggagcctatcgtgtaggtgtctcttttttcctatcttccacaagcacatataaaaggagcctgctcaccgtgaaatgctatggcatcttaacacctgtgatcggtacagcatatgtctgagtttttacgctagcttgatcttcgggattctctatctcttcttcgaaggtctgttcttccgtttgtccgcatggcattattcgacgacaatcagctcattacttgatttgttcttttccttgtgcttacagcatacccaataatctacgtcgagcaaaaagggtggcgtcgtacgttctttgttttctttcgcttgctggggcttttatttaccggttacggattttctctcttttccagaggatttggggaatctcccattcttgggagtggccatcggcttgatttttggtgtcgttcgtccttctctatcctgtactctccatttgcctctctcctcaactaaacaatttcttctatgttcttcacaggcaatttcattctacacttcgtctttctacaagaaagcgcttcgagcgtgtaaattacctacagacaaagttcctccagaggaaaggttgtactttacgatgatctccgccatcttgttgccaatatcgttgttttggatggcttggaccagtgatgtcttctggatctggccaaccttggcgggtgggtcctcgaagcttttctccaatctttatatctcttttgtgacaaatctaaaaattctcatctattgcaacttaattctacctctctaggtatcccattcggtattggaattgtgtgtatctatcagcgggccgtatgactacactaagcacgttggctgatgttctctttctgtcctacacattcatctctatcgataaatctgacagttgggaatgatgaccaccgtgatggcatatctggtatgtgtttctcttttgatccactccttcttcttttacgattcaactgactttgttcctctcggagatttcttcaggctgatacatatacaatctattcggcctctgtcttcgctgccaattctttgttccgatacatctttgggttcgtccgttttctccatcaacatactttaacgaaacctgtgactgaccatacaactttcaaacatatgaacagaggagtcttcccactctttgcgtcagcaatgtttcacaaacttcacaccacctgggctctctctctgctcggcttcctagcacttgcctgtgcccctatgccttttttattctttgtaaggaaacttctctttcccctcatattttcgcagacagagatcagaagaaacaagaaactgatctttatctgtcattgtttttctcacgcgggtctgcctcttacatagaaatatggagcgagaattcgagcgctttcgaaacatgtcccagagcctcctcgcccttctaaacgcctcactccaccagcgtctctttcgtcgttacaagaacaagattcggatctccctagagctcctccaccagttttcttgacagctggtgatcaggctgtcagggtggaggaagcaatggatgggatcaatttcacaagacgtcaagatcaggacttggagcgcctgtagagagagctcaaagtaataaaaaaaggcttcgtgcttcttgcttatcattcctttgtgtaacgtaaccaatagatgtatgtattagtatagagaactgtgtttctgcatctagatagaaacttagagcgagcaatgtatcatcgtcattcttcttcgtcttcttcatcttcgtctatttcctcagccaatccgaactcatcctcgacacgggtgatctcttgttcaatccagatttgagcggcttgcagaatctctatttgacctgttgattccggatatatatacaaatataaaatgtcgtcaacccttggatttataagaagataacgaggccaaggaataacaggaactataccttctctgtaaatcctacaagtccttctaatagacttccttacattccccacccctgtctgtttcttccccttctcagcgtccacttccgtctgatcaccctccctatcactctgatcaacatcgagaagcacctgtagtttagattgaaccattgctcctaatgtatccaacgccatacattcattttctcctgagacgacatccaccacatccgtctttgttccatctacccgcgctcgagaacgaatcaggccttcttcttcgccatcagctactaataccctcaaaagcgctcgcaacccgtcttctacaacagcctctccgttcttgcctactgtcagattccatgtttttctgactgtttttcctaaccccaagtcctcgcacaaatcttgttttgatgagacaacacccgcaatcagaagtggaacagtttcgacatgttcaggttgactcgatagagggagagcgaaaccataggataggagaagggacgatgatggcttggcaccgtaattgttgaaaatctgactgtgagggttaggtaggtctggatggtggataaagtcgatcgttcccacaattggtttggcatcaggagaagatgatgataaggaggacgaagggttggacacccaggttactggatgagacgatcgatggtttaggagatctagtgcagggaccaagattgggtacgatgctgctgtcgtgggtgttaaatccaaaagctttgaaggaaatgaccgggaagaaatgtacgtcgaagcaagaaggtacctttccctgttgtccgttcatgaacgtcaatatgttagaacaagatcgatcgccgttaagtcgtttggctcatgggtaaacaacacaagagagagtgaggacgtaccaagtaaagccatcagcttcggtcagatccaatagcgtgcctacagatttccattcttcctcccattgacatcttaagtcggcagtcgccccaaaaacgctcgtccctctcaaaagttccatctcttcaggagtgaaccatagaggagtcgtcatctccgtcgctgtaggaagagcctcgatgtatggtgcatgtctgagaagctgaggtctagtaaagtcaaccagaaagaatggctctacacagtcaacccatatcgtctgacgagggaggaatcacatggaaggaaaagaaaccccgtaaagataacgtactgttgtctccaagcctcattgatctttgaagattcgtcgtctagctgtcgagcaatccaatggaggattacatacgagatcaccttctcctttggccctaactcatcccgcaccgacttcttccatgcctctggcttgttttgtcctagaaggccaatgatagcttcttcgcctgtggaggcagatatggccaaatcgaatgggacggaaaggattttattatttgagtctaagggggttgtgcttcttaaaaacaggccgtaaacgtcatctgttatccaaggagtgcgtaaaagatggcgaaatggaagctcgtcagaatctttatatgatcgagtccatacttggcttatggagaaacgttcgacagaccgtatttgacttcaacagatggactcaaatatgctcctccctctttgagccaatcgagaagatggtggacgtgtggtggaaggtcgacagaatccatgttgatggttgaaggttcattcgacctcttcctacttgtaatggaacctcagcccacacatcgttcttttttcggtgctctcatgatctttctcaatatgctcatgaatgactgggtatgattggtacgtataatgctgacagacgagttataagctagaaaggaatacagaactgtcccttgagattgatatgtctatctatttgatctagtgggctggcaatctaagcgtccgtccctccgaccaactttcctcgaacccagacgttggagatgcttcggtcatctcctgtaaagatctgtcggcccagaataagacaaagcgatttcagtacgctgacgccagaacgatgaagagatcatatcaactcacaaatcgttcgaatccactctccagccagctcgcatccccttcttcgccttcttctccggcagtccaccaaacccccggtcctctcttcccagtcagatcgactaacagcgcatcgaactgctttcccttcttgaagtttccaatgacgtcttgaagcccacagagcgccgctccaccaagcgtggccatatggaaggtattagatagggagaggtgggtctgttggctgatcgatcccggattagatgaagcaggcaagtacatcccaaccatttttgatgtgttcatggccgcacgaatttgaggaagaattcctgcttcgtttccacctccacaatcacttcctaagccgacctagtttatcgagtcacagaaaggctagatcagctggagtggaagcaatggcagagtgaatcgggaaggacgaaaagcgtactttgattcctcggtctaacgcctcggctatacgagcgcatcctgagcgcaggtgaaaattcgagatcgggcagtgagagattccagatttggtcgactgaagaagctgcagttctttttcttccagatgaacctgcacggatcggttccataacgttaggtcagtcccttgcttcctgtccagttgtgaggaacccgacgtacacaatgagccaagatcgttctctcccctagcagtccaaatcgatcgtatactccggcatacgttccgtcccatggcttttccgcctttgcatctttaaagagttgcttcgtgaaagcaatctctcctgcgttttcacccatatgggtttgaattgccatcttgtaacctcccactttcgtcgctcgggtgtcttcttctttggcgagctcccctaatcctcgaagaagctctggagagcacgagatagcaaaccgaggggttatgatcggccgaactagcgcgtcggctggggaaggagagagtgattgaatatgcgtgatgagcgatctcgtttcctcgatagaagcagaagccgagggttcgatgtattctggtggacagttagaatccatattacactgtaggtgcaaacgtatgtgtcattccgaaggttatcaatccccctcccgaaagtcagccatatgaaagaaagagagtggctgaatggtgaaaagttgtatcgaacctttcctacaaaagctctctggtgaagctctgcacaaatatcagccaatgccttagtagattctaagtatagtgttccctatgagaagagtgtagcgcctcgaatgacgacatacgatcagaccgatgatcttcgctatcgcatgagcgagacagagataggcatcaacgtacatagtagcaactcgttgtcgtctagccaaaggaggagaagaagaagaagaagaagggaagaaagggtgagaacgttttttcagtttacacatgctatgagttgattcaaccaaacagtggaagttagtctcacccccaggctcaaagtccgactaacgacctccttgtagatctttctagcataatcgacatctttgaactttgcttctcccggaaacgtgacgttgtccaaccagtcgagaagctagaccaatccactctcgggtgtaagtcagctagatataatggttcgactagtttcgttgatagaaagatcaaaggaaaagtccagacatgcctcgtattgacttcctatcccattgttaggatactgaggagcatctaaatccgacccgaagataagactccagaacggtcaaacgagctcgagcgagaagtatacaagtagaagtgcaacaaataaacaagacgagagacccacgagtatgggtatcgataaacccaggcgagaggaattgaccccttctaagtcttcgaagaacttccccgccccatccgtttgactggacgagtttctcgacatcagctggttcgaccggactctcgatgtgagtgatcctataacgtggttcaaaagatggaacccgaccacagagcatgtccatcaagaagaattcacatgattaggtgtctagggcaagataaacgaagtcaagagatggatagactgtgaagagaaactcacgttccgtcttcatcattaattcggagaagaccgcggtgaacgtattcgatctcggagagcgatacagaatgaacgaaaggcccgtagatgatcattatttcttattgatctagaggcgtactcgatactaggtgtttgaggtcgacgtcggtgtgttcaagatgagatggttgatgtaaggaatcaagctttatctgtctggatatcttttgtcagaaagccggggctatcggacacccggtatttttaacattcgtcttatctccggtcgatcggacgacaagatactcagtcggatttgggacagcgcaaagtctacaaccggattgttatataaataataataggaagacaagactgagcaagaagaggctatcgagagagagtgagaaacagaacatgtactgatcaagattttcggatatcaagaacatgaagcaagagcagatcggtagatagatagttagagaaagaacccagggacaagatacgtagtatgaataatatcagatacagtgagaggcagacagcaacgtctcctcagaattcaaagcagtgttcacatatttttataagaagaaactccatagaggaaaacagaaatcatggggtttggtgggtgaactcttttacgatagtaagttgtagagtcccatgcgactagctgagaacgacggcgtgatggccgaattggacggagccgaggaatcctcatcaggattctcactaggcggatgccgacggcagcaagattcaaccttttcttcttcttcactcgaagggttcaacatttccttcaaacccaacccagggaacgtctttctatccccagatgccagcggggttgagatcgaagtaggtgggattgaggtcgaaacggtcgaagcagcagcagcagaactgacttgctctggtccagtaatcaggttcatcggtccccgttctgagttttttctatccgccgcaggcggaggagaaacggtcgacagcctggtgacactcgggttgaactttgatttagacaaactatcaaatctggtggtttcaggaggggccattgatgagtccactgcccgggtgatcaccctggtatgtgatctcgacgggccggcagaataaccttcccttccttctggcatcgggctccctccgacatgaccaatggcggaaccgaaggcggacgagatattcgagccgtaggaagaagaccggtccaacgaagcggacaatgaaggattggagaatcttccgggaaacgaagagtctgtcgttcgtggggaccaacctatcgggctctgacaataaacatttgagggttgtctgtcatcagagatcgtctcgttggaagcgcttctttcgggtaacggtcggtgatacaacaaatatgaggtcgttgaagaagagttcgaggacggactcgaaggtctacgaataggaggaatgtttaatggaggcaaagtgatatttgagggttgttcatgaggatggtgatgggggtggtgatcacgatagaagagaggataggatagattaggaggcaagtgagcctgtgtcgtcaaagaactaggagtgtatcttccgaggggagtcgatccaaccgacttgaatgagcctgacgtcggatgaggagagtcttcttttggtcgtgctggtgctagatgatgagagatgatgagagggtaggatggtgactgacgatttagtaaatcatctgactgatgcggcgaacgggaacaatgtgcatgcgataaagaaggtgttgatgatgggaatgaaggagtccggatctgatgttgttgagccacgtcatgcgaaagtccatgagaattagtctcaatgtctgtcgagccacgtgcacaaaccacatggcttgcatcatcaacggccatcgagtatgctgtttgaggttctttttgataccttgccacctcggtctcggccactctgacgcgtttgccgacgccttgactattcggacttgcactccttcgacgatctttcgtcttgccggagtttatggacaagcgatctccatcgtgatcgtcacctccagtcaaagatttgccaatcgatgctcggctatttttatattgactggaaggtttagaaggcttgttggccgtcaggttgttgcttcgaacgcgtgacttggtacttaatccggctgggggaagcgctgattcgacacgttctgtagattttcatgcgagggtggacgcaaagtgaaataagatgatacaaacgaggagaaggagaaggaaatgaatgagaaatcagatgatcacaaaagaagagagagagagagagcaaaaaagaaatgcatggcagagaaatcgagtctcttacgatcagtgacgggaggctgttttggagaaaatgcttgaaatgcttccgaaaggatagaccgacagatatggatttccttcctgcaggtatttttttaaagatcaatttaacaatagagtttcacccactattcaacatcactagacacatgtatgaaggataagaaaagagggtttaaaacacaggcttacccaaggatctcgtacagatcgaatcgaactcgatattcgccctcctgacggacactgagatcagggaagacaaacaccccaacgtccttctgaagttgtatttggagttggtataacgatgacactgtcgaaccgatgaggaaccggttcttgccatctttggaggcatgtaagtctggatagacgccggtcttggcgtccggggtagcatttgttaacgtggcattcctgtggttgtacaccaatgaatggtaggtgatattggtagtgagtttaagatgaaagaggagcgggacaaacacaagagaacgcgcactgacatgaagtagtatgggtcttttattgtagaagtggacgttttcatattttgtgatgacggaaaagagtccggagatagccaagatgagtagaagcttcaagaccgagcgagcagaggaaataagaaagaacgtactttgcagaaaacttcgactctttgagcgaggtccgccctctttcttgatgttctcttttctcttttggtctaattcatgagctacagcgtcgcctaccatgaggtctggttggaaggagcctgattttttaaggtttgggctgccggaagggttgatcacattgagttgaatgaccggtgcagggttgattggggatctgtcgactgtagttgtatcattgatagacaacgatgacatgtgtaagaggaaatgtcgatagtatcactggttaagagacacacacactctctctctgatacgtactcttgtggccgaatccaacagttctagcacattttggctgttgaacgaacgagaggtcatacacgctatgtaaagaacggaaaacatgagtcgagaaaaagataatgtggtttaagcgatctgagcaagagaacacgatgcgtgtagaagtgatagttgtttctggctattttaagagactgtcagagcggccttattctgactcttgctcaagaccttccacatcggactgcaatatcgctcgacttggatctgtgctcttctgaacctccgtgcttcagtcaaagatgagtctttgtttcggaagggatgaaacaagtggttgtgtctcaccacaagatttgctccgttctgacgtttggattaggtcaagaccaagagacgcacagacaacaacattggatgttccgagtgtctggagtaaagatggaacgggacggatgtttcgaacgcccggagcgaaagaaaatagagagaaataacaaaaatacccacgtgttttgtcgactagaattcttgacctgacgggtttgacagaaacgatcctccattggcaaatcttcgactaagaaggtgtctataggtgttggaagaagaaccgggctggctcggcggaagaaagggaaaaaaaaaaaaaaaaaa

SEQ ID NO: 1121 - DNA, 62070 bp, Xanthophyllomyces dendrorhous
aaaaaaaaaaaaaaagagtagcaggtttttgttgatttaggctatttcactgcagtcctggcagacgttggatgaatatagtctaggttgatcaagagaagaagagtaaatgatgagaatttggatcacgatgcaagcttagattgcgaaacatacaagtgagaagaacagggatgatgttctggaaacagttgtggaataaagaacgtcattttttttttgaaaggacgttagctctgtgtgtatcttgtgctagtgtttggagttatcgaaagatacaaaacggggcaaagaacacgaacagaaagagacgagagattcacgaattgatgcggttgaaaagatggataggatggtcacctacagacggaaaccggctagatggagatgaagaaggtgaaggaacaaggaaccaaaaataaggaacaaaaaataaggaacaaaaaatacgggcgcggaagaactgtaaatcagggcagaggaacaagaaaatcgggacagggagatcgacagaggaaccggtgggtgaactataaacttaaaaaggcaagaggaaatcctttgaaaaaagaaagaagaaaagaacaggaaaaaagttcttccagtggccatgcccggtttcaccgctctgatcttcagcctgctctgcttgaacccacgttgatgacaacaatcttaaggtatgtaaagagaggcccgcgcgccagtctctatatcgtcaccttggagtgaagagcttgacgtcatacaacgatcgacatgcaacccaggcggccacgagctcgatcacagaccctcgtgcgaacgagcttattgaggacacaaccaatcaatctcaggagcacgcacccacacacgaccacgcaatctacatgacatttgtccgacaaggatctctagtgacatatatcttgtatttatatcttagtatgttgaacttatgcctgcacgattagactatcggatcgatcttcctgggtagcttaattagtccgaggctgctgtgcacaggtccagataatcaggtttgtttagtcttatatatctctttagctccacgtttcttctcttcggccttttcagcaaacgcctggtctaatcgagtacatgcagaaaatccttactcttgctagtttccaatgattccaactagtcctcgtgcttcttcacagtttgctttgcttttttaaactttccctatgctgatttcatgtagtttcgacttaatacatccgaaaaagaccggacatgtacaccgccatgccgtttattgttctacttatactcaatgcccgcgacggacccaaatatcgggccaaccctaacatgaatattgccacgtgtcggataaagacgcgcccggcattcgtgtatcttccatgggttaattgttttacgcgtctcgactttgtcaactcctcgtttgcatgaatcatccaagacactcttgaccaaatcctttctttggatgtctgactttttcgcctcgcttgacgcgctgaacgaggatccgttttatcaggatactaggatcgatcttgatatggatcttgctctctcgcggcttcaccgagttcatcactcgtccaaaaagagaacagtccgcggatgccatgatcttgagctcactgtcaacagggaacctaccagccgatccaaacagactctgctttcacctggctcgctgtctccttcagcaatctctcctttggacacatcaacgagttccaggtcgatcgacttgagaaaggttactcttcttcgatcgttagtctccggtccaggttcacgtccaaaacccgaacagcagcccccgatagcctctaatcagagtgtcaaccacgctcgtacttctatgaatcaggacgcccagggagagcattatttcgtgaatcaaacgttcagtcacccaccatcatcggatatggtctctccctcttcactttcctttggaagcggtctttcagagcaaccggatcatccaattcccttacatacaaacccacccattctccgatctgtcagtcctatctctactcagatggcattcgacctcctctcaaacgtcaccactcccaatacctctaaacttgagcctgacgagcggccccctgtgtcactctcacggccaccacatattgaaaacgcccttgtcgccgttgccagacgatcgaaacaacgctcgacggataaagccgttcacaaagagccgaggcatgtcaagcgtctccggttggctgcggctgctgctgatacagaaaaccagacaaccaagatgtcgagtgttcctgttggagtgtcggcgagaggggaagaagtttcgaaggcaagaggaaaaacaaagtccaaaacgggtccgacgctgaggtcattgtcggccgtagccttgagactgaacgaggctctcgaaagacagtccgagtccgagtcagtatttatagaagcaccagctgggacagatccaggaagaggttccaggttgcacgtgttggcaggcacgacagtgttgattttgtggaaaagtgttgagagtttggtgaacgagtaccaagcgaactggatcgagaaggtttgcactttattcttcccgtgtctgtagttcgatacattaactatacactcaatatttctagatctcgtcgttgggagcaaaaatagcgatcgaaatctcggacgatgtcacccacgttatcccagactcttcagactttcctagccatctgatcctcaaaaggttcaacgtcaggcacgcagatgatctgccaacaggtatcaagtttgtaagagatcactggatcgactactctcacaaagtgagttcttatctttgccaggtgccatgctatacttcgatctaagtaccttgtctttccgttctccaatcatccaaccttagaccatgagtagagcggacgaagaggcctttctcatgtttagctctcatcgaacgacctttgggatcggtccgtcctcgaggtcagtcaacatcatcctttcaggttcttcttggtcgttgcttgaattcggaactgattgctcgttcgaattgttctgaaatcgtctggtgcagatctccgtccaattcccaaccggccgctttgttctcttcgctttcagtcccgatagaatctaccaggactgtctttcatagtccgaccattcagcactagctcttttagacaggcagtctgattgaactcttcttgtcttgacatcatatatcaaccgcataaacataggctcgactttgtttgccaacactgtcgaagctaatgatgtccataaaagtaggttcatggacttggaacaatatatcgacaccttctttcatccgttcaactgccgaatcatacatcagagcaagtgtgtctacgcggtccgttcccttatgggccgatggttgacagcatgtgtgtataccgatatcgttccgttcgtaggcttggtcttctgtttctgcgtcgatcacgcctagtggacacacgggcgatccaggagataatccttctcaccagcgacgacaggagatccctcatccatgacgggagctatcctaacgagtgttgcagttcggatgtcttctaacagaacatgaaggatgtccttataagagcaagattagttggacgcttgacggagcgttctgattggatggattttcagccttcgggttcgcacgacgccgtcttttttttcttttggctctactatatttcaagcccacaaacagatacaacctgccgacgcataacatgtgatgtagagcaatagaacatggtcatccaaaacgagaactacatcaggatcacaggtcagacaaggaaacagtaaaagaaccaatagacataaaagaaaacaacacacaagaaagagaaaccgctatggaaaaagagtcaaaaaaggctgcagacgacgcggtggaaatttccttcgcttcttttttcgtcctcaacgcccacccaatcgaataaaatccttagtaaactttctgttcgtccttctcacgaaacagaataccagcgtttctttccttgacagaaacatcctgtaatgtcaggtaagagcatcgttgttattcctgacctatggatgcctcgaatgctcgcttggagaggaggccggtcgtgctttctcttctctcggaggttgccgtcaaattcaggtttactcaccggcttcgaccgacgacggtttcgacctcgtttgtgctcctttcttttcctctgtatgatctttgaaaacatcttctcccctgggatggatcacttgggctgatgcagatatcggaggaactcatacggtcgccagagctatctctgcatgcgccagatgtaggtccaggaaatcgaaggtttgttcgtttgcgagcttcaacttctatccatcctgtacggtttgaactgatgaggtcgttactgactgtgttgtttaccttgttcgaaatcatatcagtgcgacggaaagcttccagcttgtgtaagtcatccatccatacatccatccgcgtttgttcgtacgttctctgatccgttctatctgcgttcaacagggttcttgtgtgaaggtccgtctatttttttccccctcactaagagcctcagcttataactcgtctgagcttattgttgatggattcatctcttgatcgcctaactcttgtttgctcacatatcatgccatgccatatatatcatgtaggcaaaagtcgagtgtatcggattcgatgcggtctctaagaagaatgtttccagaaggtatgttttgtgtatcttctgataatgtactttcttttgactttcttttgtgcttccccatggctattcgacttcttttcttcgtcttttacacatctattgatctgtctaaccaccctttgtaatctgaactgtagttatctctacgaactagaacaagagatcgtacagcttcgacgagagcttgcttctcgagacgccgccacggcttcccagaacggtcaagaatcatcaggtaacggcaacagcggcgataattcgaacggagttggcgcccaccatcatcctctctcgccctccgagcatcaatctcgttcgtacaacgacgatcgtgggcctcaccaacagaacatgactggctctaatgatgcgtctccatcgtacaacggattccattccggtcaacaggagataaagcctgatgttacaatgtttaaccaaccgtactctgacaataaccatcaacagcagcaacaaggattctctgggcaaatgatgattgatccccaacttcaatcctcttcgtcaccttaccaaccgatgaaccagtcttactttcgcgctcagagccatcctacctcgaccaccagtggaacgccaggggatgcaggtagttctaactctggaagaaaggatattggcagcttggtcaatggtgttggctttgcaggagtcgaaagtggggaacccaagtttatggggacatcttccggaagtaagaacttcataattcatcatgtatgcgcgcgtgtgcgtatttgaggagagacgctgacagactttgatgtgtgtggaaaaaaacaacaacaacaacaacatgatgacagtctcgttggcccgtatggtgctatcatccgtcatgaaaacgggaccggctggagccacacatccaaactacaatccgaattctcaaatcaatcactacggctcatcctccaataccccgaaccacgctgaagccgaagcgctcgatgcgctcgctcaactggcccaacatcccgaatacacatctactcaatcgactacgggatcaaacgccgttccaacttcgaaccttcggggtggtgacccatcctcttcgtcctcttcatatgctgtcagtccatccgttggaggcgcacaaggaacgagtccggtcgagggtggggtgaatgactccggctcagttcctcccaaaagagaacggattcatatcgcagctcttcctccgagaggagccatcgagcgacttttggaggtgtacgaccaatacatccagtttcaaaaccagaccttacatatgccaagctttattagacaattgaccagggtactcgatgaaccggatgaggcaagcgaggtcgatttattctttgtattgatgtttttaggtaagagtttatcctatttttattcaacagtgactgtttagctattaagcctaaaatctaacttgttgtccggcaaactgtcacgatccgttcagcattgagcacgatggcattgtccagaaccatggaccccacatcggatctaaggatgtcctccgaggcttttcacgcagaagccatgaagcacatcgactgtatcctggccagttcgaatcacataggaattcaggggatcttgctttgctgtcaggttcgtagcactgatctgcgccttatctgatacctcgtgcaagattcacatgattgattgatcatcgattgacgcgtccttttcaaacctcaccttgtagtatgctcttttcaacccgggtcgaggaagtgagcttcagtttcattttaattcatgaatttgatcgatatgacagcgctgacggttgaaacatgaacgccgcgtggcctacaggtatttggtaccttactggaatggcaatgaggcaatgcatcgaatatggataccatcacgagtcgccatcgtcatcggataacaatccgttggagattgatatgaagcgtcgtttattctggcaggcttataaggtatgttcatacgtaaaagtctgttgagcgcacgacgtttcaaaatgctaacagtgatactgcgtatgtctatagcttgatcgtcagctatgcttcaatttgggccgaccacctatgatctcggatgagttcatcaatacgcctgttcgtcccttatatacttatggcgatttgaaccagcctgttgatgtccctcgtttttacaaaacagtatccttcccttatggatgactctctaatctctgattcatccctgggaacgggcgagcctgcggtttgcaagcaggtcagtagacacgtcatcaccatccgacgaatccaatccgacatccaacgtaggcttcatcgagtcagtcctggagacaagctatgcctgatgggcatgcccgacgaggaatggtttgcgaatatgttggagcaattgaagacttggttgaataatgtgccggtaggagatatgagcttacaaaatggagcagagcagtgggcggtgatgtttcacagtcagtggctttgctctttgtctttcgcctccacgcgtgctcctgttcaaaaagactgataagattttgtgaggatttgtggtaacagacagtgtcctgttgctcttcagaccttctccggcttgccctcggcctacccgggcagctctttcggcatgtcttcgatcatcaagttatctaatcaggattgtgcgacggatgtatcaggccaacaagatgaattatttgtggctaggagcgcatacgttgtttatgggtaggtcaccatctcatctcgtccgagttctcagtgacttacagatccatgcttcgtcgtcatctcttagccggtataacttatctgtacagtctgtggaacgttggtaagtatatactctgtcttcccctttccctttggtctttttctatagctcactcttcctcaatcttacatccgcgtcaatgcatagctatcggcaacatcgacgaccccccatctcttgaggaatcaatatcagacattcaatcatgtaccagcgttctgcaggctctttcctgtaagcaccgttctcactctggttttaaatctgtactctatctattctgaacaatcattccctatcatttttgcagtcaacgtcagctcctccgccgcttgcagagaaacctttgagatcctcagtacggctgtgcttcgccggttgaccgacggcgatactggcaattatctggacgtgtctctcatgccagcatcgacgttgggggctgttgactcggcaaattctgggttgaacgacctcaacgcattcatgggttctggtcgaccggcttcagcgtgtggacctcacgtggatgactcagcagaagattcgggtcgaacagctgatcaggctgctgcaccactaccatcagatctgcagggtctagatgatttgttcttgaagcccctcggtatgtccctttcctcagattcttctttgacactcatcgccttgaccgatcacaaacaaatatcaaatctgtgctgttctgatctgtcatttggttgtctcgctctttttaggctctcatatgagtagctttgaatctacacgggatcctttcggcagtcaagcccctggcgaccactcattcgatcaacagagtgtctttgacaacatcatcaactctcctgctcccatggccagcttttctgctcaatagcctctcccgtgtgtgattatctctcccggtccacgtttcagtcatcaaaacatctagtttactcatcatcttatctccatttcctcttcgtttctccttttgtatgttgcttgataaacgcgaatctgcgaaaatttatcttacagttgtctaactataaattccaacttatgtataggaagagattagatgtcttggattacagaatacccgtcattacatgaatgtcaacactaagcacaatctgatacagacgtatatacacacgataacgctatttcatccgcgctcacaacaaaaacgtcgaatcaagaatatcttgtaacgttcgttctgccgataagtccttgcttggctctggacctatttcaattggccggctctgctttaattttttttctagagtcagaagggccaagtgacgagtgatctggttgtagagatctcttgctactacttagttctacagatgatgtaggataaaccgcacttcttgatcgggtgttattatccgtcaatccaacaccggttgcatcgccatttgagttcacgcgcctaccgatcagtcgcggatcattaggttcgacaggatgattcgtgatctgaaattcactggtaaagttgtttggctcagtaaccgctgtatgcgttgtattcgactgagatgatgaagctagcgtttgattaggtctaggaggcgatggcgcggaagtagaatcttggcgttgaggagcacggggtttatgaggaagggaacgcaggtattgatgaacaagctctttttgatcactccatttgggatttggtaactgacggtgctcaacaacagcttccaaaaactgggcgcagaaatcgtacaagtcgactctagtgtaaacatcggttgtcggatcgagcatccgccttataagcaaaggaattttgagctcatcaaagccgatggcgatggctacaaggagcaatatgagttcaatcgctggctcttttcgagtagaggacgagtgaagcgctgcaattgactccttagctatcttaaaagcattcacagcatgatcaggaactatcataccaggaagaccaggattgaccggtcctgggactgaaatgggcgacagagtaggagttgctgcgtcgattggtgaagatgcctctgaaaccacgaaaccagggtccgctatatcgtctaggtttaatgaaacgacggattcttctcgctgagaaggtagtgagtcgttgtcgttatcatggttattattgctgttctttttcttcttgccgttcgatgaagaatcggtctctgcgtaagacttggtacgataaattatttcaatttatcttttgagtatgcaaacgacaaagcggaagcgcactagtagtgtcaaagagatactgacaacaagattccttttacggccaacactttcctgctgaacagccaacctttccttttctgcttctgcgcgttttattatgtctgcccagaaatcgtcttcatccgttacttcttgatcttcagataattctcggaaatctgcactggatgcttcccaaactggcgcaaatccaaattttccttcactttcttcgtggtcttcttcagcattctccagtttttcgactagggcaaggacatccgaggtggtatagcggatatccgaagtctcatcttcttcaaaaagcactctctagatccatgtgaaattcagagatggaactataagatcctgtttcgtgatgacaatagcgaaacatgacgtagagttagagattgactaaccgctccataagtcaagatgtcttttaagtcataatcttcttcgctggccatgttttgcacctgatttgttgagaatgtaagaatacatcagttgggttttgagaagagatagacaaaaaagtgagactaacaatcagatgatctagaaccatcttcttttttccgccctgaatcatcttttcctcaacactattcttgatcatgctattttgagagggaaaaacatataagaaatacttctaaaggaagaacaacgctctcttccatacattcggttctggaacttacagtttgaagaccaaaacctgaggcggagttttccatatatcagcttgatttacagaatcgccaataacatccacgtagactaaccttcttctcctgtccaaatctacgagaacgggtcatgaacgaccgaggaaattagatatctagtcttcgaattaaaagtcaagacaaatagacaaccacacctgtatgatcgtgatacagcctgaagatcttgatgaggattaaagtctgggtccattatgatgaccacatcagcactggcaagattgataccaactccacctgctcgtgttgatctatatgcaggatgtcagaattatagtttgtataggaaaaatccacgaaggcaagtttggtactaacagaatgtatagatcaacattagaatttggagaattgaaccggtctatatccttctgacgctgagcctgcggagtgtttccatccagacgaagatgaacaattcctgagcctatgagccaatcttgaactattccacacagggtgagtggttgacatcagcagaactatcttggttcacttgaatttgtaggaaaccaaagtacggacggatatccagaactatggcaaactgtgaaaacaccaaaacccgatgttgacgctgctggagtataggcagcatcatctttagcagagaaaactaagaggacaggagggaaagagtcaattttcatgttcgatactgagtatagtggaagtgtgcctaattaaacatactttggaggaagcgtcacaaaggcgctgaagtgcaaccgaggattcaagactatgatcatcgagttcaggattaactaggtaaggatgttgacaagttttacgaagctgcatgaggagattgttgctataagaagaaagaacgagatgatgtcaaccctctgaatatattccaagtcaacgaagccaaacttacaaaacaaggctcttcgaactcccaacgtgttcctgagatgttcccgcaagacgacgaagaacctgaggatcacttgcgagtagtcctttgtagcactctttctgcagcttcgacatggtcaggggaacaatgatctcttgctacaagaaataatcagatatcaaatcatctaaattgagccgatcgaacacggtgttctatactgactctaggtgggagtttgagaacctgagatttaatccttcgtaaaaagctatgtatacgatgtcaacaacaaaggtgtaaggggatcgaagtactaaatacatctcttacgatataaaaaactggaactcactagggattaagcttatcgtgtaagcgagacaacttctcttcatctaattctccaaattcaatagtgagctgatccagattcgtcctgtgagaagagcgatgagctatcagccggcgtggttgaaatttcacgggacgaggtcaacgtcacttaccatttactagaatcgagaaaattcatgagattgaacaattctcgaatgttgttgctacattggaacaaaagattagtgataatacattcagtatcttcatattgtcgtgacaatcgatatagtaggtaatcacttcaaaggtgtgcctatattaagatccggtatgtgatgtcagtttgatttgcctctataacagaatcttctcaagagacgtaccagtcaagatcactttatgagcgcaattaagttgcttcagattgccaaagattttattggtttctacaaagccgaaagatatcatgtcaaacaatgttatctagacttcaacgttctttgctcaagtgtttttaccaaccattcttgagtctctgtccttcatcgacctgtttcggcatgccaatgtgttgattaaaccacacttgattagaatcatgcgggttgtaaaagatataccgataggaagaagatgatgcataccactaggacttcccatcgagggactgtcgagatgacctctcggaacgatttctaccaaaatgtatgtgtttgagataagtagttatccagatatatgggcaacataagccatagagagcgttacactgacagatgttataacctcatatgtggtgactacaacatgggctttcaaagaccgagatcttgcagagtttgaaggatgaaataactcatactcttctaagatagatcggtttttggctgacccatgatcttgaaaagtgtggtgatatcaaacgacaactaaacgcttgaacaacaaccattgcacaagtctccggatcatgatagaacttacaaggtacagcgagaagatcaggagcccacttttcaaactcccgaatccaatctatccaagagatcatcgttagttacaagtacatccatttacttcaagatctagagtgacccacttgagacggtcgagttcggcactactactaggcaaggatagactataaaaagacgacgtatcagctatggtgataccatattatagacgatggcaagaatttatttaccatgatgcttagtcttaagcacattcatgaaagaaacaatttggatactggtatgtgcaagaaaatcagttgttcttctataatcgttcttgcaaagatcaatgacttacgtctttcctaatcccatatcatcagccagaaaactaggatgcagtcgataccattgtgagtataaccagttcaggccttccaattgataatccattagtttctaatgcgattcaattaaaggttgagaatacacatcagcgaagcaacctttaaaacgaagtaaaacatctcactcactcctccttttatatagtcaggttgagaaggcatcctgcgaatattctcaacgttcctttcgtctcgttttttggcttcttgaggagtaaggaccggaatgattgtctggcgaccacaaagatacctctgataagcacgccggaatacctcgtattccggctcttcaggaccaggaggagaatcctcgacagcctcgctgtaaggaagttctccatatttgatcttgagatcaaatcgacaatagtattgtcagatattgttgcgccttcggccggtccatccatctaaaaaactcacaagacaccacatgaccttatctatagaattttcgattgttgccttctgttgattgtaacgctcccacacatcaatatggaccatatcgttgccccaaggcttgaccccgggtactatgtttcgagcctctttctgtcctttcctgtttttaaaggtcttcaagggagctttcaggtaaacatctaaaaccctgtcaggtgtgctccaagccctgtgcaatcgtacagataacagagttttagaatttgaggatgtgtatacactatattgtagaaagaagcggacagtaaaaataacgacgtacttggggatacgagaggtagcatcaggattggcaattggaggaccaatgtacacttgcgggactttcttttgaccgaagtccagagcagaagctgtagaggcgtcttctgcgtcttctgcctgttcggagaggagtgtgagctgagtgccgtttttgaggaacatacgaagtcttgccggagaattggttagcaaccattcgtgaggtacccattcaatctgtgtaccccagatgaaaagaaaaacagtcaagaatcaagcgacaccgaagacgtatataatgcaaaacagatactcacgcgtttgaagcttgaatccataaacttgaccaaataaagcctgggaaggctctgcttgtagaaaggggatcctcccccctcaaacggaggttccaccgcgccatcatacgccggtttccaagcgatgatcttatcaacctccgaggtccaacgaacacaatcgtgacaattccagtgcctgtcctgagagaatacagcaagttctacaactgaaggtttcccaagatagttaggaatcggacgaaggcaggcataatggcaagcacgttgacagctttgacaacgcataaacacttcttttcgaagagccggcgtgggatcagtggaaagtgtgggttgtatagaagatggttcggtatcaacaggcgtcggaggaggcttaagaatgactgagctaatgggtgtaagagaggtctcagattgattctggctatctataatatgagaattggctgtaagagggggttcgaccgagactggatttgaagcgtcttccaagggtgtagattcggcatctcttatctcgacatcgactgatgtgacttgtagcacattgatgtgtgctgtaggactgtcaagctcggtggcttcctgatgagcatggccaagaccacacacgaagcaccgaggatggacagtacaacccgaacagatgaatgactgtatgatgttcagaagaagaccataaagagaacggcagtcagtcttctttcgattattgacgtaaagcgaagatgttgatagatgagccatacgtcaagctcgtcaaacatcacaactgtactcttctctccatcgttgtcgacatcacgatcaagaacgttctttttctggtgctcatcgagacaagcaaaatgagtctagagaatccaaagatcgagtgagttgttcgagttaagattgagggggagaaatgaagcagatagaaaaaactggaactgctcacagatacacaacaaactctacactcgatccatccacccagtgcttcaatcatttctagcttcttcttcttttcctcattgtcatcctcaattcttttctcttcatcctgtgatcttacagctttccgaattttcttgctatctttctctattctttgctcaagatccaaatgaagatcgaaagctgacacacgttgacattctgttaaacatatagccagatccggcaacaaggatgtcagattctgtataaacaaccaaatatgaacttcataggaattacttactcgtacagaaaggaagatgagcactcaatatctgagtcgttgtctcctcatctacctcattttcctcttccgtctctcgtagtttcttttgctctgcaggcctcttagatgatgtgttgtcgttctggtgccgcttgaacttgtcgttggactctgctggagttggtcttgatgaaagttcgttctcctcctcatcttcaagcctcaacggtcccttgcgagatcgactttgccggctggacaattttgactctaaactgggttctgaatactgttctctcgaatggctctttgattgagtcaaacccgggctatcggcggacagaatgtccattggatctaagggttctggtgtactggactgagaattgacgattcgaggctcgacaatcagaagttcatcggattcagcctctgactgtatgcaatcgcatcgaccgaaacagaaagaagttagagttgaatataccgatcttcgatccaggaaagagatcacacgtacaggaggagattcaatccagtgaagattaggtctgctgggtccggacttgatcggtagagggctaccactatcgatacagttttccgaaacttcaatcaatcagctggacgagtaaaagatcatacgttaagtgaagagcttacctataatccttcgctaatcgcccttgattgcgtttcttctggctgatactggattctgcttctagcctattctcagaatctgcgtcagaactcgaattagactttgcggcacgttcctttggtgtagatcgcagggcagattttggtttgctgggtttcaattcgggtgtgggttgcccagaccagcctcttgcccgtcgaggcagaagatacagatctggctcaggttcaggaactaactcaggctctaaaacgtacacccagcccttcattcctttactgttgatagacaaagataccaggaaaatatggcgtgaggtttcagcttggttgtctatattctcatatattacggataagaggtagatgagtagacttacgcgtggcgctgtcgtttctttcctcctgctgaatccccctcttcttccaatacctttctagtttcacgtatcatgtcttcttccttcatagcaacatcttcccccgaactaacatctgttctgttctctgcagttgtcttgtcctcatctggtttctgactcgactctggtcctatagatgactctgcttctgtaggtggtattaatcctgtatgtggttctggtcctgcaggtggttctgcatctatagatggcttggattcatcttgtgttcgcacagaactcatagacgctctaagttttaaccgaggatcagcagctctgattatactgtgcgcatttaaaggcggtaaagagagattatatcctgatgctggtgctggtgctggtgctggagttacagtcgatgctggagacaaacaactgggcgagtccgcaaccggagccttcgaggcggcaacgtcaacatccgtcggtttttgtttcttagtaaatttgagtgtcagtggcccatccgtcgaatgcgtttctgatcgaaagcatcaaagcagagattatttaataggatgcgtgtagcggaagactacatatgaacaagaagcaagaagttcacagagagaagatacatactgttcggcacggctatagaaagagattgaacatataagatattgctcagtacgcttgtggtgatggtcaggtcgatcgatctgttaatgactgcttactataaagtaattctgggtttatggcatctctcatcatctggacggatgaatgcgagtccatcatggttctcaataaagtgtgagcttattggacctcgatcatgaacgcatcccaaaccaacatagagacaaacctgaacagtcttcccagacttcatccgaacccaatagcccgcctggtcgtttcctgtctcgactggcctcaacacttccaatagaccatccccttgttcctcttcaatcgccctcttactgatattgactacaacaatttccggcgaggacgaggctctgtcagattccaatctctctctgggtagagcctctacctcttcttcagagtcaatgtactctccctgttcaggcagagaagcggtcgatctaccggcaggtgagcccgacattgggtgccgcggtgaaagtgctgtctgagagatcctatttctaactggagttgaccgagtgaatatctgcagaccctataacgtctgatgactctggacggagaagcttagagtatgtgtgcagctgatacaagatagctggtatgacgactcagccgaatagaacgaaatgggatggatggggagaacaggttaagcagacgagagcatccggtggccagcaggatagtaagaatccgtcctagtcaatttgataagattccttattgactttcgtaatgatgtttgtcctctcccatacaccatggtttcttctttcatacattcgtgttggggtttcattctcgacctcctcactaggttcgtgttatggatactatcagccggtccggtacccatacatgtcgcattcgtcatggacggcaaccgtcggttcgctagatcaagaggtcgacccgttatggacggtcacttgaaagggttcgatagcttgaagaatgtgcgtcaccgtctgaatctcaatgtatccttcctagactctctctttctgtgtttctatcccaaacatcgtcgagagaaacaagcaagatagtcactgtgagcgttttctatccaagtgagctgaccaaggaagctctgatttgtcacttctcctttgcttctcgttcaaaataccactcgaatacgttcattctttactgccttcttcggacaactcagatcctcgaactatgtctccgtctcgacatccaatgtgtctcgatatataccttctcaatcgataacttcaaccgaccgcaagaagaagttggtgccctcatgaatcttgcccgagggagatttagagaattagcggaaaaagggtaagtggttttgccagcgttgcgttcgtcgttactttcgctgacaagaacatccgtcctctcggtctctatcgcctcctttttttttcaaatgccactctagagaactactggaccggtattcagtccgagtgaatatattaggcaaaacatccctcctcccgactgacgtgcagcaaagtgttaaagagatgcaagatttgacacgtcataattcaaagtgcgcccacagacttgatttatcttctcttcaagaagttctctgtaatctgacgaccgttctttgaccttcacatccttgtggccataagagctatccttaatgtctgtatgccatacacatctcgggaagaaataacttcttctgttcaaaccaccgtcgatcaagtccaatcagtcccacttcctatcgagtatgtcatctacggcgcgctctctgtatcattctttttctcaagaagtcagacagtctaatcaggagacaattccttctctgttcatattctatctaaagagatttatccatggaatcgatagaatctaatttgtatactgcacaggggagcagcccgccattggatatcctaatcaggacgtctggggtcaaccgactttccgatttcctcctgtggcaggtaaggaggaaacttctctattctctttacgcattccttttctaactaaatattttctcttctgtacttcttccacctactgccctcatctgatcttaccagacaacacgctcagccaatatttacttcgtcgacaccttttggcctgagtttggattacctcagatggtcagggtacttctccgatggcagagagaacgctggttcagcaacgaccgtctgggaagagtttcaaagaaaatttcttgacgtaacatcaaaacggtcttctgcctcgcttgatcatttttgatagttaatagttgactggacgcaagagccgtatgtgcggtctcagtgccatattatgaaaattcatatagatagatagtagggaaaaaggaaaccaaagggtaactaaaatagaaagaagagagcaagaaagcaagaaagcttttttcttttacaagtacagtaaagagatgagcatagaaagcgacacttgctgcaaaaagaacaggaaccaagccagagcgttttctcctccttgagacactactcctccatatcctcatcagaatcatcatcttcatccgaatcttcaccttccgcaacagaaatcttgggtagatcgaatgtctgatcggctccaagataggaatcacagataaggtacagcttcatctcatgatcgcctgccggtaagttgacatccagcttgaccttgagctctctggagacagtaaccttcttgataccctgtaatgtcttgcccgtagccaagatcagccagaaattggggatcttcttgccggggtagtgaggtgcgactaccgtctggtcctcctcctctgcatcctcatcggcctctcgatcgagagtgacccggacagtgataggttttgaagcgttgtacccttcgtcgtcttcgatgatctcgtatgagacctcaatggacgggtaagcgttgacgaaccgggcgacgtcacgcatctgtcgttggtccatgcgaagcaagtcgtttctctgatcgtcctcgagctccgtgatgtcgtagacagaatcaacgttggcagccttacatcgagcaatgacctccgaatcgaagtgagggatctgcttgaggggcgaatcggtttcccacatagcttgaatgcacatctgcgacaaatccatagcacctaacgcgctgaggtaggcattcgacgacatgacatccacacaagctgacagcaagctgatcaccttgcccaagatgatctgctgatcagaagccaaatcagcagggagaatgacccttgaaaagtgagcctggagaagaatgaacgtcttaaagtgaggcgatccaaagtcaggtgtttcgagcttgacggggcatcgatcgtagattcgtcggagaatgacatcctcatgatgtcgaatgggcacatcttcaaactcagatgaggaagagacaatctccaaaaggcccttgagcttcgttcgctcactgagcgacatgctgaatatctcgacagtaacattggaaatgtagtagtctgtttggtatgagacaaagaagatcagaatagtgtgatttgcaggccattttttgtcagagtgtgaacttacatgcagcaatcattcccaagttgagcggcgaagtgtccatctcgtcctcgattgcgatacacttggaagcaacgagagcattcagagtttcttcgaccaactcggaaagatgatccgaaagatgtcggtgtgaggttccctgcaagttgtagtatacagggttttgagacattcggcggtaaaaccaagtccaggtacaccaatcaacagcttcctgcttgttctcgatcgtcttggcaacgatttctgcgttgaagtggtcgtgaagcatggccgggagctgggactcgataggaagggcctcgctcaagaatttcttgtaaaattcttttcgagtttgctgaagcataagcacacatcgactgttggtatctttagttggtcggcacgctcgacccatcatctggagcagatcggcgatagggtaatcaacatatcgatggtcctgtccgtcgaacgactgtacccccatgataatgaccatgtaagccgtaagagggataccccatgcggtatccttagaagcgatcaaaacctgaatagcgccggactcgaaaagtcgttcgacaatcctcttgtcggacttgttcagagcctcgtgatagtatccaattccgtacgccaaagtctcctttaagctaggatctgaaatcctatccaggtgtggctgaagatcctcctcctcaatgttgaggaacttcttaccttcctgattggcaaggcagtagacgagaatatcatttgcggtaagcttgcactgcttcctcgaagggacaaatgcaatcacaggctttttgcccgcccaatcattgacagccaggtaggcaggtttggccatcccgagcagaagagatggatagtggggaatgtcgtagctctggatgtgaatatccatcggtaaaggtcgcgtactaggagcaaagttgaagacgttctgagcgctggctccgatccagtctcctaaatctctggcgttcgcaagggatacgctacatccgacgatacgagtattgattccggtttgggatgatacaaatcgagttctcgaaatgagaacttcataagccgccccaacggagccaccgatcaactgcatctcatcagcaatgagtagcccgatctcggtgactgcctttcgaatagtcagcttccatcgtcgtgaaaggttatcccactgagtacaaagagaaacagaacaaaaaagtcaacaaaaaagactaggtgacccagacaggagagtaaaataaaatatagacaaaacttacatgagccggagtgcaaacaacaatgtcggcctttgaaaggattctcaaatcagccgcctgctctccagtcagagaaagaaccttctttccaccttgaacattggcaaacttggtcgaccactcggccaccctcaagtcaaccatctcagggaagggctcaatgcaaactgccttacgaggttgaggtttggaccacaatctaagcaaagcaaactctgcgcagaaagtctttccacttcctgtgggcgcaccgatgaacacattgtcatccgtggtgtagagagcttggaagacctgagtctggatcttgttgaagtcccgaacggattgatagacagactcaaactccttgttgtgaagggcagagactggcaaaggctgaagatcaagcaaaggagtatgagctgggaacttttcaggcaagatcaagtgcttgaacgacacggccaatcgagtttccgaatgcatccatcgatctgaggtgaaggtgatgaagtagttgggtggaacgggatcgtggattgggacggtaagggtcatgtgatgctcgctcttatcctcatctgaagtaacatactgctttcgaagtaagaattggtctcgaacgaggatgatctctccatctacatcctccacggtaacccagaacaattgagagcctccgtgaacgttgtcgtcccactggaagtcaggagtgatagtcaggtcaatcttgagaagagatcgagtaagcggcaagacgtgagcctcgaggttgagcttggggaagcagtgaacaagtcggtgaacaagttgtccaacgtttctgtttccgattcgctgaacaccaatgagctctccaagctcaggcggtgagagatcaaagtatctgtaccaagggaattcctttctctcggctcgccgaatgatatcagcaggaacattcttgaactgtcggagtggcgtcattgaaccccacatcctcctttccaccatcttgcacatctcgagggccgccttggtgggagccgcccagtttcgtcggagacaaatctcaaacattgctcgaaggattcggccggccgattgctggacgtaaaccatatcggacacaagcgcgtagccgtcaagcttcaattgagagatataagcttggagaaggacattggtcttggccgtaggctcatcaacaccttccttgacgggaacaggcactcgctcgagaagtttttgaagctccagcttctcctcttgtctaacaggaatcaaacggaactcataagacaatgcgaagactcggaaaagttcaagcatacccatagtcggtttgagatgctggttgtagattgtcatagacgcgtaggtaacgtagtagtgggaagcaatctttccgagttcggtcgaggtaaagactccactctttcgatcgtacttgaccaaattacctttctccaacatgacggcagcggtatgaatgatatcagctcgctaaaacacccaaagatgattgcaaaacagcaattaagtttatgtaagcgttgtgaacaacccaatgacatagattagagatacgacacatgccttttgttccaaagcggcgtctccctccaagtaatcagcgccgacactgtacaaggtaggttcctttagcattcggacgtatctttgaaaaacaaacaacatgtgtgtcaacaggatgaacgtagattcaaacaaaaagaggaaccaaagagaaggtctacatacagataagtgaatccaagccattgaacagcctcatctcgatttctgacgtttcctaagacgatttcggcgttcaggttgtcgaccagcctagagacaaattgactttcgatggggagttgctgattcatcaaactagcgtagtacggcagctctgaagcgttggtgatgatgataccttcaccgaacgtgtcatacctgggtctaccagcacgacccaacatctgcagaacatcctgaggggaaagctctgtccatctacccttttcggggttgtaaacctgggtgcccttaatgatagcggtgtgggcaggaaggttgactccccaagctagggtagcagtgcagacaaggacttgaatatggcctttctcaaacagttcttcaacatcggctcgatcgacgggagtcattccagcgtgatgaataccaaagccgaaaggaagaaggtccttcaggttcgcatcggaagcatcctgggcggcttgaatgagaatctccctgacagctccttcaggcttgacgaattgagtgatcgtctccttctcaatggccatatctcggataaactttgctgtcttggcggtctctttcctggaatgaacgaaaaccaatgtctgttctttaccagcatagttaagaactttctcgtaacaaacctcattcatgatctggaaacgcttgatcggttttttctccgtaacgccgatgaactcttgttgaagcggacacggtcggtacgtcccattgaagtaaaacaaaccaacgttcggatcgacccgaaggaaggtagcgacatctttgtaattcggaagtgtagcggagagaccaaccattcggacaggatccccagtctgctcggcctttcggatcgttcgggagataattgactctagcactggtccacgctcatcgtgaagcagatgaatttcatccacaatgatcaatcgaacgagattcgtgtaagacgtctcggttgactttcgagtgatgacatcatacttttccggcgtggtaacgatcacctgggtttctgcgatctgtgccttggtgagctgggagtctccagtgagctcaccaactttgatgccaaggtaagagagtcgcttggtaaacgttcgcacttgctcctggaccaaagccttcatcggagatacatagatgatcttgaaagattcgaggtcaatcaaacccgttcgctcgtctcgaaagttttggattgctcgaagaatagtgaggacagcgacgttggtctagaatttgttaagtgaacattgaaagaaaaaaacaaccaaacaaacataaatgatgcaagtcagttaaatcacgtgaagagagcgattagactgttgttgatgacaaacctttccggcaccggtgggggcgcaaagcaatatgggttcgtccgttccgaaagcgatcggatacgcttgactctgaatcgggttcaatctactagactctgtaccgaaagcctgtctagaccattccggaagttcctgaatattgactagatccccgtcctgaatctcgaccttcttgggcgccttgacaagaatgcggtcgtaacccttgaaggaaaccttggtggatcctgcggggagtgttggcttacggtttgtgttcaagtggcttccttcagtgaagatcatgtcgttcaggtctacagttcgacggggctgagcaatgagcgagccgggagctatagtcgccaaagcttttgctggcttcgccaatacagaatcgacgtccatggcatctaaggtagatgaagtagcggtggcgatagcagatcttccgcctcttccaccagaaagttccctcaaaatccacccaacacctttttctcgcatcgcaacctccacatccttcttgtcatcttccccgcttcgtgccaacttggtgcaccaaatgatagcctccctgttcttgataagaattcgaacgaggtcaaacttgtcgtagtcgaagagttccatgagcgaattttcacagtctcgaaggttgaactcggaaccaagaatatcgagcgttttggcggtgaggtcgcttgaggtgacagggtcaggataggactttgcgataagtcgctggaggtagaaagcatcgatgtcgtgaagagagatcacatcagaggcggcagaagatttctttttggatgatgtagaggccgacgttcctaaaagtagagtatcatctccttcaagatcatctccatcagccatcgggctgtccccatcgtcttcatcattttcgtcctcgtcgtcagagtcagactcgtccttgatctcaaattcttgtccgtcttcgtcttcatcgtcgtcctcaccctcgaactctacggcgacaccttcttctccaaagtcgccctcgcgtttaccctcaccatctgcaccggtcgcgtcctcctctccccagtcagtgagctttttactcaagttcaggaacgcggagaacgattcagaatcgacgttgccaacgatgtcttccatttccctcttcttatcaaagtccttcaagtcatctgccttgaggatatcgagaacggtatcggtggcggatcggacgacgtcggctgcctgatcaccgagcaatcgatgggtcatgccgagaaccaactcgaatacttctcttgtctctgccgttttgggtcgatatgacacaccctccgagtctaaagcagcttcgagaatgtcttggtagttgccggctcctggcacagaagacgtgttagttgctcctctacggaccgatcgttctaccaagtcggcagccgaggggttcttggcctttttcgccgatgtcttaggggcctctctgtgaacacgagttcccatctgggactgatcgatccgaccgacgagagattctgcctctccagtaggctcgaaatcacgtcgcggaatttttgaacggtctgaaaaggtacacgtgaaagcgtgacaacagagagagattggagataaaagcaggagaaaggatcggatggatatattgaggtggcgaagagtaagggacaagacggaaggtgagagatacgcgacgatgaggttcccacaaaaaggcaagcaagtcaagaagagaacaaaaaacaacaaaagaagggcagagagattgtttgaaaagaaagagagaaaagaacataccggtctggaggaccaaactactcatgttcccatagttgtattgagacagatcctgttgcttggacatgatgggctgatgatgggaaagatggatgggtagtggaagatcaagagaaaaagaggggagcaggagggagactaataatgtggatggcctgcgatttgggtaagatcacaaccccctctggatgatctgagagaagaaataaagaaagagaaagagatgatcagaagagaaacgaagaaaaaaagtggtgggattgtcggtgggaggtgagagaaaagagtctgttggaggcgagggggaaaaaaagcaagagatcggcagtctaggcgagaggaaaaacaatagagaatgttggtgaaaatcattagaagcatctgtgagattcagtaatagtccatattttgatagggtcggtccggtatgacttgcgatcgaagtctcgttcaagaaaaaccgaccgttttgctagtttcgtaatcgttttcctagtcctggtctgtagtttgtctgcgggtctggattttgtattgaacattcgaatcgcattacgcgatagctctagtcgacttcctagttctttgtctttgcctccacttcgttcgttccttcgttcctccgcttctttttcactcttgaccaaatcaggaaaaatcaggaacaacaggaacgaaccccatcaggacagatcaggcacgagttctgttcctagatcattcatctcgcccagattccatcaaggtttgtctcttcaccaccaaatccccatatctactcctggtgatcccattcgttagacaggagtgaggataggaaaattgcagacagggaacgcgtgaactgaaaccttcatccatccatccatccatccatccattcgttgccctcggattctttttccttctctctcttgtagatcttgaataaattctggcatccttctcctccttcctatctcatccagagacagactccttggcctttctccacatcggcattctatccagttggatgcctttacccatactctatctccgctctgtcgtacgtgttttcttgatccgggctatgcctcttcctccttgccgattgaccttaaactcatgtctttcgccctcatttacgtcacctatcgacatgacatccagctctcttaccatccgtacgcgatctgaggaacatatgccacagtaggaaactcatcacctcaacgtaattccgtatgttccaagttgcttctttgcttgttggcttcatctttttctatcgctggcaacttcttattcctcactctgcttttattcttccttcttgaattgttcatttttctctgcatcagttgtttcagaaaatcgccatggactcgacagaagacattgcatcccttctgttagcacttcatgattcgactcctcgaacccatctgcccgtttctggccaacccacagcgtctacctctcaattgccatcttcatcatttcagtctgatcaacccctgctgccctcaggagcacctcctccagagcatgtaaaagtggagcctctatttcaacctcatcctttatcaaccaggagcccaggccatcagttatcttcatcactgggccctgcatcgtcacctgggggtcatctacagaacaacgcaaaccgggatccaattgagattaatacatcttttcacattcgtaccaaatccccttcaacaacccttcagaatctaccacccccaccggtgatccatccagcgatcccgtctccaccggcgatagtagagtccacttcttcgtcaatatttcctacgccagatacagactcaaagccgacagctcctgtcaaggcactcagtccattggtaccattggatgctatctccggtcccgccgctgctgcaccgacggcaagaggtacgaaacgaaaaagaggaacgggctccaaagctgacaccaaagcaaaatccaaatctgcccttgtctcagcagagccccttaaggttaatgcacaatccgacgctcatgtccttcatcccgatgcgggaatcattcgatgcatctgtggaatcattgttcgttcacgttcttctctattgctgcctttcacgcgtgttcctgacttgatggttcgcgtcaacttattaatacgcgtcatccctacaggacgatgatggattcaccattcagtgtgatcactgttacgcctgggagcatgccgtctgtatgggtatccaagagggaaatgtcccggacgaatacctttgcgagctttgcttgcctcgtgctatcgacttccacggagcaaaagaaaaacaacgagccaagaaagaggagctgactctccgtgcagagatcgaagctgctaaggcagtcacacatccgcgaaagacttcggggcctattggatcaacattgacgacgggggagaaaagttcacatcaggcctcccatagcaagaacaagaaatcaaatcatcttatacgagaggtccttcacccaccttccaaggactcccaacccctttctatcaacacatcttcgctctccgattctatttcggctaccaatggccatatagtcctctcgatggatactcttcctgaacctcatatctcgacttcctcgcaaacttcctcgacaaaccaacgagcacactcaaatctccatctttcactttcttctatccagcagcagtcgctcgcgactaccaatccaccttcgcctcaacctggatcgactaactcagctgtcgtcactcaagatgaagatgagaagttcgagccctggacgatggagtactttcctgtccgtgaaaatgtggtgagagatccaattgtgatgaacaagcttcatatcctccagaatgtctgggaccgaagacttggtggattggtcggcccttcgttattatcgtctttaaccaagctaaattctgaggtcgagtcgtctagagaggcagagtctccgacaggaaatcaggttgaatctcacgaaggagacgaggatatgaaggatagatccagtcctgtcgtgtctgtgacatccacaaccaaccagtcggcgaagagtccagtccctgtgccgattcaagtgcccccggaatacgaaccttcgttctcgactttgggcaatttcttacccccggtccttctttccgctcccaatctcgcttcagtctcgtccaaacttcagattaaatcgcttcctgcgaatgctccatccaatccccctcaacaatcgtttacgctttctcatccatccatcacgacatcgctcctccgcccggtctacacccgaccaaacgcgtacgccgtcttcgccgaaggcctcatccctcaaggtacccttgttggtgagctcaacggagagctcgtacagggagaaaagtacagacaggatcccatcaatcaatatcggtttttaggctgtccaaaacctggggtcaggacgcttgggccgggtgttgaccttgtattggactctagagggttcggaaatcagcttcgatttatacgtagtagctgtcacccaaacgctgtgctacggccaatgcttttctttcgaaaccccagctcaaccgctcgggacgcatctgttccgcctgccgacttatcaccttcagacagcaatccaccgtctacacattctggtacagccggcgagctcttattcggagtgttcgcatcgaaagacatttccaaacgggaagaaatcaccttaccgtgggaatgggacgacggtcacgttgtacatgcccttcaaaaactcctcgactccaagttctccggtccctttcaccattccttattcggcccttcttctgcagctactcctattgcttctcacaatcctcaaaccccgacaccaacatctggaagtcgacgaaattctctctatcctgttgatgaaatcccttcccttgctgagcttgttcctaaattatcaatcgtactgatccatttgacggggactttcgcgacttgtgcttgtctgaaaaagaaggattgtgtattgtctcagatggctaggcttgtcgaagggaaaccgttctgggggctggttgaaaagactgttgggcaaggaaggggtggaaggagacctaaaagaccagatctagggccattgattggcccagtaagagggtggagaaaccgagagatggagagacgggcagaaagagagaggttgattgaagctcaaactcaggctctgacccaggcgtcggaggaagtggatgaagcggagattgttaaatctcctgaacgatcggatcaagtttctggagaagtggaaagtgctacggaggctgacgatgagcaagaaaacaaagagttgggtgttgaggatgaggttgaggtcgaaatggaaaccgctgctgatgtgcaaccgcaacaaatatcgccgcgtccggagcgcaatttgagcccgatcaaacctgttacgaaggtcttctcaggaagttcgcaagacgaggaggaagacaagatggatgtcgacgaacctgttggtcaaggactagctcacgaatctgttcgtgaatctccttcaacaacggtatcttctccttcgaaacctctttttgcaacaatcaacccctcgccggtagccgggccgccatcgtcgacatctcttctcaataccgcgcaatcaaaacatccacactcagagtcttctcaacgacacagttctccaacaaaatcttctcgctctctccctgcttcatctcctgcaatcatcaaacctagaaggtctgcatcagacgtggaaccaactgctgatgaagatgctggcaatttttcagatgcctcaactttgaccgagcccctctccaattatgactcagattccgcgtcggatgatgcaggaacatactcgtctccttcctcaatcatcgagtccgactcagaagaagatgatggagacgaagacgaggaagagacacaggagggaaggccccgaccaggtgtagcgcatacatccaaagcagtactttactcatctgatgaactttcttctcctggtcctccgtcatctcctacaacctctcccccggccctatcagcgcctatgacacctttgaaattggctcctgttggccgtagacgatttccaacacgcgttgaatcagaatcaccgtctagttctccgcctgacactaacaagacgtccgttgaggggaaggttggcgacgagggaggtagtaatagtgccaacagtatacaaagcaagaaagagaaggacgaggacgactcgatgtcgtctcatccatcactgtcctctatagccttgcaatcgccgccaccacaaactacaacgacgacggtcatgcctttcccaccgtctccaccacccgctcacctcgatccctggatctcactctcccttgtcgatgacgtgaatagatccgctgaaaaagctatcccgactggtcctcgatcgctcgtaggtccgccacacctaacgtccgcaaaggattctacacctcttttaccaccttccccttcgcctcctccgaaagaaccgacaccaccgccaccaaaacctcccacgccgccgccagtcaaacggatgagcttgaaggattggagtaagagaaagaaagcagctgcgcctctgcctgtcacggatagaacggtagatgccgatgaaagcacacatgatctttatcagttagtgtcttctctcttaagtgcctcaatgtttggacaaatcatttattaatactcaatcgatattttcgactgcttcttcttgtctagacctcaacagccgcattcttctagcccaaagaagacaagtgaatcgatttccgtctcacagttacctgtctcagcatcttccctcgatacaccagacgatcttatttaccctcctagttcaccagatgagaattctgttgctatcaacgctcgtgtcggggctgtcaaggatgctagtcgtcctcctaccccttcatcggaagatgaacctatccctggattcactcctcgacaatccagagttcaacaatcaagtctgacttcgatgaacgttgaatatactaaaatgccacctccgtcaccatttttggctacctcttctgaaatcaagacgcaaaattcatcaaatgaacctccctcgaccgtctttaccgatccactgatgtctcagaagatggaaacatcctgttccttgccaaatgcttggcaacatcgtaaacacgaatcggtcgatgttgaattcaccgaacaccgatctatcacgcctccaccttccatgatgctgttatcatctccaaggacgcgtcagtcctcaatgactcacatgtcggacccctatgctcgatcgccttctcctacaggtacaacatcacctagcacaactcctcctttaccatatcgacagttaatcagtactcctagatctagtgatccgccaaaaggaccagcatctagcacgtctcgagtcgcaggagtcttaccagttcgaaggcctgagagtagtattcctacggggccacttaagtcgcttccacctcttcctccaagcttaccagcgaaaccaacagctgtccgaccaacccattctcctactcgaccccgattcagtacaatggatcgagaggagccatcgcatcatatcgaacgagatcgagaggtggaagaacgcgaacgagagcgagaacgtgaacctgagcgaaatatcgttcgtgaacaacggtcgtcaataaccttgaaggaatcaccagtcttgtcgactgtccctctggttcggccacctttccatccttctcacgttcgtcctttcggacctggcgctttcagaggccgaggagctctcgccggcgtgccgtctggacctagaacaacttggactccccctcgtgggccccgagggatgggcggtcctttcagaggtggtggaatgggaggtagaggaatcagtagtatgccggcgtcgggaatagcacctagggcaccaaggatgatggtacctgctggagaagaaagggagaggattgatactaggttgccaccaccaacaagatcggagggaagggacatctcggagagtccgagaggtgcgttcagaggaagaggagggctgttcagagggagagctagataaagtatggtctgtcgcttgatttggttaaactttgatctatcaactcatctgcttttcaataaccaatcattcaatctctctcgtcattcaaaactttttctctatctatctttcgggtatgattagcacaattcgatgtcggttagcgttctgcacatgttgtgctaattttctttttcttctttagatcacgttctcgaattgatatgatgttgtatgactagcagactcaacgacttatccatcgttttatctgacaggtttcaatcgaatcgtcacgtaatgattgtgatatcaaagagcccagaaattcagtaatgcatatgaggtgaactaaaacgtgtgcaaaaacaaagaaagtagataggggacgcagcggaggacgaaaaataaagtacaatcaaataattcagcgttcagagcttccaacgtctcgaatgagtggtccctccatccactttgcgaggtcctatcaaactttctgaatccgatgaagaggcgtctcccggcgcggagttgacgacaaccagttttttgccatcagattgtgcgggataatcttgaactgaaggagctgattgagcgtaagacctttttgatgttgttgtcgtcaaagtcgccgcctgaggaagaggggaggaaggagtaggaatggttgatgccataggatttggcgctataccagtacttgttggaaggatgggcgaccgatagcctggacctcgcctgttcaatataggagaggcgagcgagacttcagtcatgtctccctcgccagccctattccattgtccaacagtcgatttatgtgatacctggtcagatagatgagaatcgagcccgttccgctcctcgtcgtggatccaaaattgctcttgttgacgccgtcttcgctgattcttggaaaagaagcaccaagagagtgaacttccaacaagagtcaatatgatgaataccaggagacatccaagtagtatcgcgggaacatttggttgctctggcgaggtcccgttgcgggacatatctgtcgagggaatatctgaagtcaatgatattgattgggaagaccggctcaaagaggctgtagaggcaatgcggtagagaccatggtcggaggtggaagatattgacgcctttgaagaaacactagagacggaagagcttgtagtagccaggctggatctggatgttgttgtcttcgcaatgcttgtcatcgtcgttgtatcggagagtggtgagactgtagatgactgcactggctgaacttcggttgatgaggtgattgtgggaagcagaggcggagcgccaagattagacatggcaaatgtgatccgaggaagatctttcctggttggcacgtcctgctctatctcttggaacagagtcaaatgagcattcacgtcaggacggaaaggatcgggtttcatcgttggcatgttcttgaaatcggtcggcgcgaaaccagtcgacaccgagggaagaattctattaatgacgcgtaaattgagagccatgttgaggagaggactaaaaaagggatttcgactaagaaaaacttagttcagatttcggtgcaatgagcagaaatcatgagcagaatgatcacagactcactcaacgaaattagagatgcacctggcactcttatactgcagctcggcaagaattattagaggaaacgaaaggcaagaggcacaaaggtcgaagagagattcatagaaatcctcgtcatattccgcacttgcagctgttttataggatgaagtcgcaaacgggaaggtcaactggacaccgtaagggttaaagcgggtagatttcaaggtcaacacgatgctgccagcggaaacaacgcataggcatacatatctcacacgcggactagccaggtattaagctagtcgaatagtcagatagttagccagttagtgtctcaaaaggaagctctgaatgttgttgtcgactagacgtagtcgacggtcacttatggcacgtagaggtttggaaggcgttgaccgtcatcctctatatatatattctgacattcgacaaccatctacgatagcagccatgtaagtgtcaagactcctatcaatccttctcatactcgtaccaataatttgttccctcaacagggctccgaaagggaaaggccgagtgtccaaaacaggctcaaacacgccacggtcttcattagcaccagctgatccgactcagccaactattgctgtaagttgtaatattcgtgatctactcttagttcttatatctcatcagctcataaaagtttcggtgtcaatgatctcagtccgttgtggactcgctatccttcttttatactcccagaccattcaagaatccagactggcagaagaaaaaagatgcgaaaccccgagcgaggaatctgaagcagatgatggtagctgaaagagaaagaatgccgcgtcacatcctgccatctggtgagaagggagaagttttggggtgtgagtgttttcaatcattgatcatggaagttttctcagacgggagcgaagaaagatgtgtgcttataacaaaccgaccgtgtgtttgtatggtgattctggcagatacgactctgcatcctccaccatcgttgctaccgcccaaaaagtactgtgacatcaccgggctcgaagcaccctacacggatccgaaaacagcgctccaatatcattcaaaggaggtgtacgagatcattaagacccttgtacgttccgaagtcgacgcttatatctaatttgttcatctacatgtaactgattctgtccactttatacatagccaagaggagcggaccagcagtatttggaaattcgtggcaaaaatgttatcatcaagtagacactttatcgggaagtctgtattttgtttcatccatatatcttgcctctgtgcttctttgtaccatgtatacctatcaaccccctcgacgagacttgaccgttttgtccacgagtcaccataaattcagtatttcaacggatgcgaatctgattggccacatagagtggacgaacatatgaatgacatgagtatatgaagatatattgcgaatgtatagtgggtttgaatggatgcatgcatgcgactgttgctacagaagaatatgataaagccgatgtgtagaaacaaatgaaaccccaaatttactggaggggagatacaagtgggaagcgacgattgatattcaattcgctataaccaaagtggatttttctacaaaagagagatggttttaagaagcaatgccgagatgcgctgaactacgaaacaacgctcaatgtgttgaagaacgtcaactctcgcatcgtccgttcgttgatgaccaactcagccctgttctttagtcgagcgattacatcccaacagaatattgtataattgtttccagccgctgtgccttgcattttctgaacgaaggaatggcacaagatatatataatacggtagcatgagcgatacattttcattattgccacaggttgaaatgctgaataaagacgtacggtaacatgatcggccatcgagagaagcatgtctctgacacaagacatcaaataagattttctttgaaggagagaggtatttccaaacgcgttccgggacagttcgatatgtaaattcctgaagatctctattgcatcgaaagaagcggagaatgagttagttaaagactttcaggcagagagattcgaaagatttaatgtgaatgtaccattcaatatgtcgagccgctgtgcttggagtttttcggaatcaaattcgaaaatcccatgttcgtttcgctcaattgggagctgaaagaagattatatcatccagtttatccatctggaatagaagagatgtataatgaggttcgactgtgaatgttgaagcgggcgctacgatagactggaaccaaaccgagaggaagtgttctttgaggtgctggaaagtaggaaaagtatgcatatcagatagctttctacaggatgcatccctattgatatacttacttcataagaagaaggattcaactgtgcaaggttccacataaaccgaagaccgatttgccgcttggtggccgattcgctaaatcgtttccaagactctgtccccaattccacataactagaccaatcctatatgacacaaggagaaatagaaaatatgagtacttttggtctgataagacgaaacagatcaatgacagaccttcaacccatgctgaacaagtacgctagcacaaccagaccaacaatctaccaactgagccacatagctatctctcgctctcgaatcttcctctctcgaaacttcggatcctctttcgccaacgagttggacccaagcctgatcatcaacgaccatattggagagaagcttatagatagcaggagagacgatttggttcacagttgatgcaaatttttcgtccatagtttcctcactacgcgcaacagtagcctctgaggattcgccaaacttttttgcagaaggtccatcgagcagaagaagtagggttggatcgttcatgtcgatgtctgcaaactcagccccgaactcatcctgagagtctcccgctggattcggtggaggtgtatgaagatatgagagcgcagatcgacgggcgtcgaggaatgcctgaacacaacgaaggacttccaggcctgtcagaggttccaatgctagaggagaggccaaaataccctctgtccaagctgataaagacaagttatataaaatatcagtctgatgaaatataaagaaagggcaagtcgacaatgaagttataacactcacatttgtgaagcaacacgggatcaggatatggtgttttggaatgacctgttctattttgaatactgattatcggtgaagatatgatgtgtcggacagatcccaaaatcaacgaaagacaaaaaataagctcgtgtttcggagctgtgggactgcctagccgtacaactcctggcggtcgatctatgattgacagctcttgaagaagaacatcggccaaatcacctagccaatgtgcgacgctttgcaatgagagattgagatgacggtgaagcactgccatgtacatcatagccctgatgcagatcttacgagacttaaagtccgctacctcgaaagcaagataattgcgcatctgtcgcaaagaatgaacagcagtagcttcagcaggatcgagaaggacggagacaatcgagaaactgtagcgattgatcagcgttgacagctcacgcatgcttggaggacatgaccgagtgaatgaaactttgcccatgggcgcagaaatcgcaagaagtctagagatttctctctcggcctgttttgtggtgagctcgccctgtgaactagatttttgagtgtcacggaccgccaacgcaatgattttgatgaaaacatgaaaggcggagtcaacacttggatccacttcggaaatgagcgaacgattggattcccggatgaaaagtgggaaatccgaaacaatggggtccgaaaataggttgagaaactttcgtgttttgaaaactttctgaccaagttggccaagaatcggatcctttgcgttcaatggccatccccatcgaacgccgagaaggtaacaacgacttagaacagtccacacatatttgtcgcgcttttttaaattagaagaggaagcctcggcatcatatgtggagtcagcctccaacttgaccgatagaacggcctcggacacgagtggccagtacgcaagaatgaaaggggtatcctcggtgatccctcgccggttgaactgtgagatacaacagaccccttgaatgacataccaaatcttctcagcggctagcaagccagaagatattattccagtagcttgtaagccagcctttacagcgatccagaaggaaggaccttggggaaaatcgagatccatatacggacagaggtgaataagagaagcccatagctcgatagttaagtcctgaacatcaggacgatattcgttcgcgcctgtcaacgaagaggatgcagtcttgaccgatctaatggttcgactgaagtcatattccaataagcgacggacgaggattgaacacagactttgctgagaatctcgaatttgctctatcaatataggagaagaaagcgcaaatcgggtggccagctccagaagaaaccagtgcagtcggaagaagagtccgcttcggatatgtttcagggaggtgggagtcgtcatcgtttccaatcgttcaagaagagactctattccatccataatagcggggaagaaaatgtccacatattcatcatccgatcggcgatgcatcacgaataaacaggtgaagcgcatagctcgttcgcatgttaactgtaccttcgtttgggcgtcaatatcatcgtggttggccaattgagagtccggatcgaccgcgtcatacaagcggttaacaatgagtccaaatgcctccgagaacagagagaggggcatatcagccgtaagctctagatcgaacgcggagcatggaggaggagcaagtatagattttgaggattgaccctcttgatggagatagaaaatttgacagaggtcaagaagttcagacagatagccctgacgagaataagaaagtgaaggaaaagccagtccagccggaagtggtgtgatgccgaagtccgtcgagaatccagcgtaagtatcccacaagactcggggacctggcgaggcggcttttggcgaagactgcccatcaccgcgatctactgtcggaaactcaaatggcaccgaacttgcagatgaatggcgagcaaagactcgatgagaagtaggtgtatgaacgggagaatcatttccttgtcccactagtcctggcgataggggccgtactactataggcggatttggtctgtgaggttggggagaaccacgagcatgcacggcagggacaacccgaatacccgctcgacgagtctttctacgcaagagagactctccggtaggcccagctggtctaggagggggctggaagtcgccgaaaatactatcatcgtccagaaagacttgcgtgggccgaatctttcgacgagctgccggtcgggatgctttcttccttgacttagtcttgttgagtgcggctcgaggcggatccgtccgtttgatattagaatggtttaatcttgaaagatggggttgagcgcttagacgttgtgctcgttctgcgctatttcttgagcgtacggccgttcgactcagctgtcgatccaccacactctccgcttgtttgctcggcatgccgatccatcgcctgatatcgtttgaggcaaattcgaccgcttcgtctgaaaaataccctgccctatcctcatcttcatcaaggtttgattcttcgtcatccgtctccggaagcagctcaccacttgtcccatatatggcattgaccaaggctggatctacaacatctcgattaagtatcacatctagttgtcgatgtcgaacttgttcaacaaccatcggagcttgttcctcttctgccgatgattcagaatccccctcaatcacaaacggtcgtttggtcgctccgacagttcgacgaacgacagattgtccagctcgaagagggccctctggtatttttgctacatgtcgggccgctcttttgagcgcctttcgatcagccttatcctttgccaaatattgaagatgcttcttggcgagcacagcaggcatcatccggtttaggatcttttgtttcttgcgttcgaggatcattgtggtagcctcctgagacgatgaagaggatgatgaggaagacaaggttttgctctcatcgtcatccaagtgcgaatcggaatgagactcagaatcagaagtcaggttcgagtctgcatcagatgcttccaagactcgtcgattccgtctacttgtaaatcgtatggatctacgtggtgccgtcagagaaggggaagcagtcctatcttcttgcgcgtgcgaagcatcgatcccaaaggctgtaaaatcaaaattctggctttcttcagggttcaatatcgtgttcgaagcgtgcattgcacggagattgggatttccacctggagtaatttgacctgtaaggtgggatcgatgcatgggggtcctctcccttactttccgacgagcataagtccgtttcgatttgctcgttccgccgaactagagaagattatacatatatttagaaccccttccacctctctttcatttgattagatcgacaagcagcaagagaaactcacgagagcggttttttctttccttttgacaactctgttatcatcggcatcttcatcctctgtatcgccttgtttgcgctctccatcttcagtttcagccgtctgctcttcccttctatctacttctccaacaccgggcgtccatgtttcttctcccacttccaacatatctaacaggtcatctccttcttcctcaagccatcctcctaaagaatcctttccgttcatgtccttatctttgtttttcctcgagattttgtccttccggagctgatcggcctcatcctcttttccaagtaacgcatccttgaaaccacgcattgccaagcgctgcttgtatgccaacctctcccgagtgtacggctgaagctgaagactggttctctgacgaaggttgcgcttccctggtggttcatcggtggtgtttgcgaggaaagcggccacttctgcatcggtcatcgctggagccagaagtttgttagatgaaccaacaggagaagatgggccagcagaagtggattcgatgatgggaggagattgagatggaagcaagattgaacctgaatctggagccgatggatcaagatcggctgtatgaattgcgctgagagttgagagtggctcgattgaggttggttgatccgtcacatccgatttagatatatttatactagattgagagaggatcgagctcccatccgattcttcattaaggattgataatgagggcgttaagctgggtatgtgaaaggatttttgggtatgtgctagctcggtgggtattgatggacaacgttgtatatgtgggtcctctgttgtagaagataccgtgagtttagatacaatcggggtcggacttgatgggttgatcgatgcaaatttggagggtgatgattcaggacctgcttgaagatttgtctgaattccattcacgacaagagggatagtcttgcggcagcaaaacaatatggcgagagattaggtcagaataaatccttatatacagcttgacaacgcttaaaagcttacacctgtcttgtctttgactggtccatcaggcttcaatggcactgacaaagagtcaatagctactgacggcgaaggcattgatgatgatggcttctttgccgccacaagattcttatgatcgaccagaagggattcgtctatcgtgaccttggttaagtctgggataaatagattggaggtagaaggcaatcctgatgggaaaattatcgaagcgctcggaggagtaggtctaggtgcggtgataggagataaggacaaaacgtcggagaacattggtccaactacctcattctcaaaccattccaggtcatgtgccggtggcagagaatgagtgggagagaacataaatgattgaagcaggtcatgacgggaaatcccaccaggctgttgatttgaaacgagagctcgattcttaggtgagggtggaagaggctatattttattcaaccattcccagacatcagcgccaccagaggttttcaatcagatctatctagttcaagcacaagaaacgagaagagtccactgacctcgagttctatcatcacagattgttcgtaatctcccattagagattttgtgtcttgttcaacatcctcccttcgatagagagcgtttttccaatatgtgctgttccatgtagacttcgtcaaaataccctcttgttcttcctcgtggtccgatgtaggaactggggataaatccagatcacaaagggcaagttctggcgattcattgccttttttcttttggaataaggatggactgctgattgagataccatctggtacaggatttggaagagaggaaggtgaagcgaaaggagacaaagatgacgaaagcgagatatcaggttcgtcattgtcctggtttgggcgcgtaacggaagaagaaagacctgatgttagttccgaaagagaaggggcaattctccttcgttttagtggtgattctcctttgatagttgagcgaaaatatgctccgctatggccaatgatctgctgatttgttgtaatgagtggtctggcagatgagagggaatcaagagggacctcttcgttcaaggacagtgtgtccagtgcaagctcattgcttgcctcaccagacgattgagagaccatgtttgaaccaaattcttcccgaacctggagatgatctctcggtgaacgtatgtatgtgtgcgggtgcgtgtggagttgtacgaatgggtgtatgtatgttgctaagacgaggtgctcatcctaaatgagaggcccgttgatcgagacgcgttgggaaacgcgtcatccagacgcgttgggtcacgtgctttataatcacgtgcctatcttcttttcgcactcttgacgcaatcgttcccaactcccaacattttcttcgcaactccaacaatcctacacgagttataccaacaccaccatcatcatgtctgccgttccaccagaggcgcttcgttcgaagcttgagtctggactcgtctctttcaagcatgctgtgaatcgttttactcaaaactcgtcttcaagcttcgtggccattactgactgacgtgctctgcttctctccttctctgcctcgtttcacgttacggacacctttctgatcgacaggacattattgattcttcgtccggatgtggaatgagctactctatcgtcgttgtcgctgatgactttgaaggactcaacacgctcaaacgaaaccgacttggttggtagatctctttcctcttcctttcctctcatgtctatttcgttcggatgagtccttgatgatcagcttaatggaacgcatcggctgacgtgaggtatgtctatcggttatgttctctggctggttcagtgaactcaatattagcagaagaaattgctcagcttcatgctttctcccaagtaaatatcctctttttttgcctcattgtctgaatcgtttgcctgacaaagaaccttctcgccatgaacggttggaacgacagaaaacgttgacgtccgctcaatatcttgctcaagggggaaagatcgccgcaaatccttgaagaagtcctcgaactttcaacatatcgttctttccatactctgcatcgttcagcttaaatccatatccaagccttacttatagtccctcagggctatatatcttcttctctttttcttctgatttctcctagttctgcatcgagcgttgacttcgtacgtcgtccttacgcacatatttcgcaaatgtttctttctattcttccttgcgctgagatgattagatacgcaatcggcatctcttttgttttctatggctgccgcttatcagattacaacatatcggcttaaaccctctttatgaatactcgtacagttacccaaagatgataaggacacccgtcatataattgagacctaacgaagtcaatgagaaacaggagtgcgagcgtcagagagcagacgaagaaatactcgaccaccaagcgttatagttgggagatttgtcgataaaccaaaagatattgaaacatgatgaaagaactatagaggatagggaggaacgggaacacatgaggtaaactaccgacccgaataatttctacaacaataagacatatttaaaagaaaaaaaaaacagaagaataactttcaatccaggaaagctctctatgcattatgttgtatattcaccaagcaaccaaacacacaacaacggagaagggcagatcgatctatatacatcaaggaaacaaagatgggattcagagcacgcagcgctcctccctcaatttatatcagtttcctcagaggcttctcaccaaggaaaaacgagctcttctttgctccagcagttttcattattcaccagcctgaggcctgtttgtgagcggagatatgtgatagagacgttggcggcatcaccgtacgttcttgaacgtattggtcaggcgctggtcgaggaagcgcggtttgaacggctgtaagaaactcaaccacatttggctgattgatgccgttctttgggtagggaggaagaggtaatggatactgctgtgccaagaatagatctcgttggacggcctgaacagagtgaaagtcgaaattcttcgcgtggctcttggtcgatacaggtcgaacagagtagattggcaaacctctcggctgtacagaatcaaacttgctttgagtgaatccgtccagttctccgtggtctgaatcagtcaaggaggaagcggttgatgcagaggaggataaagtaggcggagggagctgagtgttcgcgttgcgatagacgaaaccgagaccgagctgaagaggcgggcaaggacgaggaccgtgggagtcggggttgtatctcaaattatactcgaacgaagagttgctgaagatatcctcgagtacaggaagctctgaggtcagatctacgcttgcagagcggtttctcagcacgacaggtttggtaggctctcgtgagaccttgataaatgttgacaaccgagtcaatcattccgaaagatataacagtgacacgataagacaaactcacaggtcctagcttaggacgagcatccccaataataccaactggatcggaagagcgacgcaggactatatgctgattagagtcatcctgtttgccaaggaatgaggctaggatgcttcccaacatggattgtgggggtcgctgttcgaaagaagaagagctgatagtaggaacgataggcaagggttcgttcgtcgattcgcccttcattgtgtatgccctcagactttccccttctttggtgtagacaagcacagctgaaggtgttttgtctagctcggctcgagaatcggagatgcagtcttgtgtagagaaatccgatctaaccctggagtttgtagaggaaatagcagaactaccgagatcgaggatttccataggttgtgaatccttgacgcggagtgcacggatgacgagagctgtcatggcggttgtgagctcgcgagtgacggttgaatggatcttgaggaggaagggaccccagatacagagatattcagtattcggatacgcaacagagaacctaggtatacttaccgtcattcggacgaggtttgtcaatccagcggcactgaagatggcaaatgaagttttcaggatgagctaaatccggatcaaaggatagagaatgagaaagtgatgaatacttgccctcgggtaaaatcaccctcaacctcgggcctatttggatcgacaatgtttgacgattttcccagctgaacgtatcgattcggttgcctgcggtcacaatagagttgattcgatggttgaatatgcaggcgagcagaaagcgatagatagtgagatcgcttaccggagacggaactcttttctacactggagaagagaacacaatggtggaaggatgtcaactacagttgtgaacaataaggcaaagaacggtagaaccaactcctggaattatgcccatctcaaggataagaccaccgagcgaaagtctcttttctatctcggcgggtgtttcttctactgaggacgcttctcgatccgttaaaacctccgcagggctgagaaggcgaagagaggtcacgccgtccagaggaatgaccatctcgtgccgggcatcgtcgaggaggagacagatggacggtggtgagcgtagacgaagccgaaactacgagagaagaggggagaagggagaaaatggaatgggttgtggagagggccctgtcaggcacccggctgtatgcgacagattccaaagagatgaaagaatcgacggaccttgagagaacctctggactggctaccttgccaaagcaagggatttccaagttctggagggttctcgttctgtcctgttgatggcagctgatagagagcggcgtgctgaagatgctatgagagggaaatcgatcaagaggaaccatatatatgtgtgtgtgtgtgtgtgagagaaatgaaaagaaaaaaaaccgaaacgacgcgcaagactggaacgcaccagatcaaagacgactttgtgtcttggctggctcctcttcggtggctgtctgggtggtgtctgtagaaattgagccatgtctatcagagagaagggagagaagcgaaaaggagagtggaggatggatcgaatgaagagagagaggaaagaagagaagagagaaggcaaagaagaatgacagtctccgactctttatgtggacaggtggtacagagagacaaggatatgttaaagggacagaaaaaggacgtcagggccgagccagggccatcttttcaggaacggttagagaacgacctgaaatcaggacagcatgtcagttgaatagaccaagttacgatgatcaagttggtgattgatctaaggctcaaccatcagaagcagacaggtaggagagtgagagaatgtgtgtgagtgtgactgagtgattgagtgattgagtgattgagtgattgagtgaatgagtgaatgagtgaatgaatggttcgagatcctatctgaacaaaggtagttcaaaggcaacccatgcacaccatgaacaccatcaacaacaaacaaagcggatgtgcagtcaagtcagtctttttgattgccaggtcgaagtgaatggctctttgatggactgagcagtgtgattgaactctaaccgtcggccctgtccgtaagaagatcgcctgccgacgggtaatcatagcctgggatgttagggttgcgatcaatatcacgtgtgccaatataacacagcctccacccattatataatcgcacctctccttcgcaatgcttcggctaatctcacccgcaactggaccaactccatcctatttttgacctctcgttctatccgttctatctctcctacatccgtctagcttgcatttgttttcttcttcttgcctatcttcctcttcccgataccaatcgctccaccgcatgacagagaatttaccagccttatcgttattggatgaagaatctcggtcttcaattactcatcacctggtcaaacataagaactcccagttcaggtccgcgtccagaaaggcaaagaagcatgcccataaattcggtcgatcgaacagcccatcctcccaccggaatgctgtatcatcagacactccactcgatgtactcgagccgttgacagagcggaacagcatggaggatctgccctgggatcctacagcggcccaactcaacggaaatcccacggatggcaggcccgacgctgaatcttggggcggccaggtctcacttgcagtaagaagggcccggaacaagatatctagacatggttcaactgaaggagctgataatcttgacagatcagacagcctgttgacgtatcgaccaggtgctagtacttcccatcgttcaaactcttttctaggcagcaaagatcggcctcagcgcgtacgtcgtcaccaccaccaccacaaaacacctctcgttaaccaacatcacacatatcatcatccacttcatcgctttcgcccgggcgaaagcagatcatggggtggccaggaagaggatgtgttagtcgaagaacgagactgtgattctcccagagctccgccctcattgacctttctcgagagcttagcctcgacagtcaccgacacatttaccgctccaaacacacgttcaccttctcctattcaccggccatattccgaccggcatcggctctttcctcaccgatcatcgtccacaccaccttccaagtcatcactagcagagaatccgttcgaaccgccagccgattttttcagaattctgccacccacccccagtgttcataacctctctcgttcgtcttcccttggtaatggctcgccttgccatgattatctaccagggacaacccattcctcctcttctactccctctcctccctccattccctctggtatcccgagcgccaactcttctccactgtcgccaccatccgatttgtacacatcccttcttccctctcctctgcgctcgcctggctcgctttctcccaatgcagcacatcgccggcttcctcgggttatcactgatcagcactgtgttgattccactctttcttcgtccccggtggccatgtcggcgaacaatgagtatccgtttcttcccaccattaccgcgatcaagaaaactccctcggcttcgtccgccgcttcaccttttctcccggcgatcaccgatcggccgctcttctccagacctgcctccttccttagtcgcaccacttcggcggacgacgcatccggaaaatcgtggactgagagcgatcgggaggatcacctccatcgagagactagcaaccaaagcgcagagtctgcctcgctcgctccattcccttcgtctggtgatctagctctcacccgatcaggcagacttgctgagcatgccgctcgcaagctaaagtctctacgtaaaagcacaaacacctcaaaaattgacagacttctttgcgaagcaggtcagactattgacgttgaggaaggcaatgtcgtttgggttcgtctgtgggagaatcagagagggttagtcgatcttatcactttgtcgctgttgattttcgaactcgtttcttacccctttctctctatttctctcctttgaacatatccgcagtattctcttttttggaacgcccagattttctgccaacatcctctttccactcgatcctgcgcctttcaccagaccgggaaacaccaaacaagagtgtcagactccatataacttgaagacgtatcaagttcgtccctccctttctgttcttatctgtttgcgcactctatgagaattcttagttgatgtgtaaacacttcatatttacagctcccggatgggacttggaaatgggcttcagaatggatggtcaacatgaaacgagacggagagactgatgagaaaggatgtacgtgcctttttctgtgtctcgattacttacattccatcacttgatgctttactttctggttaacctactttttttttccttataggggagtacaactccatcttccagccccatggatggcattgctcactaccttggcatggatggaaaggctgggtccgtcgacgagaatggtttgtcctttctcaatttttactcttgattcattcttcttgctggagttgatcttggccatgcttgtcaaccttcaaatttaggattcgacttcgagtgaagccgaacccttgcaaacagattgaagccctccctgccgccaccaacgttttccaaaacgacaacaaatggtcagactctcccttctctcctatagataatacccgaacactcgccgcccgtactcgcactcccacatgggccggcattcactttcagctcgatgaggccgtcaaaacgcttgctagtagaagggttgatcgagaacggctcgaggttttggctgaatggttggagggtggcgatcggatcggtggattgagatgggtcattgaacacaaggtaaatcttatctcttattcttgactttcttttttttctgctatttatgatcttcacttactcattacttttatgtgccttctttctaatcgttcaaagcttcccgaacttcttcgtgtgttcacatttgaatcataccgatcccaagcgatcgatctcgtccgtcggatccaacctcgctggacgttcaccctcatagaccctgtccgatcggaatcaatgacagattctgacgaacctgatcttcaagtaagacaaacgagtaatggaagttctatcgggttggtcgtccctcgtttttaatccgtaggtttactctgatcgtttcttccctatatttgagattctttttgttcctcgaccttttctacccttattcttagttcacgttcatctctttgtgttcctcactttggaaggttcatgccatcgcacaactcctttgtatcatctctataagaacgtaatccttgcttgccactccatataccttcctgactgcccctccttcatcggatatgtttctctaacccgagagggtcgcctgggtttcttgcctttcgtacgcacacgcctacaatatttacataccctttggtttcggttgtaccttctatcgtcatatccctcttacttttgcttttgctttactttcgcatcatgttcaacgggcgaccagtccttttctagtcactacactttcggttatatatttaagcattgcgatgatggaaaaatttcatccatctgaattaagaagggaaagaaaaatagagagaagaacacctatatctcctctccaaagtatgccccactcagcgggccaaccaagccttcgatgactttcagtaaccctctcgcgctagcttccactccttcgtcctcatcctcgaccagttctgcaacaaagtcagacaccgtatggggcacaaactccaacatctcgtctccactcttttcccaaacggccttgacaatctgcagaccaagcgatctgatctcggcgatatccgatcgagaatggagaaggagagtatggttcaacgatttgagcaacgacggcgaggtcgtggcagccgaaagagacgccatcgtcttggcgtacacggccacggccgactcagaatcgaacgtgtaggcaacaggaagttgagaaaccaggataggagtcaatttgctgagaagctcgtccgtccagtatgctagaagtttacataaaattacaacaacccgggttagtagactcttcatataaagatcgagtactgggttgatttttgacacttactgccttcgtcacattctaaagactctccgaacacagctaggacctctttccaaagctgaacgttcgtgatgtctttcttggcgtatgattgcagcaaagccatcgaatggtccaagatcaaagccatgtacgggttgatgatggactacacagtcgtcataagttcgagaaagtgtgagtctcaacagttcatccaatgtcaaagcgtgcgagacagagagagaaatcgacatactttgaactttctcaaaaggtggaacatgatactgaatagtgtagtgcgtcgagcggtgacatgctcatctttcaagccagctatgatgaacagcgtaagcagaatttagtaaaccaactttgaccgatatcctcataaattgaataaatacttactggcttcatctccaaccaactcgacaactgcccaatcatagattctcacgaacagaggtcggaaagatgcttcactgagtttgacaacgacctcaaggaaggcattgatcacctggacctcaacgacatggacttcctcagaggacagagtgttcttcaaagtccatcgggagtcaaacgcagaaaggaagaaactgaataaactcttgagcaagccggtcaagacctcccggtttgcgtttcggataactcttcggagaagatcaagaatagcggccaggggctgttgtcaaaacccaatttaaagcaccgttgttaataatgtctatcatgagggcactataacgaaatattacccacaagtgcagatgatttgtcgacctcctcccagaatttgaagatggcaggcaaagtggacttagccggtaccgtcttggcaatagcattgagcagaccctgaattggctcaaatctgcccgaaactgccgtgttatcgccgagaagactaggcctcaagatagtggccagcaggtctcggagttgacctccgacaaaagtcgggaccgaggatatcaaagcagagagagattcaagaatagcagggaacagagtgtcccggaactgttctagtttttgaactccagccctaagattttgatcaatgatttcggtcgagaagacaatgatgggcttgatgtaaggaatcagtcggggtccgatccgtctgttgatgactgccaaaacagaaaagatcttcgtctgaacattagcagagttttgggatcgttttcctcgggcgataagagtgcccacagcttgggctaggctaggatcctcaagaggagtagcggtggaggcaattgctttaatggtctcaagcacttggcaaaggtcggactcaatctcgtccgactcaacaatcttcagactggaagcgagcgcagtaatcaatgcaggagaaatgtctttccgggccttggtcttcattccgggaagtcggttggtaagagcagcgcaagctccgagctgggcctgaaagtgcgaacatgtggtgagttgttgagatagataaaagctgagatacatgtgcactcacatggagatcatcactctcgaacaacggtgtgagagcttcagcaaaggccaagacggatagatttcggacagccgaatccagagcaagttggctggtcgagactaaatcactattgccattctcacgaatctgtcttgaagcaatcgcctgaatttcgagaagacctccgacggtagctttgacgacaggattcaaagatacatcaccagccacagcgatgatagaaggagagttggaagcgaagtgaacgaaagataacagagcaagaactcgtcgtcgctcgattttggtggcgtcggtgacatcagtgaacctgtagttacgaaattactcagcctatgaaacatgcgttaaaaatggaacacttcacactcacggtttggcagcctgggtcaatagagcttcctctggggttcgtagaagattctttatctcattcacgatatcgttcaagccctaaaatgcaggaggacaagataggagatattgagaccaccaccccgatatgtggctgaaattgtattcaatgactcacttcatatcgtgtggccacatcaaagctctcaaaaaccgccaaagggaaagtaaatgtcgatgcctcagtagttcggatcttcgatttgaaagccacgtggtctagcaacaacatggtcacagctcccaagaaatcggagggtcccaaaacttttattaaagtcgagaacaatctgaaatttgaaaaacacatatgtgcattacatcaaaaagtgcatccagagaaaagtttttttttaaattagaaaagcactcacctcgtctttcgatgagccggtacgtggttagccatgcccgaaaagacttgcaaaacctccaaacattctgcaagttgaaaggttcgttatttttgttaagtaagccaaaagcagtgagaagagacaaaaaaactgaaactaacgattccaaagcgcagacctgtttgaggtctgggacttgaattggtcaaccatgactggaaggatgctctcaatagtctgcagtaatgaaacaagtttgaatcaggccaagaagtttgcaatctctattttgaaagagtactgaccttctcgacaaccaagaacgtatggtcatcatctcgctggagtgtatgagcaccgacagaaatgaagataggaagagcgttttgcaaaacaacggcaggagagaatcgagcaaagtttgaaacaagaacaagcccttgctgaaaagtctgggggttcttcgagtctgcatatttgatatcagccaagcttgcgcccaactcttaataatactctgaattcgacttaccagagataactctcatcaagacagtctggtcgatttcctgggtcctaggtacagtctatggcaattcacatgaatgtgtgtgagcaaatggatatatttgactaagttgatccaagaacatacatcgatcttggaagatacggcacatagaccggtgagaagcagctgttcggcatagtcgatattgatttccgacttggtttgaatatccatcagagaagcgagcacctcgagaagggcaactaaaagctcgacacttccaggcaaggtgtccaccgatcgagcctccagcgtaatgatgagtccccgatggaaaacattaagtgccttgagttggttcctttggaaatgaaatgagacgccacagttcagcggggtccatgaatattcggagcttgagaacacgtactcgctgtcagttttgtttcgcttggtgcttctgaacacttcggcatcagggcgaaggctgaagactgtggctatgatgacttcaggctctggggcaatatcccgaaggcaaagttttatatccccagtgttggtcttcaaagaaggaattcgttaatacccacaatcatgcgaggtgacagacaatatgaatataacactatcacgacttacagtatcggggtccgcgacctgacgaacgagagtctcaaaaatctctatctgcttgcccacaggaagtaccctgtagagcgaatgttgaagttggaacagagccgacgatgcaacctgtttgcctagttgaacctcaaatcatcaacgaggtcagtattttttaaaaaaaaatcataaaagaatttacagccacgtacttgacttgatgaaatttttgaaggtgttccagtactcaggatggttggggaagagagttacggccgaacgatcgtagctatccataagtagcgcaacaagagatgaagcatccgagtcctcaggagcatcattaagatcggcaaggagaggatgaaggatttggattcggacagaatctctgattgcctgaacggttcgaagtaagaatgcttgtgcagaaacaagctgccacgacgcaacatgagacagaatgtacgaaagaaggcctcgcttgaaactacgattgatattatacatcagcagaaatacttgacactttgtacaatatttgcaaagactcacccagcatcctttttaggttctcccttgaccaaagttaggtagttagtgtgaactgacacaatgtgtgctggatcaatggataatgaaccttgatcattaagtatgatgtcaagataagcccgcaggtccgaaggcttcagaatttggactctttctgttaagatgaagttttttaaacaaaagttcagttgataaattcccgttcgcattcgaaggtggatcaagaagaagaaaggaatgctgaccagagcgagaaccatagatatcgttcaatgcaaacggaactgtagattcgttgccagccgcattcctaataagctccacgcatttcaaagcggcctctctggtaggcttctccagcgatccaagtgcaacaattaaagcgggaatgacggtctggaagtccattgtctccgaacctgaactctggacatgggcctgcaggaatgcctcggcgtgtcgaagtgccgctgtttgaagagcactcgaaaactcagtgactccacccggggtggcggtccagatggaagcgagaaagaggagcgtattgtctcgaagtccagcgaacagatgtcgaagaaatcgggccgataatgaaagaggaagcttagaggagttgacaaggccatagatgaggtaggcgaatctagcgacttgaacagcctcggcgtcctataaaggaaagaaaaggtaatgcttcagctttgtgacattggaacaatcgaacacgaagactaaaacttacccaagaagcagcgtctaaccaacatatcgatgcaatatgagtaaatttgacttcctggatagatccaatcaagattcctcgcactcgaagagttgttttagcagcggaaggtttgagaacgacaaaatcgagggaagagtcttgaatgggctctaaacaagcaaagccatctctgatgcctcgtagtttctcgagggtcaagatggcagcgcttgttgcagatgtgcctttgagcaacttcaagatgaccgataggatgaggtgagagagaactctagagtgaggatctgagtcggccagtttagagagcataaacttgatgtgtgcgtcttgatcttcagactgaatgacgttagctacgtatcggacgagtaaagtgagaaaaagaaataacaaagaaaattcatcgaattagtcaagtcaacaaggaagggtgtcttgagttcaagggtatgtagacgaacctgctattttctgaacaatcagagtgttgagttctgcttgtttttcgtgcttgttttccccttcaatctcagagccttgaacgttctgggctatcccgctcaggacgccaatgttgcccagatctgacgaagccaaggcttcccaagcatatccagatacaacctgctgcgtcttagagatgagcaaatacctgaacaatacccttcgaatgacctcattacccagctcgggatacttagatgcaaaagggccgaccaagaattgaatatgtcgtcggacgatagcctttgagagagaatccaaatccagagctgcacatatggtacttaatatgacctcaggttcggggacggcgctgaagagaacagagggagaagagtagatagcctctagaacgggaagataggtgtcacagagtcgaggcaggaggttttctctcgcagaagatccaagctatggacgatgatagtgagtaagtcgtgtaggcatcagtaacgcagcgaagactgagcatctgacgagtgaagtatacaacgaacctcgtccacgtcgacgacgtctacatccatgtcgctcccagtagaagcgttctttagttctttggccaatcttccgatcagactctggactccgttgagcctattggctgagtccgcactgttgagattgatgaacatatctccaccatgaccatggagagtttttgtctgatattaagattgttatgagtaagaagtttgtactcaagagatgacctagtaagacagtttcgaagcttacctgagccacctgagcgcacaaatcaagcacgtagtttttcttgacttctggaatttgatccaagatttcaacagtatctgtctcccaagtctcagcatatcgctcttttaaaatggcaagcaagttgacccgtgcattttccacttctgaaacttcagatccagcatcagagagaagaagtccacgaatcaagaatgatatcaggtgaagaggaatggaatttcgagcgcaggtcgcgaaagcttgtaacgtagtcatagaggaaggaagatcgagactgtatgataaacccaaaatcagatgcggactcgggtactgaaggcatcttggagcgatgtcagaaaagagacaaacctttggatcaaagaaacgatgataggtcggagggctcgagaagtctcaaattgagaagcgtggtgagccaagatattgccggcatttctgtgttaattgcaaaaagttcagtcgctatgaacaaagaaattagcagctgaaacatactgacgggaggcctcctaatcgttcagcagcgtccttctctattcctcgtagctcttcctgactttgtagaaccccaatgattgaagcaattgcttgctgaatacccttctcacttctgaggaacgcatcgtttgcgttcaaaactgacatcaagaagacatgaatggcctccgggctcaatgtggcttttcgggcagtagcgagaagaacgatgagattgctggatatgcaatcaacatccaaagacgcctttaggccattaactacttcaggaatgataatggtgagctcagtgtcgccaaccagcttgctttggccgccatgagcaaggaaaccgacaagaatggaagcgtggaagttgaccaaagtccggtagagagtcttgttttgaatagcttgagtcaagatagaagatacaaatcgcaagagatctcgcgacttgtcttgatgaagagagaggatgaggtgatgtcgggacaaaggaacgtgagcggtttgaggaccgatcaaaaaagaaaaatgagagttttttcttgaagaaacttcgagtcagttcggtctcttgcttcatacgaatttaaatgtaaatgatactcacgggactttaagaatggatagaatccgaacaaactgagtagagtcatgataaggcaagaaggcggataggacactattgaagttcatttcatgaactctgtattttaaaagtaaaaacgcgtcctcttcatctgtcagccacaggcctctttctccattcacatatctttatgaggaagcatatagaatactcaatcagagcaaaataaacgaaactaacctgaacctcctcaccagccactcgatcacttttgctgcagctcttaggggcaaatgtttcgcaagtttacttaagaaaatgtccaaagtagcaccaagagccacattttcctctttggaaagaaccattcggtcggtgaccttggcagcctctccaaaaaggtcctcctcaaactcaacaagggaaggatccaactctttgagttcttcgaatccattaactcccagtgaatgaatggtctcgaaatcgtgctgagcagcctccgttctggagaagaggtaggaggcctgattagacacctgcttggaaagagaaccgaggcgactggcgtctaacgacgcgatggaagccaattgactggctaaggaagacatcctttaacagatctgttcgttcagaataaaatgcaaaagagatgaataagaaagagatgaaatgccgggttgaatggggtggtgaacggcaaaagagtcggtcaggaaacggtggatgtaataccaaacggatcgaacaattttggcggattgaaattctttgtggctgtgcaaaatatcttgtgcacgtgaatcaactcccgaaattgatggattgaggttccttatatacaatcatgaaaactttcatatttaactctttttctttgagaatctacagtctgacatggtttgaatcgttgaatctagtagtccagacatcaaatatggagtcaagttttgtgagcaacgagtggtgcaattcgccttatttctctatctttgggatctcgtatatacagtagatattttattctctttattctcttctgattctctggatcgattaattttcactttggtgtgaacattcgtttgagggaatcagaatcaggaatcagtttgagacaataagatgcaggataaaaataaatagactcagaggatttgaaaagtaggactttatcgtttaaataactccttcagaaacacaaccaagtcttgggagatccatggtatgttctatgaatgagaaaacacttatctctcagcaaacaaacagtatatgtgaatgctgaggaaaggaaagaaaaataagagaaacgaaacgaaaagagaatgtcgagcgcagatatatgtgaaagaacacaaagcagaacacaggtgcgatgatgagaagatagatgagaacaaacataagaaaagagaagctaaaagacaataagagaaacagccacgatggaagaagatgtctgccaagacgtcgactgagaaagaatgggtcgaagttgaaagagcacaagtgttatgggcgcaggcaaggaggctgagtaggggatgcactcagcgcgctcaggctcttggaaggttcatgcgatattgaaaggaggttaagggcgaggatgactgtacggaactatgaggatttaacgaggttccaagcttgggagagaaaaggggagatagctaacgactacatagtatatatgtcattcgagatatcaagccaaacaaacacaagcaagagcgaagagataccaaggaggagcgaagagatactaaggaagagccaagatataaccacgagagagttaagatgtaacaagagactgttgcaagaatcggtctacattgcgcaaaatcaccctgcgcgggtccaaccgggtcagatcatgacaaacagggtgaagatggatttttcgttctggcacttgttcccaatcaagtcctcactcgtttcccgaaccatatacacaccacccaggtgtttcagtaaaatggattgagaaaccaggaaaacaggaggaaacccgctaaaaaagttatagctcttcggaaagacaggcttgagactccgcgcaaacggaagtcggaaggtgatgcctcaataagagataacaaataacagatgaaattatgtcaagactgctgaaactccaacagtgttgtgtggactgtatgcgcagg

SEQ ID NO: 1122 - DNA, 1008 bp, Xanthophyllomyces dendrorhous
agattcttaagagattaagagtctgagtaatctacgtgctcatcaacaaacatactcatcacaacatgtctaacaacgtcatccagtccgtccagccggacccacctccaccagccgttcccctccatcgggacatccgcaacaccatgttcaacaacatcacccggctagcatctcctcattcacccgacgtcaactacaacatgtgggagcgtcgactggagtcagccctggacgacatgcgtatatgggacgtcgtcatcggcaaacgaactcggccaagcgtcgcctatccaaccgcaaaacaagcatggggcgtcgatgacaaggtcgccaggaacttcatcatctctgttctcgccgactccgaaggcgaacgggtcaccaagtgcaccaccgccaaacaacagctcgatgtgctccgatcggcccatcttaagcgaggcacgactggtgtcctccagctactaagtacactctgggatgctcgcctcgaaaactcgaccgatctccgggccagcatagatagcgtgttccgacaggtcagtctcatccgccagatcaccggagacagcatcaccgtcgacgaactggcaggccttctacttctgcggatgcttccgaagaccatccaaggcgagactctggtatccaacatacaggcccaggtcggcacagacgctcacggaacccccaggccgctcactcttgactttgtggccgatcgaatcctggacaacaaggacatacagtcaacagcgatggcgaactgccagaaccagcagcctcactcggccatggcagtgactccaccgatggtccattgtctgtactgcggccagtcgtctcactacgcggctgactgcccgaaacaacctcgatcatacaaccccaaggcaaccgaaggcaagactcggtcgaacagatactgtgactttcatcggtcatccgggcacaacacatccgagtgcttcgccaaggaccaacactcctccggcaagacatact

SEQ ID NO: 1123 - DNA, 391 bp, Xanthophyllomyces dendrorhous
ggtaagtcagtctcgctcggacggtcagcaggtcgaggtatcatttagtaacgtatggcatgtccccctcttgtcatccaccattctagtctccctcggtcagatctgccagaccgatgggatcaccttcaccggcaacagagaggagatcgtgatcagtgaccagaccgggcctttctttactgcgtctgcatacagcaggaacctgtgggctcttgatgtcactgtgcgatctccgactgctgttgctcacctggtcaccagccaggtgaacaaagagattgatctgcttcatcgtcgaatgggccacctttgttgtatgtctatgtatgctcttgtcaagtcaaacccagaggtgctcaacaagtccatcacttcacaggacatcaaa

SEQ ID NO: 1124 - DNA, 533 bp, Xanthophyllomyces dendrorhous
ttggctgcactgcttttgcacacaatccaaaacacaagaagcaccagtcaaagtcgaccccgtgctggttcatcagcccgtccgaggatagctttggcaagcaggcctaccgtctcgtccataagcggaacgtccagaaggtcatatactcccggaacgtcatcttcgcagaggactggaccatgcgaactgcacatcagtacggccaggacaactacagtcagtccaagacacttcctgctgctggtagatcacttccgctatggactccagacctaaccgatcctccttctgcgctacctcaggacatcccttccgagccactcggtcgcgtggatgatgagtctaccgaaggccactcagctgatgtgagcggcgttgacaaaagcacggctgatgaccatcagttcgtgatctctgaagacgagaccgacgacggtgaaaatgccgaggacacacatgctcttccacgcactcatctccgtccacttcttctccgacgatcatcacggctttctcgtactctgcctcag

SEQ ID NO: 1125 - DNA, 2070 bp, Xanthophyllomyces dendrorhous
  misc_feature (235)..(252): n is a, c, g, or t
tttctcgtactctgcctcaggccaacatcctgattgacatcggcacacgccagcttccatccacacctccagccacttactgtcaagctgtcagtggtcccttccgagtagagtgggaggcggcgatgaaggccgagatggacctgttcgagaagctccgcgtgtggaccatcagaaaggccgacagcaaggctaccgaggtcgtgtctggtcgatgggacttcacttgttcatnnnnnnnnnnnnnnnnnngccaacatcctgattgacatcggcacacgccagcttccatccacacctccagccacttactgtcaagctgtcagtggtcccttccgagtagagtgggaggcggcgatgaaggccgagatggacctgttcgagaagctccgcgtgtggaccatcagaaaggccgacagcaaggctaccgaggtcgtgtctggtcgatgggacttcacttgttcatcgacggccaacagtcacgaggccaagttcaaggccagatgggtcgcccggtggttcgagcagcgcgaaggcacgttcggagacacatactctcccgtggctgacggcacatcccggcgcatcttcctttccattgtcgcacacgagaacctgacgatccgtcaaggcgacgtcaataccgcgttcctctatgccaaactggacgatcccatctggatgaagcctccaccaggctacacaccagacccagacgacctgtgctacgttacgaacgccatctacggccttcgtcagtcgcccaaagccttctacgaccggatcgccgcccatcttgctaccatcggactcatccctatcgaggccgacaagtgcatcttcctcggcaaacgtcggaacagacgagtgatgctcatgatctatgctgacgactttgtagtcgccggtgctgccgacgatgtggccgatgtgttcgaagacatcaagcgcgagttcgaagtcgacgaccgaggcgatctcaacccaggccagctgctcggcatgcagttcactaggaaccgcaaacaacacatcatatccatctcccagcaggcctacatcgatgaggtactcgaccggttcggatccacttcgatcgcaccccgccggatcccgatgccgcctgatctccagctgtgggagtcagacatgccgtcgacaccagacgagaagctcaggaagcgataccaagaactcgtcggctgcctcacataccttgtggcgtgcacccggtacgatctcgcctactcagtgggagtactcgctcgcttctgctccaatcctggacaagtccatatggaggccgctcttcgagtacttgcctacttggcatgcaccaagcatttcaccctcaccattggattcgaacgagagaggcccatcatcgagctctacacggactctgatcatgttggcgacaaggagaaccggaagtctgtcaccggtgttctcatctatgtctttggcttggtcgtgtactggaagtcaaagaagatcccctcgatcaccaagtcgtcctgggagtccgagtacattgccttgtccaacggtgcatctcagctcatctgggtccggcagcttctcgaacagctcggcttcaccgtgcccactgttctcacacgctcagacaaccaaggcgccatcgcctctgtcaagagcggccagctgcacctaacggcaaatacggtttcgtgttgctgagaaattaagataaagtaatctcagcaccaacgaaacagttatggtaaatgctacatttataaacgaacctgagaaactaaaataaagtaatctaatgacaatcgttttgtaagcatatttgtatggaaagcgttaacaacataaagacaggagaaaaccaacctcagcaccgacgaaacagttatggtaaatgctgaggaaggagaaaaagaaaaagaaaaaaagaaggaaggagaagaaaagaagtatgccagctggcagagtgcgctagctaaggcttaggtacatagatgataagcaaaaaccaatgcaccatattcaagtattctcaacatattcgtcgatcacggtgagcatgtatcgtgctcc

SEQ ID NO: 1126 - DNA, 348 bp, Xanthophyllomyces dendrorhous
gcgcaatgtagaccgatttttgcaacagcctcttggtactgcttaattcgctcttggtacatctcaactctctcttggttatatcttgactcttccttggtatctcttagctcctccttggtatctcttcgctcttgcttggtatctcttcgctcttgattgtgtttccttgtgtttccttgtgttcgcttgtgtttccttggtctaacatctcgaatgatatatataccatgtagtcgttagctatccccccttttctctctcaagcttggaacctcgttaaatcctcatagttcccttcaataacctcttcatatccctctgcaatattgcatgatctcttccctc

SEQ ID NO: 1127 - DNA, 638 bp, Xanthophyllomyces dendrorhous
ccatcatttactccatcagatccgatcgcaagttttccgtgttccgggcggaaactcgagtatttttgtaccggaacagatcgtctggtgcttcttcggagtgcgggcgtttctgctgctcgggcgagttgttttcggtatgtaccaggaccgtgcgttgggactgggatcagactttgttctcgaggcgaaggtgctgctattctgacggagatatcttctgctgtggtttctacaggcttttgtgatgcgttttctgcagtcgttcctggcgccttttcggatacggcgattgatgcattttctgacaccaaaccctgagtgattgccaaagtagtctctggagaaacacatgaagaaacagctgaagaaatagctgaagagacagctgaagtaagatctgaaacaccttctaaagcggttcctgaaaaaccttctgctctgactcctgacaaggtatctgcagcagtatctggattgatatctacagaatcacctagggtgatgcctgaaatagtctctggagaaacatctagtacactttcttcagctgattctaaagtagtctgtaacccaggcagtgaagtagtttctggagtagtttctgaaacgcatccaaagacatttactttcccggt

SEQ ID NO: 1128 - DNA, 548 bp, Xanthophyllomyces dendrorhous
ccagttccagttccagttccagttccagttccagttccagttccactcccaggtccactcccactcctacttctatcccagcagttgccactagtactgctgccatcatccatgttgcttcgccaacgcaaaatacaccgaacaccaagacgaaaccagcctctgcttcatactatcactcggctttgtgctcatcctctacactttcttcgcctggtcagctgacggacaggagtacgtctgtgagctcggctttctcgttcgacgagcatggcttactggctaacgatgctgtatcgaacgagacgaaggcccggtggcagatacggaagcgaaaagcatgggatgagtttctcagagaggaggacaagaggcaggagaaactggggaaactagggaaactagagaaactagagaagctagacggacgcgggagactgagagaaggggacgcctcgaccggctggtcttctcggtcttctatgtgcagtgccaacggagggtccactagctcgagggacgaagccgaggaagccgttctagacgag

SEQ ID NO: 1129 - DNA, 491 bp, Xanthophyllomyces dendrorhous
tatatatggttgcagagctacccattcagtgatgtgatgtcagatgaagaacacacaaacagcatatacttacccgctgagactctctgcagtggtcagaaggtgagaaacgtgactgtgcgatcagcttctatccgtcagatcaacatcgttggtccggcatcacctcgaagaacagactaacctccgaactgagcgtagatcgtagatcggaaaatagagtccagtcgttttgcctctcgcgaggatgctcggtagtagacagcagtgatgtagtacagcgagagcagtggtatgaagatcaaacccagataggggaaggctatcgagtgaagcgataaggccatcgaaccatcaggacatgctcagattcgagcccactgatcacatatacatccaagaagaaaagggagtaactcacagtagaagaccaaggcgatagtaccaaacacattcagactcatagtcaggaaagtgttcctgttgataca

SEQ ID NO: 1130 - DNA, 2251 bp, Xanthophyllomyces dendrorhous
  misc_feature (1868)..(1877): n is a, c, g, or t
atggcaggaggatgagagaacgtaaatatgaatagaaacagtgacatcaagtcagccagtgcaaaattcctttccttgcacacccacaccttcccatcggcgcggtttctcgctcagtgacgccactcacccgatcttctctcctgcaccaaccgaaaaagacaggcccttcaacacaggaggcaagtccgctcgatatttcagcaccacatctcggaacgtgatagcacctgaatgtggccaactctcaggcggatcttccaaagtggatcgtgccgcttcgggtgacaggtcggcatagtaggctactctctctgcagtgttcatgtcctgttcgactgtgaagtagtatcaccaacaatgatacacgtagttcatccaggcacgtcagtcatgaccatgtctatccaaatcgacatgaggaccagaacataccttgagcaaagatactatgtgtccaatgaggtcagatcgacattccagtcccttgtcgtttatcatccacgcctatcaaatagccagagtgcagaacagtagtactcacttgacgatttgagagaagatttgcgacatggacagagaataggtgagaacgactccaagcttggcgggagactgccaacgacaaaacaacaagtttgtgagctactcgactattcgctatggacatcccaaatgaagcgactgttatgcgcactgtgttatttctgaacccaacaccaatagtgagacgcataaaacaagcaagtttccgagtgctgcaagacggatacccagccatctgtgcgccgacacgatgaatgtcatcagtatggttgagtgcaatgctcaacgtcatcaaaccaacatatgaccgggactgacctctgaagcgcgatgacgatgaagtagcatttgttctcgatatctatagcggcctcggtccggcggacaaaccgatcttctgccccataagctcgaatagacgatagactgtgtatatatggttgcagagctacccattcagtgatgtgatgtcagatgaagaacacacaaacagcatatacttacccgctgagactctctgcagtggtcagaaggtgagaaacgtgactgtgcgatcagcttctatccgtcagatcaacatcgttggtccggcatcacctcgaagaacagactaacctccgaactgagcgtagatcgtagatcggaaaatagagtccagtcgttttgcctctcgcgaggatgctcggtagtagacagcagtgatgtagtacagcgagagcagtggtatgaagatcaaacccagataggggaaggctatcgagtgaagcgataaggccatcgaaccatcaggacatgctcagattcgagcccactgatcacatatacatccaagaagaaaagggagtaactcacagtagaagaccaaggcgatagtaccaaacacattcagactcatagtcaggaaagtgttcctgttgatacagagaaagtgatgtctcagccatggcatacacctcatcacccatcattcgatcggcgcaatgatccatctacagtgataggaactcaacataccactgcatcggtagctgatcatccagcgtggttatatcttttgacaaccgactaatgattcggccgatctgatcgatgattcatgtcagcttgaacttgtaataccatatcgccagtggatgaaagaccgtgcttactggggtcgcatcgaaccacgagactggggtggccatgacgccatcataagccgagttgaacaagttgaaactggcattgatagccgatagatatctgtttgggatgatggatggatccccatgatcacagtcagccggatagatcagtcgttcgcccacaagaacaaggtnnnnnnnnnnaagaaagtgatgtctcagccatggcatacacctcatcacccatcattcgatcggcgcaatgatccatctacagtgataggaactcaacataccactgcatcggtagctgatcatccagcgtggttatatcttttgacaaccgactaatgattcggccgatctgatcgatgattcatgtcagcttgaacttgtaataccatatcgccagtggatgaaagaccgtgcttactggggtcgcatcgaaccacgagactggggtggccatgacgccatcataagccgagttgaacaagttgaaactggcattgatagccgatagatatctgtttgggatgatggatggatccccatgatcacagtcagccggatagatc

SEQ ID NO: 1131 - DNA, 466 bp, Xanthophyllomyces dendrorhous
ctgaggtgaagaaaggagatgggaagctgagaaggcttatatggaaagtggtggacgagaaagttgagcaagcacagagacaagccgaagaaggtggagcaagccggagaaggtgagactagtcggaaaaaataaatgaaagacatggaaaatatgtagaaacagtatggatcgatagagcaaggttgcctggtccggatggtgaaagaagtagagcgatccgggcgggattggtggagatatgggcgaaataaggaaaaaatcgagaaacatcaaaggacgaaacgacgaccggcggcgggcgcaggattacgtaagctcgcgcgatgggaggtgatgaagtcaagaaaagaaaaacagaagaaaaatggatggaaatatagctatgtggttacatcccgggctgtgcaacatgtggtcacggtgcaattctaacagaaggaacgtactcaccgtgccgaaggaa

SEQ ID NO: 1132 - DNA, 911 bp, Xanthophyllomyces dendrorhous
ggccatgatgactgacatggtttgactgcttttttggctccacttcaccactctcagggtcaatatctgctcattcggatcgtctctcgtcccactaggatcacttccatccgtttcatcggccaggacccgtcaggccgggccgagctcgtcgagctacaaacggctgtcgacatgcttgtccagaccggaccggaactggacgcgctctatcctatgggcggcctgctagccatccgggagcctcactatgttcgatgtctggacgaagacatgatcgatattgctcattggaaacgcaccaagatgacgaaggtatccaggatcagggttgagtcaccctcggatgttatctggctgggtgcagacgaccgacttgtcagcgagctcacatagacgagtccacctgtctgtctggcgaccgacacagatgctcggagactgactgctgaacaggcaaagtcgatcggagacgaacggctggacaaaggatggctcatggcggccgagcgagcgtataccgagggtctgaccgttgacagcaagcatattgtgctcagacttgaccgagcgcactgccggatccgactctcgcggttcagaggcgcgtttgtcgatggcgagcatgcactgcgtggccttcttgacgctgtacgcgcggaggaacctggacgggcggacttggcccagtcagatctgctgcagaaggcataccactggcttgtgctagcttcgatcgatctgcgcgactggtcggtcgcatatgagcactgcactgtgtttgttgagcggtttcctgattatgctcctgctctggacttgctggcgttcacacaagccagagtggacgaggctcggacgggtgtgtacgactggccgtcgatctttcggggtgatctccagccgggggg

SEQ ID NO: 1133 - DNA, 74317 bp, Xanthophyllomyces dendrorhous
acgaggaatgtagttgctgactgggtgtcgccttccttcaagataggccgcagccctacgttaggtgggatccggggcgtcatcgctgaccgaacgatcgagcgaggcgagctacttgtggtgtgcaagccgtttgtatctgttgacttgaaggatcgagatttatggccggtgacggagctggtgaacgtgtcaactcaacaatttgctgaaggacctgcgcatgcatatctggtacgggcgatgatggacaagatccaagacgaaccaagggccttggacgtgttgaagaggctgtatgctgggccgggacactcggatccagagttggtcgatctaagcgccttcgaactgcctggcgcgctgggcgatatcgagaaagagggagagtcggtggatgtggatgtgtcgaggctggagggaatcaggacatacagctcttttgggactagtccggtcttgatccccaagactgggcccactacgtacagtggtcatagagatgagccgtgttccggtacgtctcgtacttttgcctctctgatgtcttctctcttctcttctccttcttttccttctttttcttctcctttttctcttctttctcttcctcctctttccttgcttctctgtctccttcgcaatttctgacaatgttctgaatgttttcctttttttttgtgtcaaatcacatcaaatcacatcaaatcttgatctacacaggcatctatcttgtcccctcgttgttcaaccatgcctgctacgccaacgtcagttgggtattctggggcgatatcatggtccttcgttcctgccggactatctcgcccggcgaagagctgacgatcagctacttccctggtagctcgttagcctggcgaacaacgttgattggcaagtacgagatcggtctatgcgactgtatcctgtgcaaggagaaacggcttgaccccttggacgggcgtaacatgtggccagatgagctcgaatgggctttggaatatgatgaatacatatctggagttgccccgatagtcaatggaaagatgtataagccaccgagaagaaccctcaaaagggtcatgaaaatggcccgttctctcgaatcaaaatacgatcccagacgctcacctagtttcatgtctgagctctgctgtctctataacgccttgtcgggccttcacatgatgaaggtgatgggcggcatgaaggaccccgaggatacgttgctgttgatggagcaagcggtctactggaagaaacgtgcgcttgagtgttgtgggttcaaagggatagagtccgatggaagaggtacactgacgtctagtccgttcgcatacgagatggaatgtttgagtatagggttgtcgatcgtgtcgatactcggcagaatggataggaagaaggatgcgcaacgatgggccagagtggtgttggagatgcatgacatcgttttcggaggtgggaaggaaacactggtcgttctgtggaggggtccgttggactcgatgaacttgcttccgtacttcagttgacctcgtgtggatgagatcgcatatgaatgcatgtcttgctttgtatcacaacagcgatagtactagggccaggtagtcgatagcatatggtgtcttcccgtgtgtcaagctagacgcatcacgatcgagtcgaacaagcagaggacacagagaatcttgtcatttatacacattcagtcctcagccttcgttcgcttctgcttgtgcttgtcagcaggcacaactcgctggcgcgcggctgggtgtcaagcgagttctgagatccataagtgcctatgttgaagaaaagaagaatcagtgtttgaaaattatttgaaacccaaataaaatgagaaagggaaagagagaaaaatagtgagaagtaggaagaaaagacgaaagaacgaaagagaggacgaacacggctgcctcacctttcggacacatgaacgtgatggcaagatccgtatatccagctcgatcggtatatcccatgacttgcatgcggagggcagaacaaggaaatggatcggaccggtccgatgagcgtaagcctcgatcgcatctgacatctgccagttgatgacaagcgaaacgtccccaacaccgacctctcgtgcagcctgtgtgagcgagcgcagatgccgggcgtcggtttggccgtgagctaagtgggctcaccagaaactgacaaaatataagagagtcgcaccagactggagcgataagaacatctttcgtcccgcctcttgagacctgttcgagtgaagcgccatgacggataactagggcctattaaacagagggggaagtaaagtaaggctgagagggaagcagagaagtcgaaaagagacaacggacctctgtccgccgaacgctcttggaaatggtattggacgtcttcttttgtttacgaatgataaccatggacggtgccaagtcagctgtaggggatatctgtatgttttgtcgttcatcgcgatgagcaacacgccagagcatagtaaagcagaacgacatataaacgatcggaacaagagagcaaacacaggtagggaacgaatgacagatctgatcttgtgttttcatctctctgtatgaattcgatacgttgttgtactgtatcaaccacatcaactgtatcaactgtaccgattgtaccggctgcatcgacagcctgtcgagtttacaatctcaagcacccaaatgtacctaagtgttggccatcactgcgttaagtggtgcagaacacgaagctctcatcttggtcactggaaaaaggccatggcggatactgaatgatataacaggaagagaggatatatggagccacccgataaggcaagatgaatagaccgtgcacacggccaagtggtgtcaacaggaactttcaggttgttactggtaggtcatcggagatcagatcttgtcctttgtttctcttatcttatctgaaggtatctattagacttcctatttgcatccttatcctcttctaaccctaacccagagttattttctaatgtatttatgacccttttgatgaccctcacaccctgatccgaatcctaaatgggacgagaagattgaatctttaggcttcaattagaagatttacgacacaaaccctcgaatgaacaaagatatttgatttgcgatgaaaaatgcggttgatgaacaggaactatggaggataagttgaatataatgcttgaagaaaagaagacaaaagaagagagagggaggatgaaaaagaagaacgagactagaagagaaagacgagaaaagggtacttatgacactcctcttgaatctgtttcattcatcagctatccttcgtgtccaagcggggagagtacgacattgtcatcaatgcggtacgtttgtagtacaaccaagttagcaaaacgttttttcccatatccaagtcctgtctcgctctgagagattcatgctttggagcaacctgagatgacaagagtctgtgtcagcttagagctaaaaagttcgctgttgacaaacatcaccacttacaagacgtctgacttgttccattggttgatgaagaatttgaaaacgagtctttggcgagcttagacgccatgtcgacactcgaagggacatctagaccaggatttctctgtaatttggcaggagaatgatgaaatgtcagctctcggttcaaaatgagttttacacagcttgaagcaacgtttactcacgtcgaagaagctagatggcttcagatgcaatcgcaacatctccacgggcatgatgggccaatcttccggtcgactgaagtgcgtcatgccgaaggaagcccaaacgaccacatcttcgttgacaatggaggcgtctcggtctacccactctgcgagtccgtaggaatcacctccgggatgctggttgatatgaagaccggatggatacagctcatcctcggcataaggtgtgacaaacatctataagatgagaaaaaggtttcaaacacaaagataagtcagttgtaagaagacgatgcaaactcttgaagatccactcacattatgtctcgcaaatggtgctcgattccaaaccatcgatccaggcgcggcgagcattggtggcatttggccacagaccagtttgtaaccgacattagcgccactgatcttattcttcttgttgggattctccatcgaccagattcgattcacttttgcatcataatcggcaacactctccttggtagtcttgtagacagtcttctgagcgtggaaaccattgccgtagtagttggcggcacttcccaatggagcttcatcaggtacggcatcgacttgtaccacttggttctttagaccatccaacatagggtcgactcgaagggaaaatagatgttgatggtgttgggcagcaattctgggagctacgatgacttcatgatcggcgtctcgagcttctccttcagccagtaaataggcgttgacaatacccgtagctttgacctcgagctcgatggttccggcaaggtcgaaggtgaaatagaatccgtactcataattggcgacagtgcagatggaggacacaataagttttcgattacgggcgacttgagccttgttggttcggaagtcggtatgcttatgaaggataccagcatcctcctcacttttggaaaagaagaccaaattgaacacatattctgtcatcatgagcacacgatgaggtctgagatgcaacggttgatcaagatagacttactgtatgcaaactgcattcttgatggtttcaacctcaccattcctgctagaaccttcgaagtcaaggtatgcgatcttgcctttgcaatcgcagcccaattcaagactgttagcaagggcccctattccgtattctccagtgtcgaatgcatgctttcgatggtgagggaaagtcgtcttggcgtagggtaccaccatctcagctacagagagtcgatagaacaaaggtcgagttccattttttccatcatcgtaggtgatgttggaaagaaccatgccttctctaaaattgaaaccgacatggaagcgccagttctgccaaaccaggactcgtccctcgaacttgaaggatactccttccggctgagtgatctcgatgggtttgagcccctctcgaggcttgaagtctgcctcatcctgtttgagttcagaatgcagatagttatgcggctccatgggaggaggtatacggtctcgaggagggagagcggcatgggcggtggcggacgagggagcgtccgggccattgagatgaggataatcaattgtcatgatttcgccggtgtaagaatctgcacaattatcaagacgaaataagccttcgtctgatggaaagaaacaatccaaacgccatggctacatgatcgctggaaagacttaccgatgacagggatgaagtcaagaggatgagcatataaattgtcttctggccgagatcgagtaaaaaggaaacactgttgcagcctcctattagggaatcgctcgtcgacaccgatacaccaacctgtggagccacatttgtatgttcagtgtactgagcaaatgatactcgcgaacagaaaatgatgtgaatatgactgaccgtcaacatatatgtctgcgggagcaacacctacggcttcggcagcttcacagatgacaggagacttcctgcagatctcttcagcccatagaagctcttcgacttgcaatgatggctgaatagccttatccagcgcggtccaagacgagactgccggtttcaaaacggtcttaccacgatccttgtcaagatttgagggaagatcgacgatgcactcgaaagctcgggcagtggccgcatcaagacaatgtacctgagttcgtcaaaagcgatggtggctttaatcatgatgcaacttccaagaaaggaaatatctagacgttgacaattgaggggacttacatcggcttgcctggtgatgacatcggaagcggcctctacctcaggcgctttgacgacaccgccccacttgaggaccgagagcttgggaggctccttcagagtgatagagttgaaaagtaatctctcgagagggacttcgagagcattggtataactcctgatggcggaagaagccaagacgatttcctatcagatcagaatcgaacaaagtcagtaataagccaagaggatctgaagaccaagatgtgattcccaagcatacctgagaagtcaagggatcgaggggatggctataaggcttttgactggagtgatcggcggagccgttcatggctgaagccttgagttgcatttgagaaggagttatgaagtgtctgatgtggtagatggaatcgtggatactcgagtctggaagaagaagtcgagagcgatggaaagagcggttgatgagagcttaagaatgcagacggaccatcaagaaagttgagctccggatgaacaagctttatacaaacgcatcatcgcacagtctgaggtttgagttctatgttcatcagactcggattgaacctcggcagaactcaatgggggaaggatggtaatcggacgcgggtaaactctaactgagtttagccgttcaattcacccgtttgtctggctgccctaagacatggtgagagtgaccggctcaacgtttatcgatatcggcgccgttatcgtgggaaattatacaaatcaaccgagtcagtcggatctatcctccaggatgatgcgcttctaacacttgacgattcctctggggaacattcagcacagtcagattctctttataaggtatacgcctgagaaaacttggcttctcgagtcttcttgacataaccacttctttcccagatattcatcccagcacgaagaagtttggcttctgaaaccgagtactgtatcccaccgctctttcccatacggatagttctctagacatatgcctcttgtaaaggagccggaggcgcagatagtccgagtgatgaccgctctccaggtagtgagtcttctgacaatgttcgtcttgatatcgcttggccgttcataatcactcatcatcccgttgtgactgctctgtacttcttctcccgtattgctttctccttttttgtctgcacgcccacttggataaccatgccaggacgaagagccgtctccggttacggtcaagtctgaggcaagactagagatgcttggatataaccaagagctcaaaagagatatcagcatgtttgagacgtgagcacgagccttccctttttcttttctctctttcttgtcattcgctccacattttctccggctaaagttactccttctaccctccgccgatatgtcatacttggcttctctaacaaagcttcggttttgcgttctctatcatgtaagtatcttcttttaaacatcaaaccgaattttggatactgacgcttatgttttgacttgttatcaccactaggggtgtgctaccttccattgcatccaccattttctacaatctaccctacggaggacccgttgccatgacatggggctggcttctcgcaggattcttgatattgtttgtcggaggcgccatggccgacttggcatcgagtatgccgaccagtggaggtctctattactggactcaccgtcttgcccatcccgacgtaaggacccaaccattatgtacattatctgtacttacgtagtacgcgtgaagctaaatcaacttttcatcactttcatcacaacttagtaccgcgattttctcgcttggatggtaggctacaactcgtttttgggtaatatctctgctgtatcgtcccttgcttgggccacatcgggtgtcatctatgccgcagtgtctatcaacgacaactctttcactgccagtactgcccaggtcttcggactatacatcggtattctgatactcatgggtgtcttctgtgcatacgggaccaacattctcgcaagattgcagaccccgagtgtcattctcaatgtacttctcttgctcgttaccataatcggtcttcctattgccatgcgaaaggatttgaactctgcgtcctatacctttggtggctgggaaaacctgacgggatggaataatggcttcgcattcatcctctcctttctggccccagtgtggacgatttgctccttcgattccgccgtctctatctctgaggaagctactaatgcggctatcgcggtccctgtagctatcgtcggggctataggaagtgccaccatcaccggttttgccgtcctcgtgatctttgccttgactatgggcagcgacatcgaagccgtgtataattctgatattggtcaaccgcttgcctatatctacaatcgaggtaagtttaaggtcttctacctccttgcttgcaacaggtaaactgattaaatcgcatcttgttctctgactttttttccttgtcctcacgcagctttcggcgtcaaaggctctttggctatttggtcgttcatgtgcattgccgagctcatgatgacggccagtctaacactgccagcttcacgtcaagctttcgcctttgctcgagatggcgctctaccattctctaactacttctactctgtcaattcgaagaccaataccccggtgcgaagtaagtcagctttagcgagatgttctgccgcatgaccataatagttttatgctcatcgactgcgcacggtacgctccttcatcacagccgtctggttggtggtcatcctggcgatgcctttggggcttttgggtttcgctaatgatgcggcgattaagtgagtaggcttgtattgatatcatgtccaaaacgaaagctgaagcagttccttctctttcgtctgacaaatcagcgccatcttttctttggctatcattggaccgtgtaagtcacgctgtgttataattatctctcgcgacaatactgacccttggattgcaaattcttcgatagattgtgcatatgctatcccaatcgcttgtcgggtctttgccaaagaaggagctttcattcccggtccgtggttcctcggccgtttctcgaagccgatcgccgtcatcgccttgatttggatgatctttgcctgtatcattttctgcttgtaagtccaagttccaagatttccaagagtcacagtacagatagttaataagttatcatgttcgcagccccgccgacaccaacacagatgcggcctccatgaactatgcgtgagtgtccgccttgataacatctttcagagtatcgtttactgaattacatgtgatattatttctctttacagcattgtggtagctgcagccgtatggacatttgccatcgcgtactggtatctacctaaaatcggcggtaaaacgttcttcaaggggccccagactcacagtgtttctttcgtggaatatggtaccgagagtcgaggcaggacgatggcagaagaggaagaagtcaacggtcctgaagattcgtccgatgtcaagaaggtttagttgtaattttaaggaagtggttgtatagcgaaatatatgttatttgtatctcatgataataagaatataccaatgtcttgaagcttgatccggttctccaagaccgggctagcgctgatccaggtctagttgcggcgcatcccacgagccagaacttgagtcaagaataaattgagccagcaaattcgatggatcagtagcatctaaactattgagatacgtagaaaactgattctgtggttcggcgttgaatccatcgacaccctccccgctagcgccacgttcaggcgaggccatctcgggtaaacttgcagtggtcgaggtgtctacgagcgacgacggtgcgaacagtgtttttgatccaccgcttgcattcgggatcaattctccccaaaagtgagttcttgctttgaatatgtcggtcacatacgttgatgaatgggatgaagaagcgttgatctgaaagcggacattaagttagctcgctcgaccacaggtaaagacgcaatattcagagaacatacctcagagatgtcattttcgagggcggcttgactgctttcgcgggcgaaagatgtaggaataacagccattaaaggcggcaacgaccttgggctgtttctttcagaaggaactcgctgtcgaggtactgcatcgagatcagcgaggtgaatttcgagacatccatcacacctgggtcacttacgtttcgacgattgactgcagcgagttcttttcctcctttgacgactggaacatgcatggggagaggatcatcagtctcgacaaacttgggttaattgacactcatttctttggagaaggaaagaagaactattgccactcacggccgtcgaaaaaaagccgatgtgctgaagccggagcccaaaagctaccgatttcattcagccaaagacagcatttctgaaaattgatttcggcgctactagcggcatctggagtttggacggccgtattgtaagcgtgaaactacatgaaatgcgattcatgaaatgtgatgggtcgctgatgagcatacaacgcgtgtttgataaacagaacaaagaaaagcagtcgcatgtccacgctagacttacgactgccgcatggctgagcatatgcaaaacgtcgctgcttgatggcgtcaagacgtcaaatttgtcaaggcaagctagtaattcaacgatgctctccgctgcgtggttgcaaagctgatggcttgtgccgaacaatccggtctcgccactcgagtctggtttcgagtccattcggcgagaatgcattaagattgttgctgagtgataccactgtcgtacaaacgaaggacctggagatcagcagagatgcggcatatagctcaacagcgcgacttaccatcatattcactacaaaatgcgtaggtggacaagacggcgcttgcacatctactttaagatccggatccaaatcagcataccactggttcaagcctttggccactcgagtaacgagcttcttgcaatgctgttcgttatcgagattgccgccttcatcgccaaaatccacattctgcaggcctagttcgttcatatctcctcgagctgcgaaatctaactcggcgtcgatgtcgaatatgagttcgacaagataggctaagcgacatgtggcgttgaaacaacttatcgttcgtgatcgtacacgttggatatttggggtacgatccgccgaggatgccaaattctgggggatgtagaccgatgggggcggccaaagctcaaattcatccgcctgcaattcggacgggaacggtacagaggctgttcggcctcgaagaaggtgaggccgacctgtttcttctgaaaatgtcttgtccataacgtaacaacaccagaagacccgcgaccgagtttctttttctgcttcgaagatctatcacgaatgaaggtcgagacatcgactgacagggtgagtcagatctaacagctttgaagctttggcctgcgaggcacatattgacttgacttacaggatctggtcgcttcgagttcgaagtcattccagtatgcaagcccagttccagagccataccgattgcttgacaggaaaggccatatgcctcagtattcatacctctacttatctgtcgatgggtgaaaagaaggagggcctgcaccgagtggatgtgagacacggaagattcgctcagggtgctctgagcctcttcgaacagcaagtctgcttcaaccggggtcaacacgggctgggaggctgttggaatgactgaagctgcagccagcattgcgaggagaagcaatgggggagatgtcgccgggtgaaagctaggcttataaatcagaggccagacattctgtgcaggtgcgccgatgaacagctttatcagcaactagcatcgcaaatctgtgtttgggtgataaggcaagcagagaaaacatagctacatgtatatgggtaaaatacaagctgagaagttggtcttgaagatgcaacggcaattcaaaagatgcattcacacgacgcggatgctgtgtaggattattgttctgcattctggccttttgtgaagctttgttagggcctggaggttggctgagggtgttgccgtccgtctgtctggaagaagacagccggcgtggaacgctctcattgctcgcgctttcatgcagagaagatcttcgaacggtggagtaagagatagagggagatttgctgggacttctgatcggttgctcaaggttatataatgggacccgggcgttgtgggagtgactgatgcatgacatacgccgcgtcgattgatcatccggacttgtaggggatttactaagccgttctgatctgaatcctctccttggcccactgaaaacagtcgtacggaggaagcagattaatctgaatgtctgaagtccggtctctgagttttgcacaacttagatacaaacagaagaagggaccacgtaccgtctcattccagtatgtatgtactcacagacaatgcctttgtgaaggcatgtctgacagccattgggttctgtatgacgatagcacgctactaagcatgttagacttcgtcttaccgactgctattatgatcttgttcttgaaactgacctcctggacaacgtatctttcttctctgcaagtgatttgagagaactgatgagctacccagagcttcctgcttgagatgcaactaaaatcaaacccagtcgctcaccttacaggccacacatgctaatcggattcgtttccgaggtctctcatcttcatcttcatcttcattattcagagagtgatcattactgcctggtccagcttcggcgtcaggggaatccagaacgagaggaccgggagacataacgctggccgggtatactccagatgatagtggaaggttatcgagaaccaaacccatgttgaacaaaaatccacagcagctatcgctaaccccgagtcgagtcgagtctcacgcgcccagaataccccgagaagtgataacaccgcggaaataacgctcggccttctaaattacgcatcaatttcgatcaggtcccaattttgatttgaaccggtatggaggcagtttacccgctatcaataagtttatccgctagatccctatccggcggagatccgttaccacagcgaatggtgcaaccgaattataagtactgccatctgatcatcagggttctcaaagatcagttcatccatctctgccttgacatagcgagatacccaagcatacacatcgtccagtaatcaaatctctccatccacaataccttcaactatgcccgcccaatgttttgaaaacatcaccttgccttccggcaaacagatcgatgttcctaccggtctcttcatgtgagtcgtcaggtggcatccgcatcgttatccggctgatgcactgtgctcttcccttccctcgactgaatcccgtatgtgcttgccctggttcttttcagtaacaacgaatggagtccttcctcggatggcaagacctttgagaccgtagacccagctaccggagagaagctgctcgatttcgcccatgccacctctgccgatgtcgatcgagctgtcgttcacgccaggaaagcattcaaaaccacgtggggtaaaaatgtcgctgccacagaaagagcagcttgtaagttgccgtgtcgaatgatagctctcttgaccggccatcgatcctgactgttacgcacgctcgccttcctttacagtattatacaaattcgccgacttgatcgagcaaaacagcgaagtacttgcagagctcgaatcctggaactcgggcaagggggttcgaattgccagagaagccgatgttggtgactccgtcgcctgtataaggtattatgccggtctggccgacaaaagccatggccaaaccatcgatacctttggcaaggacaagattgtctataccttgcacgagcccattggggtgtgtggtcaaatgtgagtacagtcattcggcatcgtcaagagagtgttgaatctatgtcattttttctcgcactgatattgatgaacccatctagcatcccttggaactatcccatgctcatgtgggcctggaaggttggacccgcattggcaggtgaggaccccttgcccgtacaagaccattctcaagctgttgacctgttggaactgacatcttcctgttcgtcttgaccatgacagccggatgctgtgtcatcatgaagccctccgaacttacccccttgaccgctctatttctctgtacattgacaatcgaagccggtttccccgccggtgtcattcaaaccctcgccggtcttggggccactacaggacatgccatctcaagccacatgaacattgacaagatcgccttcactggaagtgtgatcaccggaagacgaattgctgtagcggctgctgagagcaatctcaagaaggttactttggagttgggcggaaaggtgagctacccggcgactgttcaagggttacatatgttcgacgctaatctttgtcggatctcattctccagtccccgtctctggtgttcaactcggcagacatcgaagatgccgccaactggttggctttgggtatttggttcaactctggacaagattgttgtgccggttcaagatgtatgttgtatagcatcgcatcaagctcttctgggatctctcaaacagcttgaatgcgaaggctgacaataaaacgtctcttgaaccttaccctttctatcacagtgtatgttcaatctggtatttacgatcaggtcgttgccaagctcgtggagaaggccaaagcatgcgctataggcaaggtgagtcaaaatcacttgaggggggagttacctgacttcagaaattgatctttagccgtaacccgcttgtcccggccctctttaccttagccttcagatgaggcgacctctttcggacctttgatttcggcaggccaacgagacaaagtcatcaactacatcgaaaaggccaaggcagacggggccaaagtagccaccggtggtcagaagtgggctcaatcaactggattctacgtcgagcctacggtgcttactgaagtcaccgaggacatgcaatgtgtcagggaagaggtaagccttactgcatcatagatggatgccccggcagcaatactgattatgagacgacactcctttttatcacgttctcacttagatctttggtcctgtcattgtcgttgccaaattcgagactgaggaggaaggtttggaattggccaacaacacttcctacggtctcgccgccgccgtgttcacatcggacgccaagcagtcaatgcgagtctccggggccttggaggccggtacgatctgggtgaattcttatgctcttctccatgtccaagctcccttcggtggttataagcagagcggtatcggaagggagttgggcacttacgggttggaggcttatcagcaaatcaagtctgttcatcacaacattgacggtaccatgtgagtcaatgtttctacagctaagtgaaagtttaaactttaaaactgatgaaaagcatctctaaaattttccaggagctggccagtctaactgctgtagcaattatgtagcaaaaactcaaacgatcaagaaactggtcgggcgattgtattctatgccctaagacatgatgagagtgacctcaaccgatggtggttgatacatggcccttttggacttgggtgtcctcagaccacaaaccaccaagatcccatgggtcatgggtttagtttctgccagcctcagcctcagcgaccagcgtagcagcagcagtattaaacaccagcattcttgctccctcgttcttctcgtgaagggataggtgtagcatgttacgtaacgtgttcacatccctgttccgccaagtctgagagcaagaatcagagagacaaaggagtagcgaggacctagaggtagacaacgacaaagacaaagtgacaaagtaacagacagacgaagacagaagatatgcttgatcaagccacgtgcaatgtatttcagcggtgttcatctatatttccggcgtcagatatacaacatgaccatcgaagtagtcgagccaaccaacggtccgaccgctctcaacagcgtttgttgagattacagcagctcgacatcatcccagccatgatttgacatttacaacctaatttaatcttacagattcaagcccatattcaaaacaaccaacgaataatcctctttccgatcttttccgacgagtcgttctcgatctcctggaaagatagggtggcctcgtgttcttccacttcagccaaaccttctctaagatcgatgtcttccagtttggcgaatggttttcggccgatcaatttgatgacagcgtagaatattacgaacaggataggagcggcgtaggaaaagatgctagtaagaaaaaagacagggcgatttagttcagcagatgcagaataattaaaagaaggggaaacagacgagatatgacttacaaactggctgtatcccaacctccgttcaagaagacagggtaaccattagagatcatgacgatcgtggaaaggacgagtgcataccaagcgccgtatggctggaacatcgatcggtaaggtaatgttgatcggtcgatgttttggatggccatcgctttgaaccatcggatgtgggacacactcatcgccatccaggtaacgatctgagtggcggtcgatatgttgatgaacctgttgtgatccatgaatacagtggaacaaagaaatcagatttgttcaaagcggctttaaaagaaggatcgagcaagcgacgtaccactcaagaaccttgttggctcgatcagagcattggaggaaactgaggcaagcaaagcagagcgtagcaatcaacgcatacacaggtacaccgttcttgttggtgcgcttgaagaaagcgggagcgtgaccagcttgcgcgagaccgctgcaaaggttgtatgggcaatgtcagcctatcattcctttgtttctgtatgaaaatagcagcaaaggaggacgaactgaagagttcgggatccgttgaagaggaatgcgcttcctgctgagtaaatgctggtgactaggaagttccgaatatgattatacagtgattcgtaagacacgtttatctaaattttaaagtagtgtcgaaactactgactgataccggcattcacgatggaacctaagtacttaatcttgagtctgctcatcgcagccacgtaaggagatcttccagctgaaaaagatagcccagtcaaggaggaccttaagcgtcactgaacgatcaatcgagcaaaagaagaagagatggaccaacctccagcagagttctccttgatggcatcgttcaagatcacatcatcgtagggcacaacaataccgacggcgagcgcagatacgaggaagctataaaccgatcgattcaaacaagaaaggaatctgagtcaatatttgaatctgagaagatgatatagatatattttagacctacaagagaattaatcgaatgtagaccgacttgaaggcactgggaaggacttgtcgaggattgatagcctcggctgcctaaaattgtagtgatagaaatgacaaaagtaacaaaaaaggagttaaacttgtgaactcggcgctcgatgaagcaaaatggacaaagaagaacctcccgaaactgaccactaaagacaagaaatctggtccggcaacggcaaacgaggctcctagcagacaggtccaaaacccttggaagtaaccggaagagtttttgccatagtaatctgagataggaccaggatttttccagtgtctgaacccgtaggcgtccttgagagggtttccaccgcacatggtcacaaaggtgaacatgaagagtccgagcataaggacaatcttgcctgaaagtttgaaatgtcaagaggtgattatgaggtgatattttcttagggtcaattggaaataagctcctcgaacgtacagagaacaatccagaactccgtttccgcaaagatcctggaggaccacatatgaagaagcgcataagtgactatacagaccactgggacgattgccggatggacatcctaatgtgttggacaattaaaattagcaaataataagaaagagacgagggacgtaggggaggagggagacacaatcacaagaaacaggaagatgagaaacaagaaagaaatatgttagaccatggctacttgaaaagaaaagaagctgaagccgcttacgctcgtccagtatccaagggcagcgtggaaagcagtgatttcgaaacagagcagagaacacatcgcaaggaaataattccaaccggtcgctcccccaaacgcattatccacgtaccgactggcaaaagtgatgaaggatgactcgaccggtagttgacagaccatctctgcctgaccttcgtttacactgttgacattgcaaaggtagaagacatttggaaattaggtggcttttcttcgctttctcgagttgaacaggaaggaaaaggagaaagagaaccaatactgaccaaaagatgacggatgtccataaaatgtatccaagcaagagcattaacggacctcccttaactaaaagtatggaagaaggagacgattttcaactggtaagcacatcgccattggggccaaatagacagagataagcggcctaccaagacttcccccgattcccaagctacaaaaccaggtgaagtcagcattgttaatgagcttccaggaacgcacagggaaaacattgcaggaaacgcaagcaaaggcaagaaagaacgaacaagacggccgttccgattgtaccaccaatcgcaaggaaccgaatttgtttggcggtcatgactctcttcgtatggttcatctgtcggtttaatcctccctcgataccattgacctcttcgatgtccacggaaataatgtcttttttgcactccagttgatccatcttggctctattcttctctttctttatcgccaacgagtaagaggaagaagggtgaggcagtagtatgaaattgagtaagcgtgtgagcgtgtgagagtcagaaagggaacagaacaggatgacgatggggctgaaacaccagagaaacggtttatatatcaagaagcgatagttatctggtccagatcgacccccaggtcaaagaggaagaaaaaagtgttgatcgatgataaagagcttgagcgataccagggcacggcaatctttgtgagttatcagtttagcgacagagaacgaagttcaatctctcaatcagttagatctgttagtctcatcgcagaagtgagcgcaaaagcatcaaggttagtctcaacacagaacggaagtgaccaagaacggaactgtcaagatactctcggcatgatgatgttcgccaaggtacccagagcgcagcgcgaattgcgttcacagccttagatcgatggccgaacggatgggtcggctaaatttcaagccataatttccaatgtaatgaaagattttgaatgaccttctatacttcactaaccttcagttctctaactttccgtcagcagtctccgagatcaaggtcataagaaacctacaagtaaaagaaaaaggaagaaaaaaatcggattcatattacatttttttgtctgtccattcgtccatctgtttcggtccttcaaagacaggttcactgaactgcccattggaaatgagggcggcatttatgtgatcaactaaagataattactgaaataaaagggtgaaaatggacttttcgttctggcacttgttcccaatcaagccctcactggttgtccaaaatcatattcacaccacccaggtgtttcagtaagatggattgagaaaccaggaaaacagaagggaacccgccagaaaatatatagttcttcggagagagaggcttgggactccgcgcaaacggaggtcggaaggtgatgcctcggaaaaataaataacaaataacagatgaaattatgtcaagactgctgaaactccaacagatctcttacaagctgaacaaatagtatgcaagtgacttttagtcaacaagatcgtatagtatagtggttagtacttccgcttgtggttggcaacaacgcaaagtcgcggacgacgggtgttcaattcaccctacggtcatttctttttagtgtctctttcggctccttttcatctatatattttgaagatatatgtaaacatcaccttggtcttgtatactggtgaagagtaatgtattgaggcaactacacaatctagacgaccgtttagatgagctatgatttatccttgacgatcacgactcctgggttcaaggccgaccttcaccttcatggaataagtgagcattagagaaattcaatctcgcggagctggacaaaaggccagtacttgacatagtcgtctagagtaatagtctctccgctagttcaacaaagtagaggtgcgatgaccatggtagattgatgaatagatttgttcgatcgaagagaccgttggtcgactaggctgattgacattcatgctgtatacctatcactgggcatctagatgaacaccgctgagatcagctgcacgtggctcaattgaacacttcttctctgtctcttcgtctgtctattgcttcgtatatctgtttcttcgtctcttggtctgatgatctcctggtcatggagtcttgctaatttgttgtctgtggcctgtggtctgacgatgcccaagtcccaaagggtcatgtatcgaccaccaccggttgaggtaactctcaccaaactcaaggcttacaacatttggttatggtgcgatcactcccctaaattccgcctcgagacgacgttttctgttgcgacctgtttgaccccaaacacccagcccgcgccgccgctgaatacattagctggcaaactctgatttccggttgtcttgtcaatcgatggtttgagggctccgttcgattgtgaagtggtattgttgtcagaaaatgaagcgaaaggtaccgaggcatgggagttgtcgtagatatccatgctaacaaacgaacgataggtattgatgtcggtattctcgtcggaccacactaaggctgctgtagacatggatacagtgtctcgatagaggctcaaatctatgggctaaatatcaaacaggtcgaaaagagatgatatactcttaatcaaagaggctgaaatatgtctaaaaagtgaagatactgactctgcccagcgtatgagaggaaaacaattcgtcctaaaacccaaacgtgtcaaagcacatagaaataggtcagccgagtcaacaggacatctagaacacatctgagtgtcaccccattggtggtcttcggaattagagaaagtcagtttgaaagattagtggctgaacgaacctcatgcgaagcagaccatcttttatagcacaagtaagagtatcagtgtttgagacctagaacagatgatagtcaaatggatgtaactgaccgaacgtattcttggatctcgttgggttctactactggttgtaggcttttttgaactttccactccaccgagttgatgtcggttgaggattcatctccctccgcaccgacatggactgaacgatcatccggctcaatagctaactggttcttgagctttgacatctgacgttgggcaggaacgtaggttccatcggaagcaagccatcgccggactgatgatatggactgaatacttctatatcatcaaaagacatcgaaaatcttgtttaaattgaataacaaaaactcgacatccatgccatatccatgaatagttaaaattagcaacttaccgtcgagatcgcaacgatttacttgctttcggcctaaacggcgaagctctcaactctacatcgtttttgctgttttgggtgggaataagttatcaattcactgtgcgtgaacaagaaaagtgtttgtagcgaaccttgatgtattgattctcatagcaaaatgcctatccaacacagtgaatagtcgaggacgatagtactcgacataaaagtcagagccttgggagagtgtgagtcgaattcgattctctgcttccgtgaggctgacagggtgatccaagtgatttggatcgaaccaatctcggtaacctcgtttaggtatgcgtcttagtatgggcgaagatatgcctttttcgactccaaggaaagcatcgattgcgctctgtttttcggcatctgtgtgtgataatcatcagtatatcaagcaatattaaggatgagattggcatttgacgaaccaagcagcgagttagcgtaataccgcttgatgttttctatcagatccctcgaatgactgttccattgggtagtatgtttgtacgtgtctaccctgttcacaagtgctcctccagagtactgtaaagccagagtgtctccttggtcgtgatacatctatagaattttgcagaagtgtcaatacgagtatcgacggaacaagagaagaatactcaccgagttcaacaagtttgtagctacgcaatcgtattccaaaattggactgggaataatgcctagagcataaagctgatggccaaaaaccctttttcccatagcgaactgaatatgattgattgagtttcgtgcagaaataaaattcagacaagatgcgaaattcttacctgtgccgcgttcgtacgatctaagcaatcgacctgcgatagattagggtattcagtgatagcacccgtcgaattgggttacacgttatgactcacacagttggttcgaagaatgccgctttgtagttgaagagtgtcgcgaaacggtacgattctgtatagatattttgggtttaatacaacgttgctgactgtaaggagcttgaaccaaaactttgtgatactcgcccgtcttctcgtctcattcttccactgtggaagaacttggttatctctaaactttcttccgctatatcttccaaaataccaacaacatcctgatccttactgcaaacagacaaggcacataagttgtcattgaacacaaagttctcaggctcttgttgacaacctactttttggatgctcgagacatgtcgaacggtatgtggatcattttggcgtcttcggggagaaactgatttagatactcaatgcattgcgtgaactcagccagcagcttcatctctcttgggacggcttctttggcctgtgagcgaaacgtatatcaattcagatgttaacatagtatcagttgagtgtcgtaagcagatcaatggcaaagaggccctcaccttgatgagattgacgatgatgaccctgccaccatacgttttaagtagctgattgaaatgcctagcggcagcggagaagtaaggatcgacaacatttactgtcaaatgtttgagggaatgagttgaacatctcatgacgatatcatgctcagaaaacttctcaaaactcactttctatcggcggccggaactgggagccacttgtatcttggctccagagcaaagggatactgcctctatactggacgtagcttgtgtagttaggattagaatgcttgagaggtatagatggggccgtatcgttgccaatccgcgagtcaatagcgactgattgaggtgacaagtttgaaaatctgggggtcgggcagtggaagggagtagtagtcggttctgatacgattctgaaacataggaagaggagaggcggacgtagcacataatcagcaacaggttgaaacgaatcaaagagagtaagtagaaactaggttatgaaacccactgttctgtctcgacctcgtttgcaacatcgccctaaagaggagaatcgagaatgaaaagacagcagtggtattatgatagggctttgtcgattgagtaggtgatatcacacgagatcgaaacaactgcacagtacatgaatagacatacccactcatccgcccctcttctccagtatctagctcccgcgctgaaacgcgagcggcgaccgatcagagttatgtagaccgttcgccctaagatgccaagctctacacatcatcaattgataacaaaatgctgttagacttcaaggcatgcgatgatgatacgtggcaaatgatagaatattaataagaaacgggacctgagggtgagaatacgtactcgcctggtcaacgaaacttagaagatacacaaatagatgatatcgatcaatactttcacaaaattcatcgacacactgcgaacgtacccatgaatgatcggaaggatccagctgcccttcttgtcgccgcccaaaggacctttccaactaccgtgggtctgtgatccatcatcgagaccgaacgcttgacggaggagataatagttccacatatatctatgagatattttgtgaaatgatgtcacatctgcgagggcgttagcagatcgtggaggacatgatgctcgaactcctgtgagattagactgtagactggatgttaaatcataagtgtagcttggtgttgtgtagatggagagttagaaagactaaaacgacgttctttgggctgatcaaaggaggagatctacctgaaatagaagtttttggataagtcgactttctggaaggtcgagagcagtctgtcatgtgcatacgagataaagcatgcgcgccattattttgtgatagttcgttaagtgtcggatcgcatacgtcacggaagagaaagaaaaaaaaaggaagaatatcaagcgaacctggtctcttcagccgtcttctcgtgccctcccttcgcgacgctcatcatgagcgtttcgtcgcagtgatatagataatgccctcccaccagagcaacgacggatcgtttggtgatcaagatctaggtttaaacccgtgcgctactataagtgaccgatttgttttccttagatagcgttgacagtagtcaatcaattgatacactcacaagataccatccctgtgtgaacttgacgaaccctacgagcccgctgaggaacgcgatgatggcaacaacagcattattgattatttgttatgggccccatataagattgttatagctggtttagaacgaggatgagattaaacgaggagacttactagaatatcatgaccttctccatccccccagtccctttatttccctcttcgatcatgcgtagaagctctgcagtctgcctagcgtcgtagattgccatatcctctaccacattaagttcggtaccggagagacgatcgatcttgagtactcgggtccgagagtctgattgattggtacccaagatgtagaagcggctggatttcgagaatcatgaaggagggatagtcagattgcaagtgaaacgaatacgatatgattgacacgaattaagactggccagcaggaagcaagacttacgatcgtgtctcgtacagagtgaatttattcaacgacaaaggtggcccgttctcctggttaaactgtgtctcgcgcatgtttccagtagcctctttggttgaatccagggccgggctggacgatggtagaattggaggttctggtccagtccccaaggggtatgtaccggtgaaataggaggaaggttcaacaggcttctcggagatagtgttcgaaaccgttcgattgtttaacgaatctgttgagatcttcgcatcgttcacaggctgaaacgaaggatgagatggataagtggctgtaggtgtcttgtcctcatcagcatgcgatgattcgaaaggcgaggtaggcaagtcgagggtagcgggtgaagatggatcagctgttcgatctagttcatgagaaaccgcggccttttcagcaagggatgatgaggacgatgacgaagatggtaagaatgtgtttggcatcttgaaggagtatctaatatgagtattaaggcgagtgagcagaaggtgtgagatatatgatgtctgtcgtccttctcatcgtcatcgtgatggttgttgatctcatctactcttgctgaaagaggaggattggcgtcatgacgactagaatcatgactattgattttgtagttgactctcgttcagtttcctattgtccttcatatcttcatctatcacgattccttaaacctctaccctctgttcatcacgttcagagtctttaatctatagagtatctgtcgactcttgactggactggtatcgccaatatgtctgccaaccgaccatctgtcaaagtggctagaccagccggtcgatacttcaagggaaaagcccctcaagaggctccgtccgactcgtccgatgaggaagaggctgatcaagtgtctcagaatgaggaggaagttggagggaacctcgtttcgtccgtatcatctatttccgctcataccaacagagcaaagccgataataatgggtcaggtcaagggagtgacaaaggaagggcaagtgacaagaggaaacaacggtgcgtgttggtaaatgccacctactcaatgattcaacgcgatcccttcgaggttctcacccaagaaaactattcctctgtgtgtttgtagaatcttctgaagaggattcttcatccgaagaagaatcagatgacgaacctccgagacctcagtttcgagctccatccaaagcaggaggtctatcaatgcctccagctgtagttgcttccaacgtatgtcaacttaatttcgcatgatgatgcatccctggtatgtgaggatatttaacatatcaccttcttaccggcgatcaggacgaatcgagcagcgagtacgaaactgattcagaggaggaagcaccaaaggtcgctttgcgtcctacgtttgtcccaaagtaagtcgactagctcatgtcgcgttcaagtggttgaactgttagtttgagctgattttgtttctctctatcctaccaccttgacgatctatcacagacgagcgagagaaacactgattgctcgagatgcaaacactctatctgctgaggctgctgctgccaagctggaacaggaagaacgacagcgaaagcttgatagtcataacatggttgctgagagtttaagaaaggatttggccgagagtgagtgattcttatgttcacgatgattcgtggtttccatcagtctttccaaattgacacgctcatgtttattccttcaatgaaactgaaataaatcaacagaggaggccgttgctctgacgaccgacgttgatgataccgatgggctctcaccagaaagcgaatttcaagaatggcggctacgagaattgactaggctcaagcgggacaaggaggcatctctggcattcgagaaggaaagagaggaagtagaaagaaggagagccatgccagagaaggagagaatggaagaagatttgaagcgtgcggaggagagcaggagggagaagatgaattcgaagggtgctggtggtttccttcagaagttttaccataaaggagcattccaccaggtaagtccatcctttctttgcatatctttattctcccttgcaatataccaagacagggttcatgtctactagactacgcgaactcgtcttgacttggcaatcagttgtcattgacacgcctctctgatctgcctacaggatgaggagattttgaagaaccgagactatcaagctccaaccgaatcggcggtcgatatttcgatgctgccaaaagttatgcagaagcggaactttggaaagatgtcacagacaaaggtaagtactctgaagtttatgtatctgcattgatatgtcggacaggtctcttggattcaaaccctgatccttctctcttcgtgtcgatattcttttctgtcagtacactcatctggcagaccaagacacaaccaaagggacgggaggaatagggtttaacactcggtcgacgggcggcagtgcagagggatgtttcaactgcggaggccctcacctcaagaaaggtgggtttctgcattgatctatcttgatcttttgttcttcctctctttcaaacaccccgttgctcattgatcatttgcctctcaatacttgatggtcgtccaccaatatacagattgcccacagcttcagggtttccaatcctcatcttcgacgtacgctacatcaactacgggtgctaacaacgcgtcaggaccttcgcgctcctggggggcttcatccgagtccagagactatcgagaccgagaccgagaccgagaccgagaccgagatcgagatggttcatactctcgcagggatggaaacagggatgatagagacaaggatcgcagttgggggcagtcgtcgcgtagggagcaggatgggtcgtatcgttctcgacgtgcagatgactacaggcaggatcacagaaggtctcgatctcgatctcagtcgccaagaagagagaaagaaagaggtggctactctcgagacgcaggacgagagaccagaagagaggagtcatctttcaagactggtgacggaaggagaaggaacaggagtagcgatcggctcgaacaggagagaagggatgaggatggcaagagaatcagacgcggttgagaaaagaatacactctggtgtctttagcatttggcttgaactttcttcccgaaaacggttcatggctttggattacagtacaaagctctgtatacatatgatttcaacgtttgtaagcgacggttctactttagttttctctccctcccatccggaagcgatcagttttctgtggaaggaaagcaagagagacgaccgataagtggatgaacagagagttgacagaaagaaaagacgaagaaaggcataagatgcgatacgtacctcgccattgatttctacaacttgtacaacggctgatgcagatatatcaactcagaaatcagtcgagttgtactcttatatatcatcaagaacaaagcttactagaaagttgtcatcggctcatccgcactcctgatttgaagctgcatccaatatgccttcatgttgtcacacttggggcagcgcacttgatgtaaacgagagacgacaggcgacacatatgaataaaacctatgttagatagagaccaaggagcttatgatggggataggtaaagaacgaactttcggtctggtcaacattttcccatgcttcatctcctccaagtacgtcatcgacttcttttcgcttcattgtcgttcttgtgttgacctgaaggcattgaaatgcaagaatgaggggtagagggtaagtcaagcccatgctcccaacagtttatgcagaactataaagccaccaacctgtttgatgattggaaatcggtaggtacatgattggcaggcccatgtttggtctcccgtggcagtagagattacgagcatgtttgcacatatcggacagaaaatcatgttgattctgaactcgattcctcggtgatgaatggttgatgtctacaactaaacgagccaaaagcaaaagtgagaatgaagtatacgacgatgaaatttctgtgttagggttatatgcggaggggtcaacagtagcctgtttatgtcctcaccatctcttctgttggcacgcgaacatcatcaattcgaggatcgacttatcaagacaatgggaaacgcaccttcctccgcctcgggatctttttcagagaatacgaaggctttacatgtgctccgagtggcagagcaaagtcctgctgcagaggcaggcattcaaccatgtacgttcattcaagcttacttgttttgaacgtgatgaacgtttgtgcagaaagcgatacggatcatagtttcagaatgatgggctgacgggtggatctctttgtgttcataatcgaacgctgccagtctttgactttattgtcggaatcgatggtgtagagactgtgaggtcgacatttgtttcgagtctgcggtgtccgttgaatcatctcgactgatactgatgtctgatatgacttttcccggcgtaccaggacctatcacctgaatctctctcttctacggtcgactcgtttgaatcccgaccgctcacccttcttgtatactcatccaaaaggcaggagacacgtcgggtgacactaattccttcccgggcatgggcgagcgaaggaagcgaagcgggttccccgtacaacagatcctctcgccctctaccgccctctaacccatcagcgtcatcagctcttccgccgacagagggttcggctcattctcatgacgatcattctccactggcgaacagccattctcatgatgaccattcatcaaatcgaccgcaccactctcataatcatagtcaagcatcggtcatgtcccagtcccagtcacaaccgtctctattgggtttatccctgaggttttgcaccccccagtcggcgttagagaacgtgtggcatattctcgagattctagagggaagtccagcggagagtgctggtgagtggttttccttcttggctcgtatacctcaccacactctagcgtaagctccaactcaaaagatggtttcgtgtgtgtgcgcggacaatcaggtttggtcccctatggggattggatcatcggttgggctggaggtgtattgcaggatgagaacgatttttatgatgttgtcgaaggagtaagtcttgattgtccactctctctctattcctgcgatggccgcaattggaacaatattcttcaaattccgagcttatgtttggcgttgacgaatcttggtataactataaagcatgtcgatatgcctctaagactgtttgtctacagcgctgattttgagtgagtatctgttgatcttgtttttcttcattccgagcgccgaatggtctgaactggaaagaagattagctgacagaaaacatctgatccgatagcacgctccgagaagttgtgttggttcccaatcgacaatggggaggcgaaggtctgctgggttgcggagtggggtacgggctgttgcatcgaattccaaaacctcaggattcgggtcgaccaagagagttagatgagccgagtggaagaaggacgtctgaggtatttgacctaagcagtgacagaggatgaacaggacgacgcatacagactgtgtgtatatgtctatcatgtctaccatgtctatcgtgtctgttcccgttgtgtgttctttctgtactgtgtgaaccgatcacgaagaattcaaagaaccgaccggagcgcaacttggatctggccaggggactcgactgtaaccaatgtgaccacggtgaaattgaactgctatctgcgggcttgtcgggctgacggatgagaacggccgtgcaaaataaagagaactgagtcaatacaatcacatgtcaatacgctttgtgctcgatttaggttacaactcgatcaggcacaccgcaaacccacctgctcaaacgccccggtagtggctgacgtaatgaagccagactgtctggacgcgtaaccgctcccagcccgcgctgcctgtcatacccttacacccgcccgatcgaccttccttgcctctcaccttcgtccctcatctctttcgttgtttcttgttctcccttcttactgcaaagacaacatccacagagaaagaaacatttcgacttgaatcatagttagatggatcgttcggccatcgattctgttttgctttgtctctaggaccctattcaatatgtcttcaactggatcaaacagtcaacactctaagctctcaacttcgttcgtcccgtcctctgccaccaaatcacacatcccaccaggaacgatccctctcaaacctaagaggccgccatataaatctactctggtcgacaaatgtattcggtacaacatcaactccgaaggctcgacggcagtcctgcaaaaacgagttcagttagtgtcttctttcctttatttatgaacactatctattgtttgtttctgaattctctgttagacacaaaagagaaatacctgtattgacactattgtatgcgttgcatactccttttcgcgctctctcctcggacaaatcttcactccctcatccagagagttcgaggccaaaaatgatccacccagattgaggagaaaacgaaagtggtggacattacccgatcaagatcaggtgggttatacctttttggtccctcagtagatcagtcggaagagaaggagaagagaaaaacagaaggcgcctccaagcctggacaccgctctcttaagagcgcgacattcccgtatgatgtcctcggctctgcacaaccggaatccccatcgtcctacccgagtttcagtccgatttttatcacgacctagccatcatccggtctcacctcccgactcttgacaaacatattctgataaatttgtcaacgttgttgatctcttattcgtactcgatgactaaatcctgcacttccttctcttttgggtttgctccttgttttcttgtttttgtttttccttttccctctccttgctcagccgattcctatccaacctatagtcctacaagaggtaaaaagcgaaaacaccactcttcaaaaaactgttcctccttcaccgtcgacatcaaaaataaagaccactgcagtctcgaccaggacgccgatcgcgaatccaactgagttgccattgtttgaccctcaattcgagatgcctacaaacgaagccttacctgagcctggcaattatgcaggtacgcgttcctctttctattttatcgccaagttattcgtctttatctagaattcgacggctgatcgttccaaaacgcttgccttcggacctatggccctctagattttaatcctcttctgagtttccctacatttcccttcgatcttcctcattcaggcaactctctggtcccgtcatccttcgacaaccccaacacttcctctaccatgaattccgatctgaatacgagcttctttcagtttttccacccatcctcaaccacttctccaacagctgatgttctgccttctctcgacagcacatcccagcctactttgttctctgcgttcgaaacatccgccctagcttctttcttaacttcttcgtctgatgaagcgcccttcttgttcctcgatggtctcccttccaacgatagtaatctaaacacttcagtccgtgacgatggaccgttcgccagcctggtgaggcatcggggtgcctgggatttcaatccgatactacctaaaggcctgcccatgctcggcgatctttccaaactagatctttctggatcttcgcccaaggtaggcagcgaagacctgacgtgtcaatcagcggtcgggtctcaccattcatctctcaccaccgagcctgctggtcaggatcggccactgtggacgacaacgacgccgtcgagaaagatttctcgatcttcgtccagcttatctaacaatgttccccgctcacaatccaaacggatctgctcccagtccaaccagaccgacgatgagagccctccgtctcggtcttccgagtcatcgtccctccacacgccggaacgactttcgatttccccgtctcaaccacataagcgaccgagaacaatgtccggcggatcgggtgtttactcaccagataaaccttcacagtcgacattcaatcagttgctcagccaacaaacatctgtgacagaagacaaagatggttttcttttgtcaccgttggtggtcgaacatgagttaggtaggacatgcgatcaggcgctcagtccagcgtccgtcgccgcgtttgggcctgtgggaaacggagagatggaggtggatactgaagtgcaacctgtggaacctaccggacgatatggtagatttttgagtgcggtaagcctttctatcgccgtactctttttatcggtctttgcacagaactggttttgtgtactgatgttggatccctcgcaaactcccccctttgtctaatacagagtgagaaacgtgcaaatcacatcttgagcgagcaaaaacgaagagatgctatcaaggacgggtacgtgctttgccgatattctctacatatttcaaacttcgcgagctaacatcttgttccatcgattcgacaaattcaccatagatactccgagctttccactttgctttcccaagcccaacttcctcatacctgggactttactcagcctatcccgtcaggttcgcttgcaatcgaccgatctttcaaacatccccgagcagagtccaaatcgagtgtccttgaaagagcagcaggactgtgccggtggtatgagcaagggaacaaatggctcgaagacgaggttgttagggtcgagacaatcctagagagcagagcggagcgggaacgctgactcttttctcatttttctctctccctttccttcttggcaatctttggttatacacttttgttctacattttcttatctacgttgtacgtcagtaatccgtcacgaattcgttacccatttgtattctctttgtgttattctttattgtgatctctttctgtacttcctttcaccttcttcattcattgtctttgtcccgtttcttcctctttattttctcctcattcatggagcggcatttccaactggattttttttctttcttttcatatcttgatatcacttctttccttcgtctcattcaatcatcctctgctgtcatcctcttcttctctttccttctgtaacttttagtctttccatgacagtccttgtaaactgtataatcatctttattgtatgtctcaagctctatgacagaacatcttcccaaatcctctttcaagaataatcttcaaccggtttaattctactccaaatcacgacgcctcctcttctccgctcatcgtcctgagcccaatcgaacccattccaaccgctgacccaggtctgttcgaatcctctttcctccaggatctctctcaccttgtctccctcgccattcggagcagaaagcagtgtctggaagaacgctaggtgggtcggccaaggtttgatattcggattgagccgacgaagagtgtggaacgtccttggagatacgacgggtgaaggtgggaaatacaagaggagatatcgagaaggagatgagtagaatatcgactccatggtttcatgcagcctagcagacgttctgtagagaaagattggtttgttcgttaatccataagtccgcaccacaaagagaacgagaaggagtggttcaaccgttgaaccgaagaaaatactcgaagcagagagtgttcaaggtgttgttgaagttctgagacctaccctagaggtggctcacatgtcaagaaccagctgtcttgttctagatcctgtctatggagcatgctcatccaaggcgtggaatggcagggcataagcaaacctacactctccacttgagactgggagcgcagatgggcgatcacttcgtgctgtgcggctccatggtagcaagacaagtacacaattaacggaatttgtgggatagtcaaaaagaaaaagagccggctgttgagtgtagtcttgggaggagacgaggaagactcaggcgtcgattcatgagaggaactggacggagatggccggaataatataggtgcgagcttcaaggatgtcataaggtgcaacacgggaagtaaaggtaagagaaacctccactccttgtgtccaaggagcgaatatactccaatactccagattgccagtccgagaaggactaggggggtctttccatgccttcccttccacacgtcgagcagagaatatagaaaaaagggtgtggctgtgaaaagaaggataggtagggattgagtgatatgatagtggatcgaggataaaccataaaagtgagaagtcggcagaagaaggttgtgtgtaataaatggtagaagaggtatcgtcaaaggtattgttgcatcatcggcaggaggatagatcgccgtgtctagtaaaatcgatagaatcaagaagatcgatctgtcagagaaaaccgcaaggcgtgtcagtacacgtacgttctaggagagaagatagctatacgaaccctatgaatgtgctttcgagaatcagccttccacattcttttggcttgccttctttccatcttcgaaccaaaagctcgccccccaagaatatccaaaatatggcgttggtcgggcgaattatgaagtcgacggcagccaaacttagggcgatcctggttcgttttctgcaatatttatagggtccagaaataaaggtgagctcatgcttgtatgattaatccaatgaaaatagcagggcaaacgacctttcttgaaaatctatcccggtcgccaatggtcttgacttgccagatggatcgtcgttgcttatagtttcttgaatttgtgggcgcgctgagggaaatggccagaaattcagagcgcaaaccataaggacggtttcgatgctgttcacgaacggtctcgttagcgcatgagcatagaataacgaggacaggctgagtatcaactacaaaggggaccaggtcatgatcatcagcgggcatgttgcgacaaatctacacttggtacattcaaaacttactgccgtccgagcaatcgattggttgaataatcttgaggcgagagtgtatgtcattgaatcgcatatggaagcgagtacggccattataagtttaggaaagaatatctatttttgttgagagtcaagctgcatttgatgagaacgcttgtcgcatcaacaaactcaactagagaaagacagaagtagagacaaactaaacgaactagagcatttccttcactcaatcctagaatatctaagcaccagtaaattcctgcccaaaaggctacccagagtgatcctctcaatcgaccttcacccatccacccccaccagacgcccggaatctttgtgttcggtctccattcccaggtgagatgaccataaccaaaggcgagttgatgagctggttcgagagactggtacgactcgtctggctggaagggcgttcgttgaactatcgaaagcggtaggcgaaccagaacaagcgccaggagaaagacgagaagcgtgttgttcttgttccaatcccccatgctggcggtttgtctaccgcttaaggattctctagcgaccggaattcaagatgacgagggatgtaatcatgttgcgcggtcacgtgattagttacatggttacaactgatagatcgatgtcttcaacttctctcggtcagtacttcatttccagctcaatcattgaacctcttttctcgcttttaacaaccatgccgaaggatccagagccctcccatctccagcgagactttacgtttgccgctatcaaatcaggcatcagaacagatggccgacggctagacgagtctcgtccgtgggatcttgaatggatcggaggagaggacggcggggtggagtgcaggttgggaggtacttggttcgtttgatctttttgttctctgtcgcccgtcgtacaccaagggagcatggaaggttattatcatgaatatcaccgactcacgccaacgcatttcgtttgggtatgaggtttcaatagcgtttttgccagagtgtcgtcaaccatcgtcaggccaaaggctgagagaccgtacgaaggcctggtttctatccactttgagctttcacccatggcgtcaacctcgtacgagaccggccggtaagtgacatatcttcgtctactcaccgatccagcctgaatgagcgatatcaaccatttggatgagctccttgttatcataacatcctcgcgtctcatgaaacattatgcttagtttctcatttattcctttgtgcaactcttatacactcgtagttcatcggaggaagagaccaggctctccctcctgcttgataaagctatccgaaagtcagattgtatcgatcgagaatctctttgtataatagctggcgagaaggtcagttgcatttattcatgttttgtgtctctttctgaactgccacaaagatccttgaacgttgcccttacttagtctctttcttacccttgtctgtacaggtccttcacttacgtataacgattcacccgttgtcagatcaaggaaacctactggattgcgcgatgatggccgtcatggccggtcttcgaggctatcgaagaagagaatgggaggttgaaggaggagaagttgtggtatttgctccagatgagagacctccggtcgctctggctctgcatcatgttccgttatgtatcacatttgcctactttgaagggtaagtttccttgactttttacttttccagatgaccacccacagatgtctatcgacaagcttacctctacctgattatccctgcagtcttcctccgattctggatccctctctttccgaactacttctctctccctcccttttaactttgtctctctcttcaacatccaccacgcataccgcctcggccgaactcaacatgctttcgaaaacaggaggtgtcgccttgagccctggagacctattggatgttgttcgattgggtggagagagatgcgcttcatggggtgcctggttggagggtcgagtcaagaaggaggtccaggcaagaggactggaaggtgctttatagatagacaagaaacaaaaaaaaaacagaatccaatgaaaccccgatataaaatctctcctttgttcattggcattcaagcattcttccctctggatcaacatcagggtcttaattcaatcaatgcttattttcgtttgggaatacatcgatggatagagtagtggttcataggatatgatttatagtgggaatatggcttatttgtaaataccgatgaggaaagcgcgatctacaccctcttttctctttctattccgagcgcatccatgagctcatcccaatgggaccagaaagcctgtgtatgatgggggatcgagaaagacgggcttcttaattcatgttgcagtatggtcataaccgatgaggaaacaactcacaagaacaacttctacggcaatgagtgcaatgatgataacctccatgtcgtgagtagattgctatatgggatgaagaacaacatcctgatgagtgaaaatgaaatgtatgaaggaaagagtatacaaacaagcgaacctcagttagaaggtcttttagtgtacctaaatttcatattagtagaattcagaatgcatcagtgaacacaggatcaaaagttgatgcgcacaagatacagaaagcatgtactaaccatgaagttcttgagcatggctgatcttgtggttgagctcttccactcgctggttaacctcaagagctctaacgactcttttaaaatgttctgcagaatatcaaacaacgtaattgagtacgatcctataagctttttttttaattcaatggaagacagcgctgaccctcaagaataggtggtgcatcccagaaaagctcaggtgtgtctcctactccttgtaggttgacggcttgccgaacaacaagaagttctccgagtctatgagaccggaaggcttggattagaacgttgcgctatctagaaaaccgagcgagagaatcgatgtcgttgcatacagtttgataacctccttacgcttgtatggaccctttccctgggtagccagatactggggaacaaattgtactttgtttagtaagttgaggagttgtcctatatatttttatagacagagaaacctcaggctgtcaatagtcacatttcttgaattgaagacatcagtctaagaagacagaccttctatgacagatagctgagatgatcgagaaatggcctcggaaaacgtatatcgggtcaggagggtcgactcgttgggagcagaggaatgtttggaagaaagaatgatgatgtctccctgaagacgagtgtttggcctagacattgacggaatgaagtcgaggcgtgtcaacatatgtttttgagacgttgaatcagatcaaacggtactgactctgcaggatcgatgtaaaattccaaactctcgtcttccacaacctcatagggtccaacctcaaaacctgctggctttgacagctttcgccaccagtttagcgcttgatccctctccaatccccaagtgacaaaacttccgtttcgaaggatccagatctctcctgttccatccgagccaatatttagatttgaggaagtgtttaaaggaaccctccaacagtattcgctttcacccgtcgagacggcttgcgctcctgggggaagggaggcggccaggcgatcgaggtcgtacttgacagcggttgagaaggaaaagatatgtttaagagaggatcgagtaggactgggatgaatcctgataggctttgattcttctctagcggccttacggggtttcggtggttgttttcgaggagtgccaacagcaggagaagaacttgaaagcgaggccacgggtgtagaactagatgacctcagcgaagaggaggatgaactttgatacctagccaagatcggcgataccgtccttgcagcaggtattctgagagctccagacacagactgagtctttgccctactgatgagggagcgcatgaaaggagagagcatgtttctgtgatggacacacggtagaatgaaagatctacttgctcttagttatagaggaagagcgcaacagagcaaaagcggatggccgagaaatcacgtgatttcggcatcatgtgctgcgtcaccgccgtcaggatccgggttgttagagttcaggtttggagggtaacgatgaggctacggaagttgtaaccacacaagactcttagatttcaagggagaaattcaggctctcaggactgggaaataggatagatagaatcacgaaggacaaggacaaggacaaggactaggaaacaaggcaggcatcaggattaacaaaagattcaaacttgggagactaagctatggttggcggaatgattcccgtattatatatcatcctcagactccaacggttatacataagaagatagatcacagaaggtgcttctagcacctgcgcttgaaggtcatatatttgcatgttgatgtaatgagatagcataaggaataccgaagcaagaggaacggcagaagcaggagaaggttaccggagtgtaacactcaggtcacatccctgacaaccgcttatctaatcacgtgttcatgatcttcaaccctaatcatccgtcgttcaatcctacacacatcttatccacgacaatcgaatcgaacagcactcactgcttgcgaccatgtacatctgggacgactcaggaatcgtacgagctgttgctagcttagtggcatctttctctgttctttcttcgtcgttcagatcgcctatcaatgaaatatccttgagcacagattctttcagacaacccccgagtgaagtagtcgatcttattgatccgtgagttaacatcgctgaatcagaaaccgtttgaaattgtatgttctgaaagtattctattcaagtcgttctatagtctagtgggaacaggtggggatgaacccaataagtctggcgggatgattcctactacaggttggtagtcttaatgacgcgtcgcgtaacccctcaagagccgttggactcaattgactaacgagatctgtatccagctcctccgtttgctatgaccagatggacagctcagacccgacaaaatgtaagcttctgaattctcggaagctcatatatgcccataggttcacattcttgggcgattcaaatgcacgagcatagtttgtatcaagtacttcatataacgtgacggatcctagaatacacgggtttcaaggtacctaccagatgtttgctcttaatgcgctgttcgacgtatacaactgagtgctcctctttatcgtaggtactcatcaacctgccatctggatgggtgagtcaggccaggtcgtcgtacaggctgggctcggaacagtaaccccggcgtttcaggatcgaggattggcgttctctcatgacgatgaggtcactttcccttcttactaccgtgtcaatatgtcagccggccagggaggccggattataggagagcattcgtcgagtaagctctttccggacctattcgttcaggtgtcggctgtcgttgctgttgctactgctgatggcctccgtttccggtccatcccaatgtaggctctcgggtgggccacatcagatatacgttccagaacacaacactgtctccctttgtcatcgttcaatctactcgtaacaccatcatcacgtctgatccttcaaacgtcacagctgttctcggtggatcggcgtacatcaatccttttcttcgcgagattgccggatctaatcctgaacgtcaagattctataataggtccctcctcagcatcctcatttgcagggtattatgtcgctcgattctccgaacctttcgcctcgtatggaacctctaatgggagaactctgtatcgtaacacagtgtcactggaagagggcgaggacatagctggatgggtaacttttgtatctcatgttcaacaagtcgaagtcaagattggaacaagcttcatcagtatcgatcaggctaggaggaatttggaaagggagataggaaaaacatggcggctggaggacactgcccaggcgtgtcgacaggaatggaaatctgcgttggagacagtgacgttgaccgggacagacgctgatcgagaggacaagaagtggaagaaaattttctatagtcagcatatacgtttgatactgcatatgtgccatgagtattcagatctaactaattaccagttcgttctttttgtcattacatacagccagcttctggcactctctgcaatatccttacgaagtcagtgaggagggaaggtactactcgggctacgatgattccgtgcataccggtatatcctattcaggatactcaatatgggataccttcagagctgcctggccatggcagattctttttgttccagagcgaatttcgggcatgattaattcgatgcttcaagattatgaacaaggaggatggctgccgatgtggaagaatgtagtagagactaacatcatggcaagtcacacccagtttgacgcttctcggtctatctgctcgtgttggcacactctctaatcaagtttctcacctctccgtgctttatagataggcacacatgcagactctctcattgcaactgcgatggtgcgtaacatgacttgtttcaaccaaactcttgcatatgaggccatcaagaagaatgcagatgttccccccgtgaacgataccacaactcagtatgtttttttaggtatcaatctgatgtctttgacagtatctgaacaatctgatttttcatagatacgctgatcgagaagaacacaccgattatgaagttcgggcgggtttgactttgtacaaaaagaaaggcttcgtcgcccatgatcaggtaaggaagaggttgtgatacatctcagataatcatcaaccaaatagataactgatgcctgaatgagacggtgttcacaattcagcacactgaggctggctccagaacgctggcatatgcatatgacgactatgcggtatctgttgtggcttctctgatgaaccagagttctgatgccgagttctacgccgatcggtctctcaactacaaaagaatatataaccaccaaactgggttcatggaagcccggctggagaacggttcatgggcaggtccagatgccggttggacagagggagacaagtgggcttatacatttgatgtcctgcatgacatgaatggtaagttttatttttgacccggtttgtagatgtagctgtagaatcgtctgacatatagactttggtcgatactctcaggactgatcaaattgaagaaaggcagcgaaaagtttgccgctttcttggatgaacactttaacggaggacataacgaccacacgaacgagccgtgagaagcttcctcttctcctctttatattttatcagcattcatcacatttcgtccttactggtcacatgttgcgcattcttcagatctcatcacatgccatatctgtactcaatagctaggtttccatcaaaatcagctgagagagtacatcaggtacgtctttttaggcagctggatatttgatatggtgagcctattgactaaagaatatgttcgcgcgataggttgctcttctagagagaaactatggccttggccccgaaggtcttctggggtgaattttgtttctagcaactgggcctgcaagaatgactcgcactcatttctaccccttgtctctttcgccggtttgttcaaacaaaagcaacgaagattgtggacagatgagcgcttggtttctattctcctcgttcggattttacccaggtattcaatccttgtttagtccaccttccagtcagagaaacccgtcctaatgccattattctctgatttcgtttctcaaagtaaatcctgcatcaacagagtacatcgttggatccccgttgttctcgaacatatccattagtcttcctgatccacacgacacctcatcaccccgaatcaaattgaatatcctagcgccaggcgctccgtacaagaagtttattcgatcgttgacaatcaacggcaagactgtggaccaacctgtcattcaccatcaggatatcctacaagggggtgtctttgaatttgagatgagtgagtcgcctactgattgggggaccatatgaaacacccaattctacaagggccatgtatccaccgttatcggttcaggttgctctcacgcagtcaaaaaccatacaactttgaggttgcctgtacaactagattctaatgatgtcacagtttgtgcgagaaaggaatggaaacgatgcaagatatagagatcgagatgagtaaagaaggaagagaagtgattgaaaagaaagaagaaaatgggatgttatatcaataggtggtctcctcccatccccacgcatctaaatcgtcaatgacgatggcttgagggttactggattgattgttttcgttcctagagacacagatgtctctcatatctggtaagaacgagcagctctcacattctcctgatgagtaagagggggctgatgggggcgggaaagtggaaagggccactccctagaggtacacgagaggaatgttgaaaacgttgatatcagtattgattcaaacacacactcacacacaagtacaatgccattttttcaactcacataagaagccacgtggtatccttttttacagccttgaacttcgataatttcacttaatcttccttccgtgctacttccatcagagggaggagaagttgaacccgacagaggcacccaactccaaatgatctcctctccagctctaccttttaggtccacctttttatgatccaaagtgtacggcgggatttcatcttctctagtgttggacgaatcaaacccgtttcgtctacagagttgacgaactccgacggctgtcgaggccgaggtggatgtggagtttgaagtcctggagatatgagaagacactaaatgagctgagagggagatcgaatacgtcgacatagtaaacgaaggcgtagtgttagaagcgatggttgaataggaggaaggtagaacacattgaggtgggtctcgcatcgaatcccgtataggtccctgcgggccgtcgaccatctgtttgacggagcaaaaacacagtgtcagttcggatcctatggtgatatttgacctatagtacaagactcgcctggcaaccaggataaattttccaccaccagcacgttcgttctccatcatctccccaacggcccttaaagtttgcccagctatcaggacctctatagacttttcttcgtctgtgagccggtgtggaggtctcttcccaatatggtaaaaaccgctggtcgagaagggtatcccatctttggccgcgggatgtcctgtagccagggatagtatatcagaatccaacacaattcgggtaaagagaaagatcaatgaagagtagcctcacgagtcgaccaacttgaaatacttgaaagcctgtagaggtcacatagagatgagttggaagatatgattgagaagaaaatatggaagatatgacctacagaggcatacacgtgttcaccttccgtcggccatagtccgtgagaacctgagatggatagcagaaaaagggcgcagagtaaatacctatacatgaaatgataggagtagaaggaaagagtttacccatagcagcatagccaaccggtcgaccgtcttccttcgtcactttgttccacggcatggttctaggttgaccgatgtgtttgaaaaatgatccaaatgaactcttcatcttgttgacgctcagttagagaatataaactgacccatagttgaatctgcccgtgtgagagactagaagagaaaggatatagtaagcagcgtaggacgaggcagcgagagaagtaagggtgagtgaacatacgataatccacgctgataggctcgccgtctacagtcctaaccatcatgcactcccaatcactgatgtggtttcctacccaaccgacgcgtgcgccgacgaactttccaaaattatatgggtagtatgtccagtaatacaaatcgaccacgccctctttactcttctcgaccgcgacagccaaagaggaccaatcgcctataggtctgtgctgattgccgtagacgcgctcatcgatctcaccaggtcgggcgggaggaaagaaaggttgggcattgtacgcgttttccttggcggacggcgcgggtggagagttgatggcgaggtgaacacctgatccgtggtagggaagacggtccaagttagtagagttgagtgacgtgggcgaacgagaaacaggacgggacgagtcgtcatggagagcctgaaggagggaaaaagaagcgaaaaacgaattgagagtgagaaagttagcggtgtgtaagtgtttgtgtggctgaatcttgagcactcaagctgaccgtcaacgatggaagaaagtagtcgatcgaggcggggaagaaccgttcgtccttgctgtgtcgagtcagattggatcagcttgcgatcttgaagatagataaggtatgaagtggaagagagtaaactgacgcaaggtagataatcggtgcaaacttcctagctaggttatgagtagtatcatcattattgctgttgttggtggcagtagtgactccagaggattcagccacaaacgggatttgatcaaacggtaggccggcagttgaggtgatcgacgagagtatgtacaagaagtttagagctggcgctgctgatgttatccacatgaaagaagactataagaaagagagagaagaatgatgttagattggtcgacacaaacatggtagtgggtaagaaacaagcaatggaattatgaatatccaactcgaaggctaccaccatgaattgcgtatgtccgcacacgcacacacacgcacacagacatgctctctctctctctctctcacccaactcacctagctgatcttgatggacgaaagacggtggacgttcaagaacgggatgttcactctgtcttccaagtgtgcgcttgacgcccaagccaaaacgcctggccgggccgagatgacgttcgtgcgcccgaaggctgtgcttcagttacgtaataaggtattgattacataatcattaccttacgtaatagaccttcatctcatcctaccccgcttctcttctcgtcagatctgcaacatcgtccagcatccatcatcccatctgtcgactctggaggagccatcatcgccgttggccttctgttcgtctgaaaagcagcacacaaaggtattaatactcattagaaactgtcaccatgaaaggaatcatcaaagcagctcagagaacgcctcacaatatcacctcccgggtgggaatggccaagagtttgtccttccgcttgtgctttcgatatctgttcttcttgtctcccttggtctatcaatccagggtcgtaagtctttccagtagatcgtagctgatatgtgtgctgtgtttttcttgtgtttgaatcgtccatcgctatccacttcgttcctcacactctacttctgtttccttcagagagcaatgatccagaattcgtaagccacgccgctgttccagccaacctaccgaaacatctctcgccattcctgaccactcctcattccttctcgcctgacaggatgatctagagcgaaagtacaagtccatcgaggccggatgtgaacggctctacaaggatgctcgagtcttccgagacggagtgctctgtcagtactttctcactctctcccttctgcgcctttgtcgcgagcctagaacgtttctgatacgtccacgtccttcttttccctctatctctcccgctcagctcttcttctctctggagatcagttctctgtctcttttacctccctcttttctcccctcgggagcgagtacgacctcatcggcaagtttcctcaggcagagaacactatcaaacacgcgactcagtacagctcgctcatgtccgagctcaggactgttctcagtccagagttggagctcattgatgccaggattatcggtccatgcaaggagctgaacgatgttcttaagaggataaggaaaactatctccaagcgagaacacaaggttcatctggagcttctatcacaatcccgttcgccaagacttgcttcctgccgcttatcaaggtttttgtctcttttgcctgccctgtctcgcctcaacagttagtggactatgaccgacacaacaactcattgactaagctccgggacaagaaagaaaagtccatgagcgacgagaagaacctgttcaaggttcgttccgttaccatcctgaacaaaaggcgctcgatcgaatactgacagacagatctatcattctttcatgctctcagtacgaacaagacttcgaactagccactgaggagtatgatcactacaacaatgccctcaagatcgaacttccccagttccttcgactttccaccagattcatcgatcccttgttccattccttctacttcatgcagtcagtccctctcgactctcctctctaccagtctttctagctgcttctagctgcttctagtgtctcatcagcttgctttcttccagactcaatatcttctacatgatgctcgagaagctacagtcattcgcagatggaaaatacgatctttctagaacagatatggacaacatttacgacgaagctatcggagacaccgctgaggtcctcgaaggcctcagcgtcgttcaaagacaaacttctactggtgggtgaacacttgatgtttctaggcgtcgcaatcatgtttctgaacaaaccacttattttcttatctgctttagccaagatgatgagccagcatggccacactggacttggtcgaaagtcctcctcatcctcctcgaccttaggccgaacggcgggtagtgttgctgcgccccctctacgatcgtctagctcttacagctccgcgcctcctccctccaggacagtagccgcgcctcctgcgtacaccgctccgccatcctcctctgcgtacagtggtgctggaggtgtcaagaaagcccccccacctccgcctccgctcaagcccaagccaagctacaacgctcctgcgcctgcctatgtagtcgctctgtttgactttgaagctcaagtgcgttcctcttctcttcgtcaaatacagagttattcgagggcttcatggttcatggatgcggagaaacaacatcaacctaggcttatcatgttcttttcgttcgcttttcttccttaggctgcgggcgatcttggattctccgttggagacagaatcgagctcatagaacgaacgccctcgaccgaggattggtggactgggcgactcgacggccgagagggtgtcttccctggtaagatattcttgttctcatccctttcatgttcctgcttgatatcaaagacttaatcgtatctatcgtctcaaccaggtaattacgttcaagaggcataaatgtcagttctggcttccgtgttctcacgtggcgaactatcaactccctccattctctctatcctatcgaacctactctgttctacatagctattttcctcctgcctgccgtctattcttttcagtcatgatatctatgtcatttcagtctcgtgaattagagtatgaagcacgaaaagaaatgaagcgagaatcaacggattactgcgtcagacaagaagttcaacatatgacgttgaacaaatagagttacgcgttcacgcttttaaccagacccagaccatcatctctcgatatgtctagcttgaagaacatccctcaagcgatcggtataccgttcaccaaaacgtattcctctaccccgccgactagcactcaggttcatcaagagcttcatgctcgagagcgacgacgacgatcatccctcaacgatcgtgcatcatccaactctcaaccttcggcctactccgcaaacatagcccggcttcgagtgaaccagaagaaaaacagatattctgatatcttgccatatgatcgaaccagagtgctcgtagatgggaatgaaaacgaggaaggttatctgaatgcgaactgggtgaaggaagtcgatggggagagatcctgggtggctgcttctgtgagtttggtcgttagagagatgaactatcggtctcttcgaaagctgaacgtggcttgtgttcttgttcttctcgaacctaggctccgctgccaaacacagtggctagcttttacaccttcctacttacttccaatactcagaccatcgtccaactgacgggcttggtcgaatccggagttctcaaagcggacccctatgtaccctccgattcgagcccggtatcgttccccgatgctaccctacctgggtccatcattgaggtccgcagggtgaatgttgaaaagtatcacgcagagacggattgctatataacagaactagagatccagggcagaggatcagtcaagcttgtgaaacacttattcttcggaggttggccggacagaggagttccaacaggggaagacagcacgatgagactcatagagttagtccatctttccttctttcttgcttgggcattgtcgtcttgattcaaagccgatccatatcgtgtctttccttgcctacatcgctctcgaacaaccgtaaaaacctgctcgggtgaacagttttattaaattagccaactccctcaactctacttcacgcgaccctctgggacctcctattctggttcattgttcagccggtgttggtcgtacaggtgcttatatctccatcgcctctcttctccggctatatgcgaccttcaacccttcgagatatccttcgcctccggagagtgagctggggccacttcctgatctcgtgaaagacgaccctgtagccagagtgagcgccgttttcttctttttctccttgggcaggaaataatgcatgttctccattcgagattggtatgcatccaaagatgactgacaccacaagtcgatcaaaacctcgttggtgatagactattgattattgccgtgatcaacgaacaactatggtccaaactgtacgtctgtttgccttataccatcgcttcatgcatacgtcgtcaaggataactcattttattctcctatcggtacttgtgttcaatatcatattcggtcccaattgatatatatatataaaccccatcaaaataggctgagcaagttgacctcgtgtgcagggcatcggatttgatactgaaagacaggttatggaactgagctcggtatctgaagaggaaggcatatggaatcatacaaatacatggaggatatatcctttgttcctatcaatagagtctgtgtttgttctcgtctacgaacaaagccaacgaccgaaaaaatatagaaaaactcgtgtggttacaaccaatggactcgaaagtacagccagagaaagagggagggagacagagatgttaaaaagaagaaaaagaaaaaaagggagatacagagaagcatagaccttcaaagctatcctgtcatttcagacgtgaccgacgttacgggtgctctaaaacaaagaattgaacgaattcagatcgaattgatcactaaaccaatcaagatcagatccctgaacaattgaggctgataggtcactcatcgacaacggggagaatggtatcgggactgtagagaacaaattgtctgagctcagagtagccgagaagtcaatcggtagatggacatttagcggaggaaccggttcaatagatgtgttttctgatatttccggaggctcattgaggtggacagtcgcaaggggaccggaggaggaggatgagggtatcgatctacggagaactttgatggctctctccacctcggcatgtgtagaagcatccgtcgatgactttcgtttggaatatttggcatccgtcgggtgagcaggatacgaagtagagtggctgggattatattggttgaggctaggattattggcggaagtagcgagcggcgggcctctcttctgaatttgttcctcaatcaacgaggtgagaacggtaacgcccttagcggcgatacacgaatgggactgaattgaacgaaagatctcaatagcagacagaaccaggtcaagatttgacgcattggcagatgaggatggttgcgtgtcttgacggtaggcgtattccatgagaagaatgacccctgcagcaacactgtgcgcaagaacagtcctgttgaatgtgttttcaacatggcattgcaaatatcagcaaaaataaccaaaagggactgagaataaaatcctgagagaacaatacctaccaggattggcgaaatggctcaaaagtgtacctataaacccgtctcctttgtttagttggaagcatataaaccaaagagaagtagatatatgattctcttacattttgagtcgaaggataattcgggtcgcattacgaacacaagtctccctcgactgtttatatctcggatcccggaaagctcttcctaggaacggccggttcaagacaatcatcttgtgcgaagacgacatctgtcgcatcatatacacaggaaagagatgtctcgtaagcagagggaatgacgcagtttgtaaccagacttgacttaccagatatgttgaacgttgccactctagccaaggtgggctattaggtggcaacggcagtatgttgtcgtctgcatcgtatcgcatccatgaaggagctttagcctaacgacgataatagaacaacgttaggtcaaatgaccgaatcttcaggtctatcccagaattgatatcaagagagacgacacttacgagaatcgaatttgcctcatcgttgatctgtagaactcgggagtaggttatagtcttcaagccagtaccgtggccttcgaacagtctgatgaacaacgtcatatggagtcaaaaacacgttacgctaaatgaaaaaggacttggcaaccatgagtaatgacttgaaacagaattagcggcgcgtacttgtgtactagaatggcaactacatccgttgaataaaaaagcagtcaaaatacagatcagcagcgcaaagacaacatcgccgaaacataaatcatatgacaggaacatacgtcttgataattgaatcgaatgccaaaccataacaggcgcctcagaaggtgattcttctagagtagaaggattcatcagatccgcatcagagcagcgtagaggaggaggacaattgaactgtgaggttgacaaggctttgattaaatatgactttaggtgtcagcttccaatctgcaacgttattgcccgacgggcatacaatgaaggagaggagaataggtgtaaaaagggcgtaccacacgatctgttgaatggcaggtgaaagaaatcctgcatgagtaattgatagaacactcgcttgcaaacctctctagtgatgagtgcctgtcggtccatcggctgacgagactgattagaatttgtcggatgtttagaaagaggataggtatctgggccaagatggctgatgtttagcgtttgagcaattctacacaagaaaacaaggaaaagaggtcatcagctcggttcactttgcctatttggccagactaaagtccgctgggagggattgaaacaaacctgatggctgtggccaacatggtaaaatacaaatcggattttcctaggtggttggcaggagagacgatgattgcaacgcactggacagagtagagagagtgggagcctgcagatataaataatgaagaagcaagaaaaggacagatcaacacatgattggattagattagaaaataatatgaatccttacccatccaatctgcttcgtgcaactgaagaaaagcacaaaagagcaaagtatgagagatgcgaacaaggtatgagcgcggatcagttgaacattagtgagaacatacacaatttatgcaagtatcaaaccatcgtttcatgactgagtgaacgtgttctataagtagagtgaattgattgaatacacaaaataaacatatctatgagtctcaggaacagaaagacgcaagagcagcaacttgatagaatagacctggacaaaccttttggaatcatcaaggaaagtttttcttcaggcatgtggtgaagcgcggactttttcagccattaggcaggaagaggtggtcaatagaatgaacaatcaaaaccggtgtatgcttggtaattaccgaagcgcatagggttggagatgacaaccgagcagaacgagacttaccatcaatacgccataaaacagcgcgagccaagcggtgttaacttctacttcccccgtggcaccctctgcccaaaatgcatcgcattcagcggctatttcgatataaggattgttaaaagcatgtcaatacttcccaaaccctgacgcatcttctccaatgacaacctcttttaagactgttgaaggtcagatacgtaccaaatgtaggtgcatggtaggcgcaatgatgccaagcgaccatatccatatcccactgaacgagctttcgacctatctcctctgtgggcaaatatgtcattactccttgttttctctttcctgatgacccacgccggctggccgatggttctcttctcgtcgccgctgaggttgaagaacgagcggatgaagagccaggctgcatatgtgaggttgaagagaaaggggccgaagaacgtctgaattgagcggattggtctaatgaaggacctatcgatggcttgcgactagcaacgggattcaattgatcaagaggggtctgttccatagatgctcgcgccgataaacgattggatccggcttgttcagagggttcactgacgcttgaaacgcggtcgggatctccttgcacagaggaagaggtcgaggtcgatcgatcgtcatctgctccacctacgaacacgcctgtgtgttttgctctagatctacccatggcgagaaattccagggtgagagcagcatcggcctcggcatcgatctcaccatcttcctcttccactttgggtatagactgtgagttagtcgcctgaaagagttcccgagcagcgtaaggtaatgggaaagctgatgaggattgaaaagatgatgaggaagggtaaggagaagtgggaccgtggtattgcatgactgatctgatgatggtttcaagagtatcaattcggagggacagttgctgggtggtctgttcggtagtctgccgaagctcctcaatctgggcctgtgcttgtcggttgatcccacgtacagttctgagatcgacggcccataataaggattaacagagtcgaggaaaagttgtaaataggatctaaacttacatagggggttctttgacggtaatctctagtcggcactcggattccttacctctcttgatgctaatttgaattgattacagagcgaatgatcatgtgagtataactttatcgaaaacagttttttagatgtgaatgtctgaactgaccagttctcacaagggatagtcttgttgcatctgaaggagaaaaaaccatcagatggccgtcttggatgtgtgactatatcatcatggcagcgtggatgatttgcccactaaccttgtcttccttctatatttcagagtgaacaaatgaattcaaagtcaacatcgaaagttattgaaaagaagccaagcaagtagggatgcataccgggtacattcagtacaactacattagaaccaacagagattcaatctatcgtcagcaggcgaatgcctatgaggtatgtatcttgaacaaaaagatgcctgacctgagtgcctgtcgttgactctttcgtggtcctccgtctcgggagagccctgcagaaggctccctttgaactctggctggggggctttgagaacagagatccatcgatagattcacattatcttccatacgagagtgaaaagttgatgacgaataagacccggtcggcgactcggaggatacgaccttcccaacggaaagcaccgacgtccaacagaagaggattatcagacattgagtgagccggcgttgagtagatcagaacacacaacataccatgacttggggagacctgaggcttttccgacaacctgatacgaacgttaccaacaagagagggaacgacgataacagagaacaggagagctaccgacgagaggtataatcttgttcagtctctactcgtctctaccttctatcggggatgttctgtgtctgctgtctctatacccaggccggcagtatccgcttgaatcggagccgaccgaataatttcgttcgattatttaggctcaaactcacgtggggcctaggtcacgtgctgacacagctgctgtcacgtgattccgaattatcaactactttggttgctttcctctgatcttctcaacgcacacacgctcacacacatacattctcacacctatacctatggctcagcagcgacttttggtagtaggaggaaacggattccttggtacgtagtttcagcttcaattgaatctgtgaattgcccgtacccatcagatatcgcacattcaaacccgtaggatctgccgtctgcagagcggcgatctccagaggatgggatgttcatagtcttaggtccgtcctgcctcgttcgatagtctcgttcatgatccattaaggcttacaaggacatcctttaatctcacggacatccagtacatctgctcgagctcccaagatgccggacggagagactcctgcctggaccaataaggttggtttcatggatggcattgtttccttctttctagttattcttcgctctttctgtctttgcgattaatgtattatgatccgatccctcatttttcaacaggtcacctaccataaaggttccgctttcgaaccatctaccttttcccaccttttgccttctacaacagccgtcgttcacaccatgggcattcttttggagggcgactacaaaagtttggtaaatgagactagtctcggcggaatggccgccagactcataggatccgatcggtttttcaacggtaaccctctgaaacccggatcaaataataaaacaggaggaggatacgaagctatgaacagggactcaggtgggtcttgctctttttgcttctttccccttcatcctctccttctcacacgagactgttctgatccctcttcttatggctaacgaaacatgatctgcgcactaaatccggcacttcatagctatttcggtcctagacgctctgcttgcctcgcgtgctgccgagtcaatctctccttcctcatcttctccgtcatcagtgtcccgtatgactccgactgttttcacatatatctcggcagaagacatcttccggccgtttgtacctgacaaatacatcaacaccaagagagaagctgagcttctcatcaaccattatctttctgctcaaacgaatgaagtcgacgccgacaaagtgaaagggttgatcgttagaccgggagttatgacccatccttcgcttcgaccattgcttatgccgctcgcacctctcctcgctttatctgcctcgatcccaccagtattgccgaacatcctccgcgcgatgtctaggcgatcaaactctatccgatcggaggatgggtcgagtttggacagtatggctcggttgttggagtctagaacgatcgatgtggatgatgttggggaggctgtttgtgtagggatcgaaaaccagttagaaggaacactcgggcttgaaaatctgagagccatggcacagggtaaattaactatatgatcagcatgattcaattttctgtctttaattatcgtcttgcatgtcttgagcaacagtatccactttttgagagagacaatatcggcgaacatcacatgagtatatgttggagaacacatagttggttttgctacacagcctggagagggagatggtcgttgcgaaaacatgatcggacaaagacagcaagcagtatctggagcgaaaagggtaagtggattctctcgatcaaggagatgctgaatctttgtcgatcggactggtcggagatgaatcgatcataggatgaattcgttcggcgggtttttcagctgctcgatatcgcgcaatcaaagattctcgagcagccctgtctttgacttttaaccgatcgtcttcgatctggtagccaaatgtacaaaacaatcagtcgcatggcaacaatggtcagataggaaagagatgaaaggtaaaacgaacagaagccaaggcctgttttctcctttcttcctcttcctccttctttgacagagaatgaactttcgtcttctccgcgctatcgtttgatgaaacaaatcgatttagcttgttaaaaagaacgatgttcaagaagctgttctccaaaaatatgagcgaaccgattgtggatctcctggactttgcgctgcataatctcggttccgatctccaacacgttcaacaaagacaatggtgctgccgctctggaagctgggtcgaacgtccatgtttgtgtaaagtttatgacctttgttcggaatcctagctgaaggtgatcatacggtcgtttcaaaccgatggtcagatttgatcgtgctcgagacctagatgagaagatattagaattccaccaacggctacaagggcttcctgaccacctttgattccgaggacattgttagtaagaatcttactggtggatttgatagactgaaattgaacattcgtcggatcgtctaagatgtttttagtcagacgaaggagagtctgatatcgggaggttttccagtaaggctcggtttggaacacaaagaacaaacaaaagggttccgcgcttgaacgtagtctgaacactaacagtgataactttgtctgcctgatatatgaagagcacagaacatcaacaacgggttgagcatctttgtctcatcatcaacgtaatagtagacgccacaaaacgtacgtcgacataagtgttctttccgatcagattcctctcggcaagtctctcaaactcgatcgaccgaacccgtatggcttctgctttgccgtcatcaagactagaggactggttggtggtcgatgggttggtcgaggcaaggcgggcttcagctgctttgattatatccgatcttctctgatatggagacgatattggaagagaagccatttgagtctaatgtgttagtagatagatcagatacaaccgtagaatgtcgatgatcaagtaagatggtgagatggtgagacggtgagatgaaaggttaatgacgagagccaatttggtcacgtgccacaccgctcaaccgctggttcccccggttccagccggttcgttggctgaacccggacgcgacgaagaaaacacacgccagagaaaacaaacggactggattgatctttctagctttcatccgtctgctctctttctattcctctgtaccctcaagacgatcgtccaagtagaccgtttcaaggactgtccgcttgggtttaggaaaggtctaaaggttagtcaaggattatttgattttgtgttatctaggaacaggatcgcaccactctgaacatccctcatggttcaggatcttgtcgaccagtaaacatcaaacatattcgttcgctctagaaccgacatcgctcgttctttctgtctttctcctctttgttcccgtttggatcgttccatataccataggtgtcttttccctgctcctcttgaagcaatcttataccctgaatcacacacttaatttcaccacttgataaattatgagtctcagtaagtccttttctatcgatatacatgcactcacccatgccgagggttccttggttctttcgaaagctttctgactagctctgttcgctcttggcttgtacttcctggatttcatacaacatctcatccggctcagacggcaacgattcgttcgccgctcctcctaggacattctcgaccatcggccgtaggtcccaaagatctcactttgcagctcgacaggcttcagcaacttcttcagtagatgtcgcctctcccgatggcacttccgaccaaatatctcctacttccactgatgaaacaactgttcacggaggaaaagattccaagccggggagcgcgggtgcaatgcgtgcgcaggcaagtcattcacctgcagatctagatcaacatccagtctttatcattatggaattggattcacacgaatagtattaggtatattgatcagtttctgaccatgatcgggaaactttatgatccacagctcgagtccctgatcgaactgaagcaggctgaacttcttcgcgctggcctcctaggacaacagatcctttcccagcaggctgaactcgaagcacgagtgcgggaactttctgaggtcgaagctagatccactagaccggatcacccggacaatgcagcggacagcgacgaggaacagctgggagaggagatcagagttaagctcatggcgctgggtgaggcgatggatggatgggaaggagagaatgaaaggatctggcaaggtgtgcgagcggatagcatggttcgtttgtttttcctgaccacttgatgcatgaatcggtgaagagacgaggtttctcactctttcagctctccccgctaccgcctttcgatgaatcagacacctgcacaggacgaacctttgagctcggcatccgaccttacgaaaccatcctctcagcacgtccccgccaacgacgatattcctacatccacatcaacctttggactctaccaaacaggctcttcatcatcaaccgacctcatcagctcagacatacctctcgcaaaccaagctacctcatcactttccacagcttcccacaatagaagaaatagaaacacagccaacagaacgaaggatattgaatttgccacggagattggacaatctctaattgtcgaggtcagacgattacagacagtgctcgccgagaaggatagagccttacagacgctaaacagagaactcgaggaaggcaaagtcaaagaagatggtttgagagacatggtcaaagatttggaaagcaactgcggtaagtttaacattttgcttctctcttcttctccctatgggtctggtgtagtgagctttgtgctgaaaacttcatccgtctcggatcacatcttttagacaagttcaaagaagaaaattggaatcttgaagtaactatgcaggatatccgcacacaactcatcgaagttcaatcccagtctcaaaagacagactctgaactcaaacgtctcaccaaaagtcactccaccctgttgacgacctctgaaacccacaagactgaggctactcagctttcgacccagctagatgcgctcaagctcaagcatgacaccgagcttgctcagatgaggaagacgacggccagcttgcaaagggacaagagtgatcttcagcaaatgatggagaaagctcaaaaggcggcgatgagaggatacatgtctcctggaggaagcgcccggaaggtcggtggcgagcgtgggttgaagtacgctactcccgaacggaaatggagaagtggagtaggtcaggaagaggaaactgaggaggtcgatgagtttggggttggtggtctgggtggggggagtactaggcgacggggcgctggactcgaagctggaaacacactgggtcacgactttggaaggtaagcatggtcgccctcctttctttctcttatagtcaagtttgagttggaaagatcaatttaactgaaacatgcatcttattcatacttttatctacattctctcaaaaccccttgtcaaaaacacgagcagcgactttttggactctcctgatctttctccttcgaaaccttacagcgccgactcttctgaatctaatgtaccgtttgatttgagtgactcgcaactctccgagctcaatgatcttcgcgcgcaattggaggatgctcaacaggaacttgaacttctccggtctgagaaggaagaaggcgcctgggcggatgagtttggtcaggcaactagaggaacaggatccagaggaagaagaggcggtcgaggaggcagaggagtccgtggaggtagtatcgctgctcgatcagcccgacgaccggctggaaaaacatcccttgcggattctcttgccatcgcttcccaccccgatttcaatcaagagacttcccacgacgatcgggatgatggctccgagtcggaagaagtcgacgaatttgcttctttgtctccatctcgtccggagaccttatccatcaatgacactctactccaagcccatcgaaacacctcaggatcccttgctatggaccctgcgttcgcaaatatgtctcctgctgcaaacagatcctccggctcgctaggaacaatattctccaacggtcattctgatctaagttctcctattactcctcatcacgccaagatgatcattccaagagccggtcctgatggtcgtggattgcctagattatccagttatatctctccagcccaggcagtctccgacgagcttataggtggtgaatctctcactgttctcgatgcgctcagtacaaccactcctaaagctcccagaactcttccttctcaggatagatcttatgacgacgtcgaaaccgagactgagactgaaaccgatgtcgactacgaggacgcgagggagagcacgacttatgacaccgatgttgcttctcgacgtctcgatactgatacctctggcgccgaattccatagcatggctgatgactctagcgaggattctcatgattctgatggtagtataaaggcctcctccttcctgaagccaacgcctggcggcacgcttcgagctgttcgctctcgacagaggctcccgaccgatcaacctgtagttgagcgggttgtagagaaaattgtggaagtgccctttgaaaagatcgtctatgtcgacaagccggtcgaggtcatcgtcgagaaggaagtcgagaaggtcgtctatgtcgacaagccggtcgaggtcatcgtcgagaaggaggtcgagaaggaggtcgagaaggtcgtctatgtcgacaagccggtcgaggtcatcgtcgagaaggaagtcgagaaggtcgtctatgtcgacaaaacagtcgaggttccggtcgaagttcgaatcgaagtcccaatagagaaagaggtagagaagattgtcttcgttgacaaggtcattgaggtcccagtcgagaagatcgtcgaggtagagaggattgtcgaggtcgaaaagaccgtcgaggtacccatagacagaattgtctatgttgataaggttgccgagaagatagtcgaggttctcgtcgaaaaacctgtttacgtcgatagagaagtcgagaaaatcgtcgaagtaccggttgagaagattgtgtatgtcgataagattgtcgagatcgagaagcgcatcgaagtgccggtggaagtcgaaaagagagtggaggtgcctatcgaggtcgaggtcgaaaaaatcatctatgtagacaagatggtcgagattgagaagagggtcgaggttgaggtggaaaaactggtcgaggtgcctgtgcaaaagattgtggaggtggagaaagttgtagagaaggtggtcgaagtgccagtggaggtgattagagagatcgagaaacctattgaagtcatccgggaggtcgaggtgcttaaagaggttgaaaaaatcgttgaggtcatcaaggaggtcaaggtagaagtcccggtcgaacgtatcgtatatgtagacagggttgttgagaaggagttgatcatcgaggtccctgtggaaaagactgtccatgtcgaccgtccgtacgaggttgaaaagcgcgtcgaggttccagtggagaagatcgtgtacgtcgaccgactagtggagattgaaaaattcatcgagattcctaaggaggttattcgggaggtcgaaaggatcgtcgagatcccagtcgaccgcgtcgtcgaggtagaaaaggttatccaggtcgagattcccaagcgagtcgaggtcgagaggattgtctatgtcgaccgaattatggatcgaggggtctccatcggcagcagcgctcctgttgacgccgatcttccttctgttcttaaagatgctggcctgtaccggtttgattcttctccagatctgtctctccgacatggcagttcatcttccatcaacctcaatcgcgccctttctcccaactcactatcagaaccgatcaagaacgctcctgtgttcatagtgcctcctcctcccagcatggctccccctctagatatcccagccaaaaagatcgccattcctcaaccaccatcgcgcccctcttctcctcctcctgtcgagatttttactcgagccatgacacctactgggcgctcctcggctctcttaactccctctggctttgcatctgtccatactcaaggttccggtgcgccgtctgtttcagtcaacgaccgacagatgattaccgatcagttctctcctaactcttggtcagaattcagtcataagtcaactaacagcgcatcggctgctcgagacaatgtcaagaagagagctgatttcatcatcaacacccatcctcttccctcttcttcaccctacgcccaatcgtctcacacggacctagatgtgtcgatttcttctgctgagtctagcgaacatcaccttcctctccctccttctcagccgggtctatcccgtacggcaccttcgactgatccagagatcatctcggccattacgcagacaatgattggagaatatctgtacaaatacacaagaaagacgatgggcaaaggacattctgataagcgacaccgacggttcttctggattcatccctacacgaagacgatctactggagctcgaatgatcctggagctccaggaagtcagctcgaatcaaacactcgaagcggtaagtcctaagaatttgtatcttaccttggtctcatatgcttcttatgacatgctcggcttattcaatattcttatctctttcgctcattctagcatacataacttctgtcacagtcatagaagattcaaaccccatgcctcccggtatccatcacgagagtatggtgatcactactcctcaccgagagatgaagttcacagccaccacaaaggaacgacacgatatctggtgccgagtaagttttgataatgctctatcctttctatgataacattcggatctgagaaacactgtgctgacttgtttccggtggacaacctcaggctctgacgtacctattggctagaccagccccaagagaggccaacattctgggaacaaaccaagtcgagaacctcgaggcgacgcctacttttcaccagagagtactgaccgactctggtgcgctctccaaccgatcggcatacctaacgtccccaagttccgttcgatctaccaatctgggggtgccatttgactttacacccaaggcaaaacagtctgggtcggggatgtcgtctatgttctcaggttcggctagtaaacgaacaggtacaccagctcacgagttccttgccaacagggaagaacaacgacaattgtcggcgagtcttgataaaccgacggaaggaacaaatatgatcgggacggccgatagctttgagcatatcgatccggatgatgatgacgacgacgaagatgaatacgaagggttggataacgtaagagcttgctgtggtggggcgcacgatattggtagtctggccagtaggcatagccaccgtcaccatcaccctgaccaccgccaacgaactggtaccgctaatgcgtttaaagaaaacgggacaggttcgatcggcccatcatccgtcgatccgagcgcagaaaatctggacggattgaaccgatcgaagtcgccttctacgttctcgtttaggtctcgtgcatcgaggacatcgaaaggatccagaatgtcgatcgggtcgggtgttggtagatcgtagtcttgagtgtgtaggaggtgagtagacagaccgtcaaactctctctttgttttggtttgctctttttcggtcgttctccagttctgcttgaacacatgtttcctctccaatctctctcgtttgtttctttttgcatagataatattgcctggacaaatcgttcgttttatttgtctcgagctgaacactacttcatacctttctactctttggtttagtttggtttctttctcttttaatcttttctcagttggtgcttgatgcctgactttcgtgcatattcatgatgaacataagatctattgcaaagggaaaaaaaaaaactagaaaagggaacaaaaaaaaagttgtagtcttgtgcgaccgaaacaacgggatatgagatgacaatgcataaggagacaaaagaaggagaagaaacgaagaagacggaatgagagatcataatgggcatacaacaagatgtagtgactggaaagaaagaagaaaaaaaaaacagagataaaaatccaagagatgcaaaaagaagtatgatgagagaaaggaagatggaacgtatcaggtgtgattcatccgagatgacgggaatgttgggatgaatcttttggatggatgatatttaactgatcgaccgaacaagaaagaggaaggagaagaaatttagacctcgctctaagattaagaatcaccgacaagcgcgtcaaccgtcctagacttgcacgttttgaggaactgagcgagcgctgttccacccgttcctctgattggctcttccgtttctttttctgtgtcaatcaccttctctggttcagaggtagcaggaagagactggggaaagaaatgagcaggaggaggccgcctggcctgttgaatgatatacattgtcacgatgaccactacaaggtgtgaggggaaacgatgaaaaaacgttatcaatcagcgcttgtcgccaaagatggaagagggcggagggaaacaagaatgaaaggacttactgtgatagtccctgaacttgcccatagcgacgacggcaagatcgtagctcctggctagatcaccgttgtcaaacgactggttctggacaacaagctccctgaccgtggggtgggatgtctggagatgaagcaaaaacgtgcggtggggtccaggcatgtattgaagcatgcgctgcatgaatgtcgagtcccctcctgaaggtggtggtggggaagtgacggtcgacgacgatgtggtggttgagcttgttggcttgtgaggtgtatgatcgacacccaagaagatgtctagggcatgcactaaactggactggccagctgacggtccactaacaatctttcgttcgccttcagaatcttcatcctcaccgacaccttggaagagccagccgagaccgcctgggccatcgccatctgatcctttgaaccatggtcggatgagccagtagaactctgcggggtcacaaccggctctcatttgtttcatcacggaggtcaatgaatcgataacagtggcgagtgctctgagcgagctggcgatccgtctgagggcaagagtatcgccgacgaaggcttcgtccaaggcagatcgcatgatggtgagcgcgcggactccatgtagctcgaccaaagaggacaccaagtaaaagtgagcttctgaaggaagaccggtgaaggtgtggtagactctgtttggtgggttagccgtcgggtggaatgccttggtcggatcggaagggtagacgttgtagagaacagtggtggcataggtaaggattggtggaagaccgagcaggttcgacacttgatcgagcggcacagcaatcgacggtgggattgccaagtccgaggttgagccggaatgggagtgtacgtaaaaatggaggaggaaggcaagggtgacgctggcccgctgaaggatttgtgatgtcaaatgggcttgagggaggatttgtacttccatctagaggcgggaagaacgcgatcgggaattacgtgaacaagtttcctcccggtcagctcaagaaggatcgcggtcttcaagatgtgtaagcagtaataaagaggacaaacgttcttcacagtctgtcgccaacgatcgccactaccgccttcctcgtgggctccgttaatcttgacgacacctgctttcgcttgctcgaggagttcttcccagagcgcgtactcgtctggcagacgatcgatcccgggatgaccaggaaggaaaccggttctgacgtcgacatcgaaatcggccgaggccaaagtggttgtcggaggtgcgagcgagtcggacgcagggtgtgagagcgaggcctggccgaatgagggaggcaacgccaggaaatggtttgagggtaagccaaagttggccctcgctgggttcccactgtctgccatggcttgcttgtgtgtgtgtatgtgtgtgttgatgctgtcggtgctgttggtggtggtgaggaaagagaacgagcgggtcattttcttttttcggtaaggcggcagaagaaaaaaggcttgggagtttcgggaagagccgggaatggcgtgcgtgattatgtaatagtaggtcacgtgtaaagtatagatgataccctaggattcataaatgaatgtgatcgacgcgtctaaggaagctcgacgcgttcatacagacatgaaaacgtgtcaaagggtcacgtgcatgtgcacagctttcattcacgtgcacctcacgcgttgcccccaaactctacatgacgcgtctccctcggacgcgtcaggatggtcgacaccaaaagaaatcagaacgacgaaggcaacagtcgaaaggtgacctcggcctatcaaccagcatacagtatacagcacatcagtcagcacacttacacacatgccagaatctactgacatttcgctccctctgccagccgatacaatcgcctcgttggcgttctcgccagactcttctcgtttggccgtggctagttgggactctgtttgtttcctttcgttcttctcttcaaagccggcttctctttcctgatcgtaacctgattcgactgactcaattctgatcactcttcatcttgtgtcttcctacagacactcaccgtccatgaaatagatccctctggctcatcctcatcacaaatgtgagtgtctcatctctcgagatcattctgctcacatagtcgtttgctaaatcagggattctcgttcacgacccaccgtcagcttcaagcatgaagctcccgtcctcgcagcctgtttctcaacctcgaccgaagtgttttctggaggaatcgaccaccatctccgctcgttcgttcccggtcttctttcttgaattctggcataaccattctcctttcgaaaaaactcactttgtctcgtccgctttcaacgcctacaggtgggacttggagaccggctcgcctacagtgcttgatgtgacggaagcagagatcaaccagctctcctgggcttcttcctccagttcgttacctcttttctgtgctaaagtcagattgataagcttctctatccttatgctgatcagtcttccaccttagacgtcctcctggcaaccacactctcctcccaactcaacacgtacgaccctcgattgtccagtcctctactgtcctcgctcagactacctcagaaaacggtcgcgatggacacatccggcaataatctcgtccttgctctaggtgaacggatggtgtacgtgtatgacgttaggaaactcgggtcggctgtcagtaacacagagggtgagcccgaacaacggagggaaagcgcgctcaagttcttaaccagaagcttggcttgtatgaccgacggcaagggtgagtctctacctgatttttcttcccgtatcttcaattgggctggcgagcactgatcgttctctcttgcctcccatacccgcatcttgacaggctgggcgtcctcttcgatagacggacgtatagcggtcgagtactttgctccagaggatcaggcacaaaagtatgcgtacaaagcccatcgagtcacttcgtccgacaagacggatcatgcccatcctatatctgccctcgcattccatccaacgtgagacctgtcctttgatcttcatctagttcatttcttctctcctcttccaaccgctcatgaccttttctgtttatcaatctcacgaacaatagcctgaatacattcgcttcagccgggtcggatcatagtgtatccatctgggatcacgtttctaaacgacgggtcaagcagcttgcccatttcccaaacgcagtatcaagtctcgcattctcacctgacggctcttggcttgccgtaggatacggcgatggcttgggcgagaatatggacgagcagacttggtcagccaggcagagtgctcggacggaagagtcgtcttgtggggagagaggtgtaatcctcaagagacagtcgaatgagaaggagagggagaagaaacctagaccggtagcgcatcgagtaggagagtgatcatgatgagcacgttcaacagacacaacagagattggtttagcaaacatgaaagcaaagaaagaaaatatcagttgtggccgaaaggcgcttgtcgacattttggttcatttccatctccatctatcaatccgacatcacaaccacgaccaccatcaccaacagcagcagcatctattttgctcctccctcgtcaaagctttctcctaacaaatcttaacccttatcttactctgttgaccggtctttctcagaatccaatatggcagcagtagaccttttggatcccatgatggatctcacccgtcggcttccaccttccaagatcgaatccaccctagatgtgctttgtacggttttcgttctctccgtcttctctttgtcttgagtctcttccacttacagctactcgattgatattctcaaaatttgatgttgagaattcctcaggtgctcttgcccctgaatatgctgacgatctcttgggatccgtcgatcagccgctcaagatcttgagggatgagactcaaggaagagatttcttggcttgtgattacaaccgagatggtgaatcctttcggttagtcctgttctcgtttttcttcctcttagcttccccgcaagggcctatcatactgtcgtccaagtaggaattcctgttgtgttgacatacagctcggattgtttgcacttaaaatggaaacaacgtagatctccttggtcaaacgaataccaacctccaatcgaggaccctcagaagccagcagagagtcttcgacttttagaagtttctatgaatgaggcattcgatacttatcgagagatgtatgttttctagcgttgaagatggaccctttgggtgtgtgtgtgtgtattgatttggctctctctggacatgcaggtactttgaaggcggagtatcctcagttttcctttggaacgtggatgaggataaggacaagtttgctggtgtcgtcctcctcaagaaaggtgctgtcccagatcctctctctaatgttttatgatccctttttgaattttctctgataaagtcaatcgaactttgtgctgtagtccttccatcatcgccgacgactccttctggatcttgggactcgattcacgtatttgaagcacacgaaagaggtcgaacagtatcctacaagctcacgtcgaccgtgatgcttgagcttgtggccggaactgaagtcgatcctaaaggaggctcggtcgagttggcaggcagtctaacgagacaggtacatcgttgtctatctatcttgcgctcagatagacactatttctctcgatcgagattcactgatgccctttttttcacgaacatagaccgagcaagacaactgcccactttcttcgccgacgtcacatatccctaatgtcggtcgaatgatcgaagacatggagatcaaactccgaaatctccttggcgaagtctactttgtgcgtctcgaattttgctttgtttggatatcattgatcaagctgacgtttagtatgtttctttgagaactgtagggaaagacgaaagacgtggtgaatgatgtccggtcgttcgccggcttagtacgttcttctctgctcgatgtcaagtttcccaactctgatcctctaccagaattacatgtggaaaggatgaacgttgatctctttgtctgtttgtttgcgtaggaaatgaaacgaaatgaagatgctcttcgacgagaacttgtaagcctacctttggctgcctttcaatctacctatgaagtccctctctttaattctgaatcattcttgtcttatcctctttctcttccaacttctcaatcagatggccagcatgaggcgttaatagtgtactccttcccttgtccttgctcctacaactaacgatacatgacgtgtttttcccaatgtgcctcttcgtccggtctcagttcatcttcgtgaacatcatatctaactttaaaaactagcccactcaagactgtagaaatcaacctgatcggtcttctcgtcccacgaacaaatcaggtgagattttttggtcgcagttcctaatctgccccaagctacgatctccataggcgtgatcgtcgaatcaggggatggtaaggccgtcgtcacaaaatgggaatgatatctcagtggatcgcctgattttcgtgtacgcgcgcacccacatagatcaaggtcgtgaccgtcgatttgaattaatgataacaaaaagattgaaacgaaaggagatgagacacatcgttcgagaacgaagaaaagaacaatcgaggaacataggaaggaactgaccaggataagccatcagttcacccccgaattttattcctccacccataaagtaaccccgttcccaaagtttcttgaacactttgaccctggccatctcctttttatttctggggaacgaccagatccctgcttctcgagcagactcgatggtgtgatatgtgtgtgacgaggggtcgtagtaagaaagcgaactggacgtggaaggtgtgaagagttgatagggtgttgtcgatggtggtagtgacggtattgaggatgatgacgacggctgttggggtgccggtgttgatgttgatgttgatgttaatgtcgaagttggcgtctgagtcggtatagatgagaccggagatgtttctgacgacgactgatccacagcggcaatagcagcagcagcagcaaacacagactcttccccgccttcggcctccctcaaagccctcctcttttcctctttctctttcgctctcttttccctcttctctctctgagcgtccgtcaagccagctcctagagccttggttctcttctctttttcgatagaaacggcagttgcctgttgagatctgatatctgacagaaagtcggctgtctcggtcgatatctcggaagaagtaggcgtgcgaagggtctgggtatcatcgattatcgaggcgattcctgaagatttcaagatcaagagggatcacgtttccccctttgggacagttagctacctgatacagaatcggtacatgggtatcgttgagataagagaaaaggacgaaaccggcatcgacaagaaccacgacctcctcgcctgataacaacaagggtagtcctaagaacacgttttgctgggcgatagaaggcagagaaccgaccaggatgccgcatatatgatggttcacccggagagtctgtgcatcgtctgcagaccagatgtatgctctctgggcggatacatggatcgggatctttatcgacccaggcaaggtgtgtgtcgggggtgtcgtcatgatgggttggtcggttgatgatgatgatgatgatgg

SEQ ID NO: 1134 - DNA, 25000 bp, Xanthophyllomyces dendrorhous
ttgattagacaaggacttctcagaattaaacaatctttcttttcttcgtttcaaagcagataccctccagatatacacataagtagtttctcgtcagttctcttcctctctcttcgtctttgttcgcttaggcttgcatgcagccatcgatagacatggcagcgcttgtggacaccaaagaacacaggaccatggccgcaaggtttgagatgttttgtattatatatatgttgcactacttattcccaccgaccgtttttagagcccacctcctgactttggctctccatccatagtagccgccgttctcgctcatctctctctccctctcgtccttttctctcatcctcttcttctccctcgccgcgtcctgggcaggttgatgtcggtcgatatcgttcacgagatatacaaacggatggaacctagggttcgatcttctagcttcgaggtatctatccagaaccccaggaagtgatgaggccgggagatcgagacaaagaagtcctcggtcgcccagcgctttttgaaactcggagagagtgagtccggcggtgggaggtcgtcctatcagcaacttgtcatccgattcaagaaaactagagtcgtttgtggaaactcggtatcagtttcttctcgtcttcttctccttgtcttccaggaggatcgtgtgtgtgagagagaggaagagagagagagagaggagaagggaatcaaggtttctcacctgacgtggttgtacactcgactctcgagataagatctagagggtgatctcgttcccaggtcgtaagccctgaagaaggcaaaggcagtaggcatccaagaattgaacagacgagtcttgacaaagagatacaaagatgcagaaagagacgggttcgaggaaagaaaccttacctcagaagctttttcatatcctcatcctcccagttgacccagttgtttccgttccatcccaagtcaagagcgttcttgtccgacttgtcggccttgacttcttgcaaccgggcatagagaacggacctagcgtcatgccttcttgtctcctgcttttgacggacggaaaacgattgggtgggtagaagcacggtcgatggaatcaacgttggcgcgagcaagatcaagagcggcacgatctcttcaatcaccgctgctatcaccacgaacgggatcattcttgataagaaatttgcaacgcccggaatttttattgtcagtatccgttcgtcggttagacagagcacagagggaattgggaagaagacgattcgcttactttctccaatcactcctcacacggacctccataagagactccctccaatcatagggcaagcctccatgattgactcttctcctgacctcgttcaccaacttacgctcttgccatgatagggtgactccatagaacaagaagcgacagtagtaccatgcgtaaagtacagcctttgttatcgtaccctttgacggatcaggggtctcgatgtctctaatgggtggtgacggtgctaatgctaacaaaggagccgagcggttggcattgttggcggtggaagaggtagaggatggacgacggtgggtagagtctgtgctgaccagtcggaccgaatgagagattacagggagtttatatcctaggctgaacgttcgtatcgggttcaacgcaggtttcgggtacggagagatggtgaatgaacgaagaacgagaggtcgagtggatatgttggcgcgaatggatgaacaagaccgagctcggaaggcttgatataatctgatacgattgaaaaagatgcatggcatctgtcagccaacatgcatctcttttgtttctttgtattcctatcaacagatatggttgtgatcgcaaaagaggtagatgaagaagacgagaatacacccaaacggggaaaaaatagaggatagctttttggagaaaagacaaaacgaaacggagaaaaacacaagaactcacgggtttctccccaaagccaacgtactgccggacatgctgtttcgtcctttctttcttctgtatgccttgtgctacaaatacgacccaaacagagacagccgagcgagattctagagggaaggcagaggtgagaggtaagagagtcaaaaggtcgatggtcgatgaggaagagcagacggccggggcagacggaacacgcggttggttacaggcttcggccaagccgaggttacagctgggggtttgtgaccatgtgagtccctgtggtcatagatatggacgatcgttttttgttttgtttttaaagagggagcaagaaagtagctgatactgttggtggtgatccgtgcgctgttcttacaaagtgtctgtagaagccaggatgatgagaaaaattgaggaaaggagtggtgtggacagcattcggtacgctaggtgccatcgaagtatacataaaagctcaaacgatagaccagccgtgcaagcaaggtgaacgcgcgaacatgtacatcaaaagctagggactagagttcattgatagttataactagcagagagggttaagatacagactagcatcgtgagacgaagaggctctggacgatttccagaatactcaggtcgcagatttatggattagttctttcctccagaattgtcttggctccgttgatgacttcacagataaatttccacagacggctcaatcgacagataccataaacacatccagtctttcacggaagacttctcctccgacgagcggcctgcctcgctttggcttccgccctctcctttgcagcactccattgcctgccctcgagcctccttcggatttcggtctgggtcgctgaattgagcgtctgctttgtcggagtacagatcagctcgagttttccctggcagcttgggtcatttgaggttccatcgctcgtactgtatatgcaagtcttctcagctctatagaaagcaagggaaaaggtggcgtatcaaagttactgagagtcagtcatcaagagtaagaaccaaatatctgatgagacctgggcttacattgggtcataataaacacaagatatgtgaccgtttaagaacaagctgggctgggggacatatctgggcaggtaagagcaagcgtcttcgtttgtttccacagccgtaaagatggaacgagtcacacaaatcgagtatccgagaagaagttgccccggccgtcaatgatcatatccggcacaaagggatagtaagagcgagagagagagagatatagcgtgcgcgggcttacatgtacactcttgttcagcagacatcatcccctgtatcaatacttgtggctcttccggtgctatcggtgttgccgaaacaaccgacaggcagatcgatgtgagcacagttgagagaaagacagcacatgcgctttggaaaagcatgatgagatagatggagggcaggctataaaggcaggtaggtaggattcaagcgattaaatagagcaacgaggaagaagaaagccaggccatgctcggtggacccatgtcctttatacgttgatgtatgatcaggagtcattcgacaacgcacaaacctaatactacatagaaagaccgacagacagaacgtaaagaagaggaagccaaaggctgaaccagtgggtaccgttcagacagcatttgcgtcacagacaacctatacacgctcaaggattcaaatagaagagagatactatgatgtgcaataccaaagacggaaatagcaacgagatggatgaatctactcagtggccaacggcgacagcagagtacgcccgagtaaaagaattgcttacgccagccccggaatgcgccatgctcataccatggtataccatcatacctatgcattcataccatacactttccatgctgccatctgaatcaatttgtccgctgcgctctcagtgtgcgaaattactcatctgatttcgctgcttccttcctctgcccaagatggaccggccggcgtaattgagctgtgtcacatgcgatcaacatcaaagtcagctccaagattaatcctaaaacagtgctgatgcagacggaggcatatatgtcgttgtttttggcatgcttgcgcacctgaaggtgcactacatctttcatgacgagtgacaaactgtcttcccctttgcttctttcttttctcttttcgtgtaccataagctgttctctctgagtcaggttctgccttgatctgtacatataggtggttacatcgaacacgtctctttcctcgtatcatttaccaactattgtctatctgtccttgtcctcttgagacctagccgggatcaccgagatgggattgaatggacgcaccccaaccgcggcccaagttgatcctataaaacccccaaattaccccatggcataccgcgatctgggtccacacacgtgacgacattgctgtcacgtgacctgccgatcgatcgccggatatgaccgcttcccgagttatcgagagaaaacaaaagtgaaaaaaaaaaagaagagaatcgtccttcagcatacacaaccatctcgatcaacccatctaacaatgaccgtcgtgactgctaccgctccctttgcgcctccggtcaatggcgcatgggtagcgctatgtacaaagtcctcatatctgtctgtttcgtcacgtttacttcgcccgatttggctgctacctctcgaggctgattcatcatctacctaacttatttacgtgcttcgaaacagccagggtctccttgtactcaaccattctctgagctcgacatttcctccgacggcttacccactggttgccatgattaccgctcccttccctccggaagctagggaggtttgccgtcgggctgggatcttgctcaaagaggtagacagcctgcgacctactgggggaacacacgaattgaacgaacatgatcttagattcatggacacctggactaaattcaggttggctttcgattctatttcttgtgcttgcatttagttcattgatctaggctgatctgtgtgagacctcttcgatcggttctgattttaatgatagagcgttcgaatggacagaatacgaggtttgatgcagctccttttctttttcctttcatccacatcttacgctgcactcgggctgacattaatggatgggtacttttgtctttctaccaaatctatagagaatcatcacactggactgtgacatgcttgttcaaaagtaggcttcccatcctttctatctcaccttattcttcatcatctgattttttatcggtttcaaactcatatatattttctctctttgataattagaaatatggacgatctttttaccttacctcttccgggaccggattgggttgccggaacacatgtgtgcgcttgtaaccctcgtcggttgtcccactatcctaacgattggtctgttccttccttacttctccttcggcttcctaaatgtactcttgttctcggttttttttgggttctctttggactgatcacctcttttctgttgactaacccaaacaaaaacaaaaattaggattcctgagaactgcgcctatacagctcaacatcttccctctgctcttacccaccccccgctgaaaatccagccggacggacccagaccacacggccttatcaatggtggtcttatcgttcttacccctagcaagacggtgttcaaggatattgtcactttcctgaggacaagtccgttgataaagacgttcagctttgccgatcaggatctatatgccgcgtatgtctcctctcttctcttctatctttctttcttcattcaatggaaatatcgacgcgtctgaaagcctctcttgtcttccttctctattcgctgcgctcttataggttctttaagaaccattggcaaccagtcccgtacgtctacaacgcgctcaagacacttcgggtcattcatcccgacatttggtccgactcggatgtccgaaatatccattatatgtctgtcctcctcgtttttttttcctctcctttaaattcgtgtattttggtttctcttttcactatgtcatctcagttcatgtatctgacggacgatcgatcaatctctcttctctttttctactccgcttttgatcctcctccggctcagtctggacaagccttggcagcatcctcaaggaagcccatcaaaggcatcagcagatagatcaacagctttcctacatggcttgtggtgggttgcgtacgaggacatgttgagtcagatgaaacttgatccagagagtggttgggatgtggttgacgaatgggttgccaagtgatgagtgtcagaggtatttggatacgggcggtctcgcacgtgaaagagtatgcggatcttgagggaaatcttttgtgtatcatctttctttctttctttctttctttcttcctaattagctatataatcggtctgtttgtcttggcatcgctctagaatacggttgagaagatctatgtatgatccttgggccatccatcgatttgttcactctttctgggctgactattccactcgaatccatcggtagctacttctttctccaaagacctaaccagctgaccgataactccaccttttccatcctcacctgatttcatcaggtccactactccgctattctcttcttccggtccgaatgtccgtccgaatcggtccaccaaatcttgctcaacagaccgaacagtcctacttgacagacctttggaagtgaattcagaaagagaagtagctcgaatgaaattaggtagaccacaggcctcgattagatcgaaccatgggagaggatcaggaaggacgttcaaggaaaacccgtgtgaggttaggcgctgtctaatttgtattcccatcgaggaaatctaaggagtccgtatatgtatgtatttgggcgcatggtgggagatagaggaaaatcaatcggacggtgtacagatcagcgaccgacagatagaaaagactacccaacaaaaaaaaaagatgaagaaagtgaaacaacatcaaaactcaccttcgaatccaaagttggaaacacgccaacatgatcgtcaggatgaggagcaaacacttttttaccgtccagagtatgtgtgacatagtctgctaataatctctgagtcttgtcaacaaaacatttcgtcgacaactgttttcattatcatgattttgcgcagaaatcccaacctcaattcagtttcgacgacttgcgaaaaagaaaagagagactaaacacaaataccttcattcctcctagttcaaaaagacaatatccgacaacttggccaggaccgtggaaagtgacctgaccgcctcttctcgtcactgcccaatccgctcctgcatgtttcaatctttcctcctccctttgaatccgttcgagcgagctaggtagagaatctcttcgacctgtagtgaatgtcggtctgtgttctgcatccagccgatagcgcacacccaccaagataccgtcagacttcaatgaacgcatcaagccgacagagaaaagacaaagaacaaattacccaacaggagcaggatatcccgtctggccagctctgacatcggatctgtctttcgagcctgagacctagcctgaacgatagcttcctgaagctcgagcgttctcttgtatggcagtggttgcctgaacacatgggtggctatcggcagaggcgaagggatccctggaggaggcatcttgcttaagtgtacggtcgatgatgtatgatgtatgatgtccaatggatttccaccgagttgagaagggaatagtcaagtattagtcagcaactaccttatgtatcataatctaattgacatatatatttgattttctttgtacccttcctctcctcccgcctagtgtggatttacagacgtacgctttgcccaacgctcactcctttcactagcccaatcaccatcgcaaaagcaatgtccctctcgacatcgacaagggcgttcggctctctacttaccaggcctaagtctggattatcgactagatctttcgctgtcttttcagcagctcaggctccttacaggacgtccaccggagaggaagccgtcttacctgttcacgtgcctctgaagttgggaggaaagaagtcgaagaacccagcgtacaaatacgtggactgttagttcttttgtacctctggccttttcttattctccttgccttgtgagaatgaaagaggaggataggtggaccctatcgagctcaagagaggccgacggttggagccggtcgtcctttctttttcctctttgatcgaacgaaccgctcatcctttttctttgtcttcttccctctgtttcgtatgtttatcttcagaccgagatcgacagacgcttgcctacccgttctccaaagctgtccgagtgcctttcctcccgcctctacctgctcctagagatatcgtcaagccgccaagcgggacggacatggtcggacacgtcaacacctgcctcaaactctgcctggacacaaactctttctactacttattctcgaaacacaacaaggaccgaatcctgcctgggtcgattctgacggtgacctcctacacgacaagcgcaaagacccactcgaccacgttcaccggtgctttggtcgccgtcgtcaggaaagggatcaacaccagtttcaccttgaggaacgtcgtgcttaggacaggagtcgagatgaggttcgagtgcagtagtccgttggtgaaggatgtgaagttgctcgtccctgccgatggaaaggagggaaacatcaagaagcagaggctttcaaagttgtactactaccgagacgtcagtcttcttttctttttcctcccgctagagccctccttctctcgttccgatcgtttcgtacttgagattgatccgtccttcctttttttctgtctgtttgcccttcttgctttcacccgtctcggtcctctttcactacctccgaccaacagcaacccgaacgactggcagatgctgcaaagattctccgggcaaagaaccaggccggtggatccatggctggcacggtctttttgtagacgtccgagaagggactcatctaaaatgtcttctttcttattcacacgaagaggaccaaaacgagaccgccctcctcaggagatgcaacaatcagatatgtttatcggatagagggaaaaaacgagaagaagaagaaggaagcaagaactgcgaaaggataagggaacggaagagagacgaaaagaataaagaaaagtgagaacgatcatagaatgcatgaaatagaaaggatgcgctacccgtgagcggaagaaatttatataaccagagacaaatagatttttgaacatcaagaagaagaacaagcaacgggaatgaagacaagaaaaaaggaaaaggaaagatatggacgaaaagattccaaagaggttgaaagggacgaatgtttggcatacaagagagaaagaaaaaggccataagggaccaagcgaaacggacagaaaggaaacgacatcacccaaagaggaaagaagaagtaagagagcaaatataaagcgggagaaacgagacacatcaggaaagaaaagagactgttgaaaacataaagagaaacgcgtgcaggaaggaaccacaaaagaatatgataaatcaaacggaaaccaaagaaaagacaatatgatctagaacgagaggaaccgaaaggaaagagggaaaagaaagaaatgtatagagaaaaaagatgaaaagcaacacgatagagtaaggatagaagacggtactttacctagggtccgggatactcgcccatggagccaaacatactgttctgctttttttgtctaaacgggatttcctccatgatctgtttcagctgactctcatccaatactggacctgtaccatcacactttgcctatataaggagaatggttgacaaagaccccaaagcaaaccaaaaaaaaaaagtcagaaagctatcacgatcgactcgatgttctcagaagaaaagggggatgtttccgaaccttggacttcatttcgtggcacaggccgtccagatcaaagtcgggcgtaaagccaggcgctgcccggatcttatcccagacttcgtccaatttgtagttcttggccgtggggtcctgttttttccatcaaaccgaggaccacgtaaagagatgatgattagccacgcgcgttcaagggaggtcaaaagatgcggccaaaagacgagagaaagagaaatggggaagaaaaagaaagtgaatgaggacaaacagcagcaaccaagatacgccctctgaaaaacttgctcttctctttccacggaatgttctctatcgcttctaatccgggcagagccaaagtatcttcgtctgcggttccttctggctcgatctcgttatctggctcttcgtcatcgtcgtcggtcgagacggtggatgatctgagatcgaacgacctgccgacggcaacaacattctgtcctggcaaaagacacttttccgagcattctgatctgtcttttgtgctagtagcaacggtcgccgaggtattgctcgtaggttcgggcgagagtgacgattcaggggaaaggccaagtgggctagacgaaattcctcgatcaagagcctggatgtcagatgccttttgagacgatggttgttgactttgagatgtgtgagcgagagaagcgggtgatgagtctgaggacgaatttgagatcaggctatccagcatcgaggccgtattaggcgtgaaggcaggtgcaggtggttctccaaacgtcggctgggagaacgaaagaaaatcttcgaacccctgtccaccgaacaggtccggcaggcctgagacgttagacatgaagcttggtccaggaagataggaaccttcggctggagatcggtaagacgtgaacaaaggattggtcgccaacgtctggaagggaatcggcgaggctaatctgatcggcagggtcggaataacttctgaagagggtgtcggcaaagagatcccggctggttcgcccgacggagagaaaaagtctgaaggagagaatgcaaagactggcggttcgccttgctgaagttgtggctgaatgtctgaaggcgaggtcgtcaagggatcgttggacgagtgcgaccaaacaggttttggctgttgcagctgctgctgcgagatcgatgcctgagagccaattctggtcccttcggacagacgacgggcgatgtcggggtcttgaatgtcggatgaggcgaacgcgttgaagcccgagctcgaaaacgcagggatcaagggaggcgtgtcaggaccgacgatcgagttaaatacgctgtctggggaatcactcgaggagagcgaggcagttgacatggtccgtgggtgttccacactggaaggatcgtgctcaagagtcgaggacggacttgggcctgtgctgtggtttgctggggacaaagaaggagaagagatcgatcggccagaatttgaagatgatgtctgggcagacttgatggatgtcggtggcgacaacggtttggatgagttgaaaggcaaagcgttggggcctccagcctttggcacggagaacgtgaacgcttgttgtctcagctgtaaaaagacaaggatggggtcgtcagtgaatgaaccgaacgggagggttttggagcgtgtatgtataagaaacaggaaaggatgactgactcgaacgttctctgactgtagtggtcatagagatgtttacatcaggagccagtcgatcggttgatcagcgtgtatttcaaagatgtatcgcattccgctgatctgatgagtagagttgacttgcctgcagcctcgacaagaggtctctgaggttttcgttctcggacttttggccttcactcattgcggcaagtgctgctacctggtcttccaactgttaacggaaggcgataaaagtggtcgcgggtcagactcgacatttaggttcctgacagggtgacaaagtcactcacatccttgacgcgcctctccttccgctctctatgttgtgtggtcgatggatgaaaaagcatgacgagccattagcttcaaaactagtgaatgctgtcaacactccagcagaatagcacggcgcacctaaatgcacgttgggctgcccggttttgctcttttctctttgagagcttgccctcatcctgtgagaaagaaagtagagtgacgaggtcagagctgagtgcaagatggtgggacgccggcgagaggtgaactgactttgccttcggcagagttctttttctttgttcctttcttggtagattcttctgagtagacggaaaggatggagaacgagagggaaagagaaaaagagggatgagcgaacagcgagcttagtcgtggctctaaacttggcgaaagaaagaagcgacccgacgggagttcagagcacttaccttcgacggctgactctgctttctttcccttcttcccggtcgccccgctctgttttgtgctaccctttcgcttgtggtcgccatcgtggacggtatgtgaatcttgatcgtcagacgagaggtcttcggacgaggcatcgtcgtcctggaacgacgagtccttggtggaatctgaggcggatctgttggccatctgaggaggaaacgaatgggaagtcggtgggttgaagactgcggaataataggacaagtcgtcggtattcagagagctagaagaaacgggtagggtattcttatcgaggaaggaaagaatatcggcgtattcagtttgagagtcccattcctagatatgcatatagtcatatggatgggtggagggaggggtatgtatgtggaggcatgtggaggcatgtggaggtgagagtaagagatcgacgagaccaaaagaattagttgaatttcaatttggatcagtcagaccgaacgaatttgagaaacatacggtcgatagattaacagatccgttcatgttcggccacaaagaagacaaagacaaaacgattgggattgggttgcttcttgttgaccgaggagagatgtacgactagcaagggaaaaaaggcacggaaggcgatgaacgtgcagacgaaggaagagaggattatgcctcgctcggaggtcagcgtttgggttatgatagaatgaaccaaacccggactgactctgaatctttctgtatatgcgtgtgtatgcgtatgctatcacggacagatctgaacggatgtatctgtacgagacgggaacgacaagatcaagcaccgacaaggacggaagagaacgacgatggcgaaaccaagaagaaggccgggaaggaaggttggttggttgtcggtcggatcagaggggaacgaaagattgtggtcgaaacagacggaaggttagtaagcgttgtcaatagatgcggtctataaagctgtgctagccattgcggcagaggcggtgtggactggtgcacgtgctttgtagcgccacaggtctgcctgaaaccacctagatgactcggattctccccttcttttgcttccgttcggctcaaatgcgaacgtgttgatggtgttcgatcggatcagggaagcgatgtgttccgtgtgtgccgggtgtgttcagtgtgtccagtgtgctctgtgtggattgcattgcatggcaaagagatacacttacaaacacacccacacacacccaaggctgttggcatcatgctcagtttatcgcgatctcattcagtcgatcgcgatctcattcagtcgggatgcaagtgtcctgatgagcttcggttagagctctgaaagactcccgcgtgtgtgtgtgtgtgtgtgcgcgcgcgcattcttagacctgcatctacatgactcttcttctcttccttctctccatctacatgcaattctgtccaaacaatatgcgttcactagcgtgccaattaatatcctcgaccgtccgttgccgcattgccctgttacatcgtccgctggatatcgcaccctcgttcttgtatgcataaagggaggatgaataaaaggaggagggttgtgatggttacgctgcatcaccgcctacttcatcacgtgatagcaagtaaccagggttttttgggattccatctgctgtcactcaacaaacacgcgctcacagaagaaagaaggacatctcgttcggcctacctacaactcaatcgtgcactcccacactcccacagacatgtatcaaaactatgaacgtcggtcgacagcaggaccgatggactggcaaccactcgaagaaggcccctctcggaaacgtaagtgcttgtgtctgtgcgtactggccaagctcgttgttcccctcgactgatcgtctgctttccttgtctcgttcttcatgttcttgtcctcactctctcatgaacggcgcaatcatgaaccgtccatacacacatgcttcctctaggcccacactatgatccgttgactgcctcatcctcggcattcatctcccgcccgtccggctaccaagcaacccagccaatgtttccaccctccgcatcgacctcgaccctgtccccgtgccacactccgttcctgttccatacgccttctagtctctcaccaccagccccatcagtatcactaacgagctcaagctttacgtttgacccctcggcctttaatcctgtcaccgcgttcggtgtaccagacgtagagatggacgtagctggtagtggcggtagcggcggtgctgatggaggtggtgccggtgccagtgccagtaacgataccaatgtctctgcgtccaaacagaagacctcggtcaaagaagacgggtcgcaagagcagcctgattctgcaggagaggaagtcgtggttcctcgaaaggtcgcaggcggagcggtcaaacgagaactcaagaggagagaaaagacctcatccttcaggagacgacatggtcagagcgcgtacatctctgagaacgaggacgaggacaacagcgaatctgattcggtatgtttctcctctctcttctcttgtcgcttgtctctttactttctgtgttcttcttctcttcataatcgactgcatgtgcgcgcgctcacctttcggggctcatcctattcacaggacacatcttacaaccaaaagaaccgccgccgcgactcgaaacgatcttctaaatcgtcaggcgcgcttctccgtagagaagctacttctcaacgaccaacggatgtacattacaatctccacatgcccggacagactgtcagtcatggagaggtcccttacattcttctcgggtgagtctctctagtctgctctactctactctgccctatcttagacaaggaataacagaagaagaccctcgctgagctaaacgtttctcttctattttaacagttacctccaattcttcttcaacctttccctcgtccttatccttctctacctagctattcagttcattctgaccgtgcgagcagacatcaaccgaaaggtcgaagaagtttcgtatggttcgtttcggtcactctgctcctttccttttttcgtcttgtctcgtttgttcatccctttcttcttctcgtctctcctttcctttcctctcttttccttttccggctcacagagattctacaagaaattgcgggctgtacgagctcttatcttgcaaaccaatgcgagcctgaaagacgagtgccagccatgttagtaccttcttttttttcctctcgctctctattcatttcaaagcaccagagcttgaacatttaagcctcccggtttcgtcattcttctctttctctttctaaaacaacaggcaccaagcttgtacaaattgggagtattgtatgaatagggatccgacggtcgtcggaagggctcaagttggagcagagacgtttgcgggtgtcgtcaacagtttcgtcgatcctatcagttggaagactatggttcgttctctttctcttggcttttctttctcttgttcttttctacttccttcaccttcacctttcttcgtttcttccttcaaacccctcttgctttctcgtctttcgtatctccttctttctatcatctgaatcaaactgaatcatctttcgttttcttctatcaataacagggtttcaccttggtgactctatcatttctaacgatcctcctcaactctgcactctcgttctatcgatcatcccatcgaccatcctcccattcccatccctcgacacctccttcggcagggatccatcatccagcgtcctatcactcggtcggcgcgtcctccaaccagtggaaccattcacaatctcaatctatctcccaaggtccgggccaaggacaaggacgttatgaccagtggaacgaaggcccgaaactcgttcaatagatccgccatcgggaacaaagagaaggagaaagaaaagaaggaagagaaaaaaaagaaaataatatcggtcgatccggtctgtagacttccttcgtttgattgacgaatggacttttttctccttcctagctttgtctcttttcttcaattgtttcttccctaagcttcctctctgtgaaaagagagtgaaagaaagagaacaagagcatggaaatacaattatttgacaagtgtgaacaatgaaacgaaaaggaagcaatggagaagcagagcaaagagagatgagagaagacgaagaaagaagagggaaccgtcgagagaatgaatctttggtgttacatagtggcatgtttgagtttgaacaaatgtcgaaggaaagaatgaagtgaatgcatcttttgagaaggaatcgattgaacggaggttttttttcttttccttttttttccctttttttcaagttggaagagaggtttgggctgatgtgtatgtttggatttatatgatagtcgaatagacagagatcaccaaggagcatcgaaccgaccactgttttgacacaatccgatatgagtagcagcgtagaatctcaaaagtcagttgaacgcgcacagaagagcgtagggaagaaataggactaactctccatacggatcttcatcaacaccagccattcccttgtccctcccacctccagccatctgtctcttcgtccttgccttccttcccttgagcgctttgtattgatctcttgcctcatccttggacgtgatcgggccgaggggaccctggtagacgccagcggcagcggcgtcggccgcccatcgattgggggtcgacgtaccagaattgtacggtgaatcaacagggtcgtacggaaccagatgagagtccggatgagtggtcgtcaggatccaataggctcgtcgccagtcctctttgctctccttcctggaccatcgaccggcttgactgtcggcgaccccggtttcgttcggcttcctgatgctgacggtatcttctccatgggagaatttatactctttgaagtgtaaaaaccagactgaaacgaacaaagagaagaaaggaagaaaggaagaaagagaaaaaagaataatatttcctgggtgagtcatgcgggtttctctcttctctcgcagatgatggaaccggggaaatgtcgaatagacggagcgtaccatagttgattgtatgggattgagaccatcgtttggaaacgcgcgcacatctagccaacgacctgaaatctagttgtccaaaaatcttgatgcctagaaagaggtggaagaagattggagagagaaccaatgtcaggattctaaacactccatgatgccgatactcacgctcaagcttgaacatgacccggacacagaaacgtaccaatctgactaggaaaggctctaactggatctgtctttgatcccaggatcaatttcttgtcctttcctgtcaacgaagaccctcgttttcgatccgtcgactctagcgatgggctgacagcaccctctctatctctacctggggtgtagaccgccacagattcatcgtcatccgaccggatggaccctacggaggaagaacgttgatgggatgatccaacgtcgagcgagttaagcttggacgagaggagagcggtctgtagtagtgtatggtgttgaggatgaggatgggatatattgtgagacatggtgagttgtgtatactctatgagcgagtcggtccaaacgttcttgatcgatggaagaagacgagggaaaggaagaagaaaaagaaaggaaactcattggccgggtcattaggatcaaaatgagagatggttacggatgatgggtggttacagtaatatctgacgtcatgccgccgttttgactcacgtgctcgctgtgcttcgaccgtcctacacctactatctccatctatcaaggtccagagagtgagagagagaaaaggaagacagaaaagtctggagtatgagtcatcgagaatgggaatatggtacaggtatagacaagaacgaccgctcaccagttaaggcgagagagcgctgatatataactgcgctcatcatcctatcgaaggagttgtgggagagagaagtgaccttgtgttcaacgatacaacatcccttagagaaaccatgcgcgacattatcatcatcctcgacttccttgtcctcttctccactgacactgtggctcctgctctgccctgtactctcaacggtgtaaaggaaatggatgaatcagaggatccccaaggtcacataactgtaacccctactgccgctgataaccctaacatcttcgactggttacatcctcgagatctctcccacctatccaaacatctcccgcaagcacttcttttataacgccatcaccatcaccatcacgtttgatcatgatccgtcgtcgacctaatgctcctccgccaaactcggtgcctctctacccgacaggtcctagtacggccgcgcccaaacctacatatagctcgaatcgaacaccagcgtacctatcaaacccgagcgaagggtcgtcttatccttatcgatcaaacggaggccagtccgctggctttggatacagctcttcaagctcgatcagtcatagcgatagaaatggagtggctagagcagctgagcttagctccagatggatgcttagaggtcttagggatggaaccaacgtcgtcaaaggctgggaaatggtgatctcgtgagcttttcttttccttgtttgtccaagacgcgtcttctgtcctccctctctcttccttccttcactgacttgatgtattggcctgactagtgatgctcgattgagaggaagttgtgagtttccttgagcctgtctttttcttgttcttatttgtcttgtttgagacgatatctgactgaatcatgctcaattcgttgcaaaacgcgactggggtacaactcaaacccagtggtcaagactctgtatgtatcgactttattttattttatttcttctttctttgcttcgctattctttatcactgcttgcaagcaactgagagtttctttccttctcttctcaccttgtttctctacctcactcagtctgctcaacattcccctgctcctccttctactcttcatatcacacatcgtgcacccactggtctttccatcgatctctcagcgggcaacaaagtcagacccgaccgtgttttcctggatgttcaacaatgcgcagttttggcagatggccggaacgggcgctgtcgtcctagtcaacggcgcttggcagagtcaaattgcggagcgcgcctggggtcttaacggaggaggtggagctggcgtcgggggtagaaggggaggtagaggcgaaggactgtatgtctgtcaatctctcatctttctcttgttcaatcttgcaaggagtcttgtatgtgagaagaaagacaaggaggaagctgacataacatgcacactccctggttttctatgtggtttcaagggcgacgcggagtattcttctgctagattaccttttgataacttcgatcctacgaatccttcctggtggcctcggatggctcttgtcactcgtgtataccacttgggtcaacggatggtactgctttgagtaggtttttattttgctgaatccaccaaatatgtgtgtgtgtgtgtgttcaaaacaataacaaactgactgttcaaccatcataccttcttctgcagatacacatggtctgcccagggatggagctttgtggaaaagatcgactttgttcagacccgatgggcctactttttcggattcggccttcccattacctttctcacttgccttcccttcctgccacccttactgaacgcgacgatctttgcgctcctctatccgttctatctgattctctcgacgatctcgaacccggttcctctatcgacctcatcccttccgatgtcagctggtggaggcctcggcggaatggaagaaggagccggtggtggtggggccataggggagcgattcgaggatgagctcggctcggatatgggatggtggcctcggcggatatgggtgctcgaggccggcaaagccggtgtcagattgtgggacgtaggcagacgagtcggtctaagcaaactggccgacgtggcaaactctggacggtaggatgtactcgcatgcatgggtgcattccagatgaaaagagctagtatacaaatccgatacaaatgaatctacatatgctgcttcaactttgtgtgtgtgtgtgtgtgtgtgtacaagagtcgtcagtggccgattggctgtgtggcgtctgagtgagaccgtgaggaaaagctgtgcttaccgatcgtgtcccttccggcctgtgccttctgccatctttcctcttcccacctttccccaactgtaccctcagctcttacctcggctgccttgtccttatccgtcgctcacgtatacgacacagtcttcagacatctgttgttaaatgcttgctcctccgtcgctcatcgagctatcggccaaagaggaagaaggaagaaaaggagggattgatcaggaagatacgataggccgccaagacgccggccgagttacttcttcattgtctgacctgcttggatcattcaaagccagcctggttgataaccctgtggcttcttcctttgacggctctatgtatctgtctttgccgtcatcctcctcatcaagaacatcctcatcatcaccatcaagactggtatcagacatgacagcgacattctcacaatcgtcgtcatcatcattaccacacccggccctatcggacgactcacagtccggcgaatacgactacgataagggcgagcagacagagaatggggaatacgatggaatttctatacgtataaaaccagacgtcatccgaccatgggttctcttcaatcgacccaccgtttcttcagacatcacatcaaacccaatatcaacatcgatcccaccgacggtgatcaccacggacgcgttcatgatcaccgtacaatctgggacagatccatccggaccgtcacaggccgaagagaatatgttgctggtgttgctgccgatgctgatcgtgctgagcacgctcctgttcttcgttcttgtgttcctgatcttcgttctcgtgctcaggaaacggaaaggtgttaggtgaggtcttctttctccttccctccttcttttcttccttctgttatcagggctccttgtcggtggagccgttctgctcagttgattcgtcagcgaagcgatccacacgagcacgcatatgggatagagattggagagctgacatgatggatttctctctctctctctttcatttatcggaacaactccaacaactccttcttcggtctctcgaaacagacttggagatgattctgggccgatcgatctcagcagaggcgacggcgtgatcggtgaaggtggagtggatggaattgaggcccgctggttagaggatcaagaagaagacgtacagagagggtacaagagagctaaaggtctgtcgtcccgtttcttgtatcttcccgcggccacgtctcctatcaaaggaggcggtgcctctcatgaagtgtctttgggggggatggggaaagccaagaaggacaaaaagaacgaatcactgactctcaaactcatctcgatcatcagactggcaactgcactatcccccttcatccattcctaccgatatcactctccctcagtttctctccattcaagaaaaaggagtttccgcctggtcgttcgaacccgattacgagtccaacccatcgttatttgttcagtcccgaacagagatcacgttctttgctgacggaccgggtatgtctcctgaagaaggaggcggcaactctgtgatggccaatctaccactacccaaattgaacgaggtctactattgggaatgcaagatattcgaaaaggatccaggaaccaaagtcgcaatcgggctagcgacgaaaccgtacccttcgttcaggatgcctggtgagcaggactttgttctcttcttccacccttgaacaaggatagaaagactagttactgatcttcgaccgtcactcggcacggttacatcaaataaaaggcctgaaccgaaattcgatcgcctacttttcagatggcttcaagtcacacaactatccgttcactgctgcctcctacggacctcctctagccgaaggagacgtcctcggtgttggataccgtcctcggacaggaacggtgttcttcacccgaaacggccgaaagcatgaagacgcattcatcggtctacaacgattcaacttattcccttccgtcggtgccagcggaccggccaccgtccatgtcaaccttggccaggctggctttgtgttcattgaggcaaacgtgaagaaatggggcttggcaccgagcgtgggcactctggctcccccaccgccctatgggagtgagagaggaagtatcctcttggagtctggatttgggagccccgcaggttctcaaacccgcgatcgggagttgatgggcgaaggtagctcagggcgaaccagatcaagaagagccaacccttattcgacagccttagcctcttcgtccgcttcgactaacacaaacactatgccgaccacaacgccggccagatcatcccctctacgaccgacctcatcttcagcagcgacgacgtctagaccgaaaacattgtggacgagttctgctccgttctcgatcccgagaggttcatccgtaggcgaagaagacatctcgccctacgtctcacccgtcgatagggagtcaatcaccagagttcttccacctcttgagccttcttctgaaggctccggatccagatctagtgggtcctcagacgaagacgaagcggatgaggacgacgtgtttctctcacctcagtcgcctaggtcccgctcggcttcaggatcggcctccgaggatgaaacagacgacaatgacgatgtcgatggtgaggatgagtatggtgaggaccgttctagattcacaaaccaaaaccatactggcgcagatggcagccgtcgtcggattccgatgatgtttgagactcaatcgagctcaccaactcgatcaccgagtccgccgacgccaaatctgttggacatcaggcttaatacgctgagagatcgacaagcgattcatgacttcttcggaaacgttgctcatcaagaacacgtttcgccggcgacgttgtcagcagcagccgccaacgcttctgcttccgcctctgcatctgtctcgaactcaacacaggattctccacgaaagaaactaaagaaaaagtcaacgacgcggtcgacgaataagcagaaggctcgttcggatggcacgtccacgtccacttctactctatcatcccagcctatagcatccggaagcggtgcccgtcacggttatggttctgggtcgaatcctaggtctggattgtcgacatcgccgacagctactgccggtgctagctcatccagacctgaacgatctcccccttcatactcgcccttggatcctgtagtgtacgcgaatggcgttccgacagacctacctgcttcagtgatcagtgccgcgttcgaggcggccgagaggggagaggccggtccggcaggacacaccagacctggccttggcggcgtctcgggggatgacggaagggagagaggatggaggaggtgggtttcgggtagtggggctggatggttcggtcagagtaccggtactcaaggaagtggttaaaaacataagaactcctcccttcactactcatgcctttcttccttctcctttttgtttgtttttgttttctgtttctgtttctttatgttttggttgattggctatttggttatcattcgttctttccagactacctcatgcctcgtctcgattttcattccactcgttcatgtcgattcttcttttctcttttcttccctattttgtattcaattcccgcatttattctgtccattcatacctttatccttattctgctttgttatcgtctttgttttgttctgactttaccctctctttatatttccttaccgttgcggtttgtgattgtgcacatatataaccatatcaaccttcttctctctttccttgtccttctgttctcacttacaaactctgttcactagtgtcctggcatctcatgttattcgacaacccaacccctactctatctgacaacgtgtttactagccccttctccttcctgtgcttatcggtccatcttccttttgttctctattcttattttgttttgtttacatgtccttattcatatcttaatcgtttcccacccaagagaaaaaaaaaagaaaaaggaaaagaaaaatttgggagacgtcgggagtttatagatcatacgcatacaaatttctcaacccacagtacaacgatcctgacgacttcaacccttcaagtgatacacaagatatacaaacagagctcatagggaattctaggctttgccggcgctctacgagcaagaatggaagaaacaagaaaaaagatgccacaggaatgagaggaagagtgttggtagtcaattacgaatgtcccaacatgtgtgtataaagggggaaggg

SEQ ID NO: 1135 - DNA, 49289 bp, Xanthophyllomyces dendrorhous
caaagggacgtacgccgaggaggttcatgaatctttcaacggcacctgcatacgtgttggaagcaccttcgtatagatcgggcatgcccaactctccagcgaggattccttctgccagatacttgttcgtcggatctcgtgcccatgcttatgtgtgtaaatagatatgtgggcagagaggcagatatcgtgtcggtcagagtgcgtaggtgaacgaggctgtcgagtcgggatttgagagaaagaggaaagagaagcgaatggcacgtacagttgatgttgaacttgagtgcagacaagccattggtttcttttcagacaaacagttccactcgaagcagaaacatatctaggactgtgaggaaagagagaagcgctcttacctttcgagctccagcggcgatgcagtttaaccagatttgatcttcaagatcgtccgtaccgtgcatgacgagataatgtccagccggtcggcagatcccttccaacttcttcaatctgtacgatgggtaggtgtttcaattgtcagagaccagttgtgaaagatagtatagatgagtatacaaggaggaggagaaaactccttacaggtcgaaccggagtttgggctgggagaggtatcgaccgtgaaggttaccaatacagggagccagaagcgtagcgcccgtctctcgcatgaatcgttcggcctgttgagcatgggtgttgcagaatcggacacatggaaagaggtgaacgagatgggcagaaacatgtaattgacacaaggtagagaacttgccttggcaggatccgttagttgccttgaaattggaaggaacatcagcattggcatcaaggcatgatttaagggtgataagaaaaggtgctcacccatctgcaatcactctcaacccggcttctccgccctctgtggaccgtatgggtttaggcagccaaggaagtgagtacccatgtctgattcaacttgatgagacggcccaaatgacgtacctagtcgaccgagttcaacttcacaggcgattcctaggccagtagcccgttcgatatgcttcctagactggagtaccaagggtttgtaggatatgtgagcgcttagctcgaagtgcgcaagtcgaaagtcgaacgaagcagccgatacaagatagaggacatgaaagacgaacgatctcgatattttcttcgtcagtatctgcatgagacgaatcgaccatgatactatcaaacttgacaccttgttcggcaaaggcgagagcagtatctatatcgtgatcggtcgtggcgtggtccagatgaatggcgatgggaactttggcttcctttgccagggagagaagacattctatgtttggccgagtattgggcaaggccggaggaggagaggataagaaagatcagaaatcgagacttgagctctcagcaaggcaaaccaagtgaaactagacaaacggagtcctggcttcccaagatagtgaagagtcactgggaagatctagagtacgagaaaagtatgctcagtatgcctaagggacgttcgatgagagcgcgaacgaacctcgatgatcgcaggtgagttggttcgttcagccgctcggatggttcctatagccgactggatatcgtacacattcatcgcaacgacctgaagagagagatgaggtttccgacgtagaatggtctcgtcgattagctgatggattgttcaaggatcggagagaagaagccttgctgtacaacacttacaccataagatccttcgtctgctttcctaagaatctcgagcgttctgttatttctcaatgtttctgggagggtagataccatggtgtgtgtattttctttggggtgagtgtttggggtgaatgcctgagttgaatgtctagaataaacgtctggaatgaacgtctggggtggatgcttgagatgaatgtcccggacaaatacaggtatattaaactccagaaaagatcgtatgccggtccgacgggccgtagagccggccggagggatgttgtcccggagcagtataacgtattcttaaacttgtttcattcgtctcctcgttcgtctctccccatcgatttccccatttccccatctctcatcaactgtctactcacacacactcacaatggcaccctcagctaggaaagaaagcgcgctctcgaagcaggagaagttggagttggtagcagacatggtgggttcacttttactgatatctactcgtcgctacctcacttacacctactttttctctctctctctccccgatgatagctcgagatcaatcacacgaccacagtgatcgaagccttttctcttgcttccaagaccggtcttgacctcaggatgctctatgatatcattgtcggggcggctggaaactcgaccgcgtttcagcagattggcgctcgtttgttaagtgttgactcggccagcactacgccatcctcctccatggcctcccttcaggagcttgtccgtccattttcttgtttccatacacatcttcctgtaaagggatgcctgaaggactgaagcgattgatgtttattttactacaggaaagaaaggtgcagaaggtgctggcagagtcggtgactcttggcctgcctcttccattgacgaaccagtcggcccagttgcttcttgcgtctaagaaatatagctccggtccggatgagctggctatgaacgctcttgccaaaacttttgagacccttggatccgacaagattgaaggaaaacagaaaggactttccgaagttactctcagcgacggaagtcaggaggagaagccaagctctctggaaaaggttgccttcgtcggattaggaggtcagtcactgtctcctttcattcattcattcatagtgtccatcggacgtagaactcacataactatcatcatttgcaccactcatcatcagccatgggattgggaatggcgacttcacttatcaaagcgaacgtccctgtggttgggtacgatgtatacccgccctccctccaaaagttccaagacgttggcgggaaatgcgcaaagagtctggaagatgccgtccaaggcgcacagtgcttagttctcatggtcgttaggtacgtcgttactgtgtctttcatctctattcttcacgccttgatgaccgatgttgtctctgttgtgttgaaatgtatatatacagtatccagcaggctgcggacatcatcttgggaacgtcttcttctcctggaattggcgaccgtgagtgttctgaccacaagagaacagacagaccgcatggaattctgatttgcccattcgaaccaacctaattctttgtagttctctccccatcgacgccaatcctacttcattcgaccgttcctccgtccgagattgtccaactccagtcgtcactctcgaagcttccgagcaaacctatcttgatcgatgcacccgtctcagggggtacgatccgagctgcccaaggtgacttgacgatcatcgtctcagcagatgatcacaccggttctgtcatcaagagcatcagaccagtcttggatggtatgaccggtgggctgaacataaaaggaaggttgagagtgctcgatgggggacttggccaagcttcattcgtcaaggtgcgcctttttcttttttctccctccttcccctctgtgtcatacattggatcaaaacgattaacgtttcaacaacgtatgaaacaaaaccccccaaagctggtcaaccaacaccttgcaggcgtccacgtcgctctagccgctgaatccctcgcactatcaaccagactaggccttcatgctccagacttgttcgaatatatctcgaaaggagcaggtcaaagaggaacgagctggatgttcgagaacagggtacctcatatgttgaccggcgatcttactcctctttcggccggagcaatctttgtcaaagatcttgttcgtcccttcctttttgcgggtttaccttactggattgaaccctagagtttttccagtttctttttttactttattttaaaagagacaaactaatagactctctacgcctatgcggttgctgtttttattgggaatctgcagacgatagtaggatcggaagcatcaaacttaggtatccccgtgttcttggcgtccagcgctctccagctatacatctacggcgtcggtgccggctggggcggagacgatgattcgggaatcgtcagaatgtgggaacctctgggcatcaaagctcatcagaagtggtagatcccggagtcccagtcgagatagggatgagtttctgatgagagaaccgtggagagtcaaggcggaatcatgtatcatatgagaaagagaaaagagggaaggagctcctaatagttatgtagcaaccatttatttaaatgtctatttgtcgcacccaaagacaagagagatcggagaaagacagaacgttggagcaaacccccaaaagatgaaagcgagcctcgtctgctccatccttgacagctctgatgagaagtagatggtacgaaatatgaatcctgttaagtctactcataatatcctccctgttactcataggcgagagggtgagtggtagaattagcctctcctctccgtcttgaccgttctcctcgttcgcaaaagtttccttccgtcagcacatgagccgttagcgtctgtccatcgttagtactcctgctgttgtgactgaagaatgtgaagtatccgatctaactgctgaccccagttcttcaggaacgaccatgcactgtacagcaagcgatggaaacaaagagaacgacatccatcctcttcccatcctcatgttggaccccaaaggctccaccgaattcactcaaagaaagaaaggcgaagatgtgtctttagaaatcccaaacacatgcacatgcaaacacacacacacacatcattccatatcaagcaaaaaagcgggcctgttttagaacttgagggcgtggggtcggtctcccttggaaagaccgaaggaagccttaaggtacttggcgaggtgctcggtcttcttgacggaggcgatgatggcggcgtcaatggactacgaggaaagaaagaagcggaaagaatgaagcagaggtaagaacgactacacgaggcgaacgaaaaaaaaaggcaagtgaatcaaacaaaccttctgctcctccttcctctcggcgctcaaaccctcaccacccttcttcttctcctggaagaactctccctccttgtcggcggacttggcagccttggccttgacgaagtaagcgtcgttgacgttctcggagacctaaccgatcaagaaagttaaccagaccaaacgataagccaaccgaactgaagtattcagtgggcaagagattcgagggcacataccttgacaccggagatgtcaaccttggtggaggtggcaatggtgtaagactgggcgactcgtcggaggggaactccgttgatgagtcggggaccagtcacaagcaaaagaccggagtcgagctgcttgaggaagacaactcgctttcctcggtatcgtccggcgaggaggatgaggacggttccgggggtgatggaagatcgaagagcggtgggctaagagtgaaaggtttaaaatttcaagacaagagccgtcaaggtttgttctattcgtatgctatggtcattcaaatttgatttcccgatttgggagaataaaaaaacccaccttgggggactttcggctcttcttggcgaccttgacatcctcggaggggtagtacttggaagccttggaggtaggaacgagtcgggtctctccgttctttccaccgccgatcttcttctcgacgtgggcgggcttctcctcagaggcagaaggagtaaccttcttgggacctgatggatacatcgtgaagagagttgaaggagtcgttgtttcgacaggaacgtgcatgtgtggatgggaggtgaccgaatattgaacggatgaaggagaaatttgtgagatgtttgaaaagtttttttccaagggaggtttcgatgagaattgaagagaggacgagcgaggcaagtagacaccttttagtagtctgatccgtttacgactcgacactctgagcacactgaaagcactaacccttgtagagtcctcgcttggaggcgacctccgacctggagtagcggccgatgtgcggggcaatgaatccggatcgagccattctgtggatggagaacagtaggaacaagaccaggggaaggtcagcattttgtgtttcaataaaccttgggcgtacagagtttttctctctggttctcctgtccgtgctcgtctgtttgcttgttctttgtgagaaagagaactctcgcccagtcccatcgtctcatgttcttctagcatgttgttctgttctgttcttctcttttctgacgtgacaggcttcgtgtcctccactactagtctcacggtctttctccgacgacgacccttcctcagggtctccgttcttcccctccagccacccgaaaacctccacaaaaaaacccagcgacagacgagcgagagcacaaggcgtagggaaggggagaggacctgctgactggacgagttctcaaggacggacgaaggaagggcgatatttactttgtggtttgcttgacgatagggacggcagagaaaaaaagtttcgtcgactacagtagacgacgattagcgaaggcccgtgcgtgagttcttcataaaccgacccttatgatttatatttgatgagtttcaagtattcggtcgtctaagtgccttaggtaagtcagggctcaggcacgccgcctggtttggctggccagcaactcttccgccgcgacttttcgtcacactgtcgattcggtgtactttcttttatgtagaatgaaaagcccatgggattgataaataacagagagaacagaaggaaggagagacagagaaaaagaagtatacaagtgtgtggatgcaaacggaggggaggataaagacatattaacagacagacagacagacagacagacagaaacactagcacttataaggtatgtatatttttgattggacagatggaaacagtagaggcaatggggaaagacaaggaaaagagagaaagaaaaagaagaatgatacacagtgacaggatcaaaagtaggggatccagctctctggcaacctagcaaggttatgacgattggtagccttgttgatcaaagaaatcaccgactgggtcactggaacgtcgccctttgtctgttggaacgataaagcgaggcctgttcaatttcttgccagaatagcaatctctccgtccgacagaacaaaagaaagcacaaaccttctctctttcgtactggcaagagatcatcttgactttgttgccaaagacctcaacgttctgggcgaccaactgtcggaaagacaggtcatctaacggtcgacgtttcaggacgttactgaacaagaaagaacactcgtttagacatgtattcctattcagacacccaagaaagagagaaaactcgacaactcacatcatatggtaaacttcatccttcatgaacaatgaaagttgctcctccagatcaaactgttgagtagcacaaaacacaggcgcaaggtcagcaaacgggttacaacaaagcatagtgcgccgactacagacagggaagagaagccgtacttctggttgacaaagtccacgaccaatcgcgactagcgaagccgtcaggataccctcaattccagtcagagtgataaagtgctggatgttgggtgtcagacggaagtcaaccggatcgtcattctgtagaagcggcgaagactctggcttgatcgagaaagctacaaagcaaggtaaaatagcaagggtcagctttcaaagcacattaaacactcttcatctaacacaagaggagaaaggatacgaacaagctgtgtggatgatttaaggaagagataggcctctggtaagcatatgcacatccaatctctatatcataaaccttaacacagaactcacgaagaagctcgctcatgtatatcattcccgtagtcctcgagatctggaatcggggcagtgttcgctgttggagagcggcaacaaacgtgatgaacgtaacagatgcgatctgcagagtgaactgtttcctcatcaagaacagatcactcggcgtcttcatcaaacgaatcatgtactggcagaaaccgcgcgacgtaaaagagaagatccatccgttagatgtctcatctcgaagtatcaccgaatcagagctagtcatatgtactcacgtcgctcagaacgttctttggaatgaacttggtctcgatctcatccatcaactccagccgcaggttcacgtactctggcgagccgacaacttggttcgcaggatcgaatagctctcggaaccgatcagtgaaatgcaagaccggatcttctttggaccatcctttgtctcgacaatgagcatcgtaaatgtcctggaaagagctgtaagaactatcgagctcgatcagtcgaagagcaggcgcaagagggatagcggccggtaggtggaacgaaaggtttcgttttctgctctcctttcggctctgtagaacagtcgagagcgttcggaacacctggctcatccgatcctcccgtcgggtatgtctcgcagcgggtaactgaacggagaacgaatgggtagtaccattatgtccaatcatagtgatccgcctgaagcagaatccgtgacctcggccaagttcgacgagaggtacgaatcgagcaatcttggcaaagtcgttgttgttgtcaacgtgcttgagtaacagagagaacgaatgttcatcaatctctattaaacttaacatcagaagtcaacagacagaaagaaggttgccatcgacttacctgaaggtactgtccgggaacttctacctcgtcaaacttgccgtgatggaactctgccagataacagttggcttggtcgagaggttgcttccggggtcgtcgatctagtgacacctcgtacttatctcgcaacttttggagctttcggacgtagtctcggagagcgctttcttggataagatcaccttccaaggacgcctaaattcgagagagaaagaaagacaaagatctcagtacagtccgacagtgtactgaggatgatctctccgacgcagaaacgtaccttcagagaactcgatagattcgatacgctttgagcgaatcgaagaacgctctccttagtcgctgcgctgagctttccatcatctcctggtttgtcactcctttggatatattgctatagagaaatagagaagggagtatgaataaaacacagcgccgacggaactatcacggtccattgaaaaatacttacagcgacaccgtccaacagcaaagcggtgatgaatcgatagatgtcttcttcggcaggtggtttgcccctggtctggatttgatccaccatcttctccatcgaaagagccaagagagggaaggcggtcttgaggatattcagaatctcttcaacaagctcccaaggctgtcggggttgagcaacgccattgttaggaggaagaggaggagcaggagcaggaagagcattaacaggaggtggcgccgcaggaggggcaccgttagccgattctgttgtcgacgacgaggcaggagctgtgacagccactgtaggagcggtcgtgccgttagtagcaggagtggaagcggaagtatcagtagttctaggcgaatctgtcgtagattcggtcttcacagctggagtggtcgagtctgtgtttccatccccgtttgcggttggtgtggggacagaagtgggagttggattagtggccggagtgagagcctccgtgctctgtcgactagccatctttgcaagctgagagatatgttgacgtttgatagctccaaagtcttctttagaagtacggagttgatagaagagagcctataatacaagaaacgatcgaaacgtgcatgtcagtattaggtttacatagattgtttttgggaataacttgcacttacttgtggataggtctttgcaatcttcatcaagatagctctcgcatgccgagcctcacggtgagacaacgaaagcagaagttgaggaacgagcgtgatccagtaccaggccggcatatcacccttgtacgattcgaatgctttcgagatggccgaggtggaagagtcgtccaaactgaggagccaaagaactcgaacaagaagttttcgagtctttcgactcttgtatagaccagcggcctggaggtaacaagaaacggcgttggcggcaaggtttgagtcgtgaggcttctccttgaagattcggtcattgaatcgaccccattcggcccatgctttgggtaagttgagatccatctgaacggcctgagcaaaagcgtggttggcatcttccgaatggccgagcttggcgataaacattcccttgagagtaaggaactccgccttctgagcgggagcaaagtacatgaggttcgttgtactgatactttccaatccttcggcaagtcgatctggcttctggtaatggcacatcgcttgttctcgaagtttgaggaaagcttccgagatttcaatgttgggaagggcgtagatcttgttgagagcgttgctgcaaacttcgtgtagctgatgctttctggcgacatgtccgaatcgattgatcatccaggccgtctcgtgataacctcggtacccgaacgtagaagtctccccttgaggaatgagaggaacgtagaccttagtgacagcagagaagacgtgttgtctccaggccagaagatctgaccaaacactgatgtcatcccaaaagttgggcaatctttctctccaggtagtgaaaattcctttgagatcatgacccactctaaactccaagttttgcgcattcgtcatagcaagactttcaaagaccaaagacgcctcttgaagttcaacgaattgctggaaaagttggagaagagggacatgggccatggttatcgcttttggaagggaaatccacttccggatagagagctggaaagcttcgtcgaggatcttgacaaaatctccattcttctctgtactgttctgagtcttgatcaagcaggtgtacgcctcgaagacttttcgacgaggagtagctacgtccgagacagcagccaaagtagactcgatggtgtcacggtcaaaggatccccaatcagacaacctccaagcacactcgaggagtaaatcgtggttattttccgcacgagccaggtcggagagaatatcccattgctggagcttctgagcagaagttatccaatgatcttcccataagcagtactcctgctcggtgaacggaaggactcccgttcgagctttgatttgagcagcctcatagaacacctgagcgacaggccacatcccattctgctcgtacgaaagagcagcattggtctcggcgtagatagatcttcgccgccagaggccatagaacatgtcgtcctcgcatagatcagcaaagagctctgcgagtccatccctagtactttctcgaaggccgtcatccgaacgaactggttccagagttaaggagttgttcatgagctcaatagcagtgtgccaggcatcgaacgtcttcccaagatacttgacgacaaaggggggaagcacaatagcgggggaacaagcaagcactccttcgaggatggtctggacgacgttaggccgcatgtcgacctggttgagatggtgctcttttgcaagcagagcaacgagatggcgagtggcatccgactgctgagacttggaaagggtagaccaacaaatcttgaatacagatacccaaacttgatgggatatctctgcatctctatgaagcaatcgacgagcagggagaaggtagcttccgacggtcgcctgagccattaagctttgaagaaggctgctgttctcattagaaacaaaacctggtatcaacgcttcatcagagttaacacaacctagaagaaggtcaagagcttggtgaatccaatagcctccagccaaagcctcccaactttgtgatgctaggacgtattgcaatcttccagccaatgttgaagggaggttctgatcaaataggtcaatgaatttgcttcgtaagactggatcggcatttcgagttccgagaaggaaggcaggttctagcctggttgtaagatccgtacgcttgagagacggttccgaatagatgtctagaacaagttgaaggaacttcccaagaagggcaggatcatcccttttttcgaatgccatcatcttgagaagtaagccggctttctccttatgagtcggtagagcttccttgggatcaagaacccagtctctcatgatctctaacaaatattgacagagacgagtactcgaggatttttcgatcagctgaaccaatccgctaaggagccatcgtcggtgatccttaagctcggttactcgaggtcgacagaggttcagaacgataataatatgatcgacgttggcttcagcgagagcagccggagtggcgcttgaggtcgtagtaggaggagggggagggggagagacatgatccttgcaaagcttggtgagaactttaatgagatgaggagcaaaaacatgctcgatcttgtctggtctagtgacagtccaacattgaaggatgaacagggttcccttgagactggttccattcttgaggccctctgcgatgctgttttcggcccaatcctggaaggtctgcatatcggtctccagcttaacgtcctctgcagggagaggaatgacttcaaacatcctctcaaggataggtcgcatactgtcatgaagaaccaactcgtcactcgtcacgctcttctcgataagcttatggagaacaccgatttgagacacgaagaattggtcaggcttgttagaggcaactaatgagagaaccctggcagagttactgattacagccagagtctgttcagtgagctcgagctgcgaacgagagtaaggtgatagttggtacaatcagcacagagtaaatgtttgcaaatggcgatggcttaaagctattttgactcacagtaaccaacgtccgctggaagaaaccaagtttgacagaaaccggactccaaggtgtgggacccaggagttccttgagcaactcaaaagatcgtttgcaaagtccgttggcagccataagctccggagacatggaaacaaacctaaccagatagctaacgatggcttcacgaagaggaggaggaggggcccatcctccagaacttccgctcgaaacagccgttccggctcgatcgacacgggatcgctttggagatggaatttcaccctccgaagctctcttattagtctcggtgtcttctttcgaaggaccagttcctgtacggcgtctctcccaggttagaacaaggtctacaatatcgatgcttaactgaaaccccgtttgaaaacgttgatattcagcttgaagtatcctttcggtcacatctgacagaagacacaaaagagtcaaagactgaccttcttcatttccggagtagcggcaggggctgaaccaagacgggtaagagagttgaccatttgtggtacaaacaactctctactctcatagaacagatcgggatggccaacgatgagctcaaagatgcttaacagctgaggggtactatgtccttcctcgatcaagatttttcgaacgactccagcccatggagggtgtacggcattagcagctcgctgaactcgttgaggaagaacctaaagaagaacagcaaagggggttataagacaaaacaaaaagggataatgataaaaagagccaagaaaggaaaacgtacgggagcgatgatatcaatagcctgtctaactaacgctcgtccttccgagggagaaagtttaagaagcccagaccagacctgcataacaatcttcatcgggcagtcgttgctctcaatgaatcgagcaataagcagatatgcagtatgttttactgtcgggtctgcatcccttatgtaaagccaacccatcttaatgacgtccttcctgacttcgctaataacttcagagcaatgtcgaacgagcagagtcgacatttggagaagctcaatcttgagggcatccccaccagcggcgatgagtttatcgtccgatacggttttctgccagatgagagcgtgagcgctagcggcaaactgagcgtcgatcaagtcattcccgtgatccttgtcagagaagaagacaacgaggatagggttaaccaggagacgaagacagtgcatcttgaaatcccaagagacgttaggatctccgaaaactcccaggaaatgattaaggacttctcttttgacggcggtagtcgatccgacagctacgttctcatagaggaaggcggtcactctagaaagatcggcattggtgttcatggtgtagatccggatgacatcgaagagcagaggaacatgttgctggaatgtgaggtagctgatgaacatctcgacgatgagcagaggttccctctgagacgccgacggtgcagttcctccactggcgggagagagtctctgtggagaagctctccagagcttcagtagagaatccaagatggacgatcgagtgacgagccatctcggatcggaagcgataagctctcgaacaaggagtaaaccaggagtgatcaaatccggtgcggcatcgtctaagaagcagacctcccctagcttctttgcttcggctgaaagttcggagatgaagttcggtgcatgcccagaggcgatgacgtttcggaacgtacggatcacatctggattccttagattctcgaacaagaacgggaccgcatccgtcttataacgatcaagatatttggccaagttctccgtaaacggtcccggtgacgattgatgtagattcgtctcggcttcaacgacgaggttagtaagcgtcttgaggaacatgttggcagtgggaggtaaaagccggaagacgttaatcaaccggaccattcgagcgatatcttggttgtcctctaatggagagaacgcagcggattggagcatgttgggctcctcagagagcgtcctgaaatgttccaagagcttgtgaccgatctcgaccttgaagtagtttgttaaaagttcaaggaaccgagctagaccttctaatccggaaacagagagtcgtttggcgtccgcaagattgacgaggatcgggcgaagaccagattgaagaacctctttgggaagcttgttttggtgagccaacacgtgcttcaatccttcgtgggctacactcatgatttcctttgtcggagagtagacatgcttgaagtaaaccgcgatgactctgcgcagcccaaaaaaaaaaggaattagatacccaaacccaccatcgtggctgtcgtcgtctagagttcaaacgtaaagagaacttacctcgatcgtacgtgattctgcttcgcaaaaaactctgtacaagccatcgcagccgacaacaatttcaaacaggatatccttagattctttaggctgacttcatgccgatgttgagcctgtctaccgataagagcctggtcctccgcgtctgctaatgcaatcgcttcgtgaagaagtctgacgagctcctcgttgacttccggaagagacggtcggagattcaaacagtaggtaattgcctcgatgtttccgatttgcatggcgaaaggcaacgcccgtaaaggcttgtcgaatattggattgagaagttgactcttgacgggtagaagaagatcatggacagtggtggacgtcaactcagacaagagttcaatacatgactgagaagtcactctgacaactgaatttgtgctagcaagctccttgatgagtaattggatgagtttcgctcgttgagatgatccagtagttgcgtctacgttacacgtccttaggatgtgtttgatcgtatctaccacgaatgatactgaccgaggaggatcattaggcatgtctttgagaatgaatagtaacgggcggaggaagtcgagctgtcgatctacgatccactgaatcccaacccctggtttcgacgtaaggactgataaaccagtacatcccgccagtttcctgttccacggttcttcaaagcataatgatgagagtttccaacccagagcatccagaatcggagcggggtcaattctgtcctccatggcgtcttcacttgggggatcatccgactgggagatgatatcatccaccacgagagagataatctcttttccttcctcggctttgtcagacggaagaccggcgagcgcgacggcgactccttcgaggtaacaacttactaaagttgaggcggctggatgtcgttctcttccgtgtcgatgattttctgtcggtggctcccttctagtttcagagttgagtaggtgccgggaaagttttcgtaggaatgccagggcagactctttcagttctggatgttggtaggcaaagaagagtccttggacacattggtggaatgtctgttcctgttcagatcctctcacaccctagaatgagttcgatacaatttctcagttagtactcgaaagaaatcagaaaagaaagaggaagataaaagaacgctagatctcacttgagcaacggagacaagagcagactgtttgaaaaactcaaaggcctgagctctatagaactcattcggatcttgaatggacttcaaggccaactcgcttagcacagccactccgaactttctctggtgaccatcaaagtttatcggcattgtggctgctggtgatgggaaatttgattccaggagatgtgggacctgttggaaccttctatttcgtccgcctaatttaccgaggatcttaacagtagcatgtgaatgatggtggttgaacggaacaggtcgaagaagatcgtgcaaggcgcccataagatctcttaagactggtccgagagtgggatcaaggaattcagatgtgagattatcgatacacagctcaagcgtcctcaggccttgactgactagctctggacctgcccgaagagcatgaaccaaaggcttcatcaagtaacctaaatggggaagcaagtttgtcaacctgacgggtaccgtcaaacaaagttcgacaaacagatcccgcttgtccggttcggcgtgtaggagaagataatttaacgtgtcaagcatctcctgaagaattggcaagacctccttatagagcgcctcaaatcttccgccgccgatcgatcggaaaagagctcgaagaattgtgtaatatatcgtcggttctgtcgctttggcggcgtaggagaatgaattggtgataagcttggcgaggtatggaaccaagatggactcgttgtgttccgggaatgagtttacagccaggaaagcgagtttgaagagtttcagtgtgagcggtcctcgcttcttatcttgctctccaaacgcctcgagttggcccattagatactttagtatgatggccaccaactgatgggacacgtcttgtagatgaggtacctgtgaatttgtcggtacgagtagatactgaggaatcgtgagcagatggccgttggccaatgcttgattgacaaagaagtccatctttgtgatccagacctctgcaaacacatgagggtcaaagtggagaaggatctgaacgaacagatccaacgcttctttttcttctctagcatcttttaacggatcatagtacgccaacagacggcattcagattcgaaaaactttccgagaagcgtcccattaggggcgggagcaccgataatccggagttgattcaagagtgctcggactccgtggaggagggttttcatcagatatcgcgcgtcaaccaagaagtatagatctgttgcacatcacgttcacaagaaagcgatcaggatgagctctgggagaggagaaagagtaaacgatcaagactgacctcgactgtaggcctctgaaccatcaacggcataagaaactgcatgaactggcttggctctctctacgaccaaccatttaggtagatcttcttccttcgatctccccatttccttccgcttctccaccgcttccttcccgtaaactgtcttgagctgagcgtgaatcacgtcgatcgctgccagtttgtcaatacaactctccaggatggccaacaggaattttggagcttccgccttgtcggttttcgaacagatcgtctcgattagattcagcagaagcttggcgcacatcgtttggataccaaacgtgaatgccggttcatggagacagcaggaatagatatggacgattcgggaaagttgggcagctgtcaattcgtttcggacatgatgaacaagatcggccagcattgaatatgccagtggtcttagagcttcttggctggtgattccggttccgaccaaaactcgttcgtccaacatgacatcgatctgggagacaaacatggctctgaagtcggtcgaaagaatatgtcgagtcgctacgagaagttcctgtagatagaatttgtttttaataagcctctttccgcctgaggagtcctgtccgaatgcaatgaaagacgaaccttccgactagcgactgcttccggtggacaatctcttaacaacctgatactcgctcctgccatcgtttctgcgtgttttctgatatcctccgttgctgttcggaggacgtacgccaagaaagacattgtctgaaggaaagagttacggttgcgcgtgcacatatacacacatataggtgaatgagccaaactaattgaggtatgaacggaaggaggagagaagacaatgttagatatttaccttgacttgagcgacgataaactcctggtagagctctctgttagtgatcccctcggcgacaccgacgaagatttcacccttttctgccgacgcgaggtaggcccttctttgaggttccgcctgaagggtgagacattccatgacgagtggaaagtaatccttgatgtaaggaaacacaatctgcctccaagtttgaaacacgagaaccacggcgataggacactctgtgagcactttgaatgatcgcaaggatggtcttagcgtttttgttggatcgtccggattcgtgggcgacgccgcgagctattttacgcgatagatcacggttcgtcagtcacgcgatgaggggaaggaaaggacgagaacacaaagaaaaagaaggacagacctctccctcgacaccgaactcctctttgaccacagctctgagattaccgtacatgactttgactaagtcaaggaattctttgacgtgtttctcaacttcgtccttgaacgttcggttatggtcgatcatgatcttgatgcagatcactccgttatcttcattctcgacccgaagaaggtgaagcatcagtgacataagagagtccgcgaagggtcgcatgtattcgttgtgtggtaaacgttgtattatctctagaagagtatggcgaagtttctatattgtccatagtataagccaggaggattgagtcagctgtccagaccggattgctcggcgaggaaacgcgctggacgtgtgcgcaaagataacaagttaagcttacgtgttcgcccatctctttcccgaacacgggcgttccgtttcgaagaacttcagtaaaggcagggagaagaatgtcgaggtatcgggcgtagtcgacgtctcgaaattgttcgaccgattcccggagttccgtcgcgatcgccagtttcgtcttgacatctggaaggtaatggttttaacaaggtcaatcgttagcctttccggcaagggaagagagaagatcaagtaaggaagagaaagaaagcagaatgaaatggcgcataccagatccaggatccattaatctggctgcgaacgtctcgcagtctgcaacgctgactattccggcctgagcactagcgttcgagccagctgtcggtgctgctgagatggttgagctctgaccgacaggcctcctgagctctgctaccaagccgctggcgggcttagagcctccattggctgttgagcctgtcgatggtggctcgtctggattggtaggggtcgaagaagctgaagccggtattctcctcggttggttcgtgttcgacggaggttgtgacgaggcaagtggttgaggagaagggttggacatgtggaggcgctgcagtgaagagggggcggagaagaagaggagatagaagagagaggaagaaaggaagagagagagagatcacaagcgaatatgaaggcgaaatatgagtatgtgatctctggagattgaacagacaaggcaaggaggaacgtactttgggtgaggctactcaaagccgtttacctcgcccaaggagaaatggatggacccgactgaaatagattgggatatatatgcgtaggaatatgtttaatgagacaatctgaacccaagagaatagagaaagaaaggaaaagaaggaagaaaagagtgatggatgctgcacttgctgaaggcaagaagctgagaaagaggaaaagaaggaagaaaggaaagactgagaaatcgagttggtcgccaaaaccaaagccttttttgattgtcgacaatcaaattcatcaggaacgtatacccttaatcgcgttcctacgcgactaagtgcgcgtcaagctgctttgcttagtcattgtaaccctaactagctcttctctcagatatgtttgcccatcgcaaaggaagcagctaagtcttcaacaacgatagcttggagctgtaggacaccggtgagaccatgtgagagaagagagaaccgctctgtttccatcgtctggtatctcttggtacacttgtagatcgttcttaggatcaccgttttcaagttgtacatatatcttgtgatccatactctttgcttgcagtctgattctgtcatctatacgcgtagattgctcgcttggccaggaagttcctttggatgcatcttgtttcgattggagatagcgaaatagtcagcattcgtctcgtataggaaaccatgctggcttgacgcaagacggataggggacgatccagtcaaacaaagagagccatgcttctctaaacccacttacggagatctccgttggaaacccctcatgttgcactttcgtaccttcctcctttctttcccctccctcccttttctcctccagacacaaccatctactgagtaacaatgcttggctgtctcctaccccaattgaacaaatcagaaacggccgaatggaccgagaaagatcgatcttcctgcatccatcatctgggcagccagaaagaggtggccgacgcgacggaacgaacagacgcgttgatccggctcaagatgctaatctcggattctaaggtggatgcctagttgagttcctatatctcttcgtctcttggtcgtccttgtttttgtttgggaagtgtgctgaacgtatgcttcttgtcggcaacgaacagtgtggtcccttcagaggacgaacatctctcagagactccagccgattccgaacacagactcgcgttcatcaccgggtaggtgtcttgcccgttagactcctactcattcatccagtcattatcaaatcggccgtcttttacgtgttcgatcaatttggtcccatgcttctactaacactcgtttggatttggatacggaccaaactggcggactcttttcttgacgcatacataggtttaccggctcggcaggtacggcagtcatcaccaacgaggacaactggctctatgtcgattcgagatagtaagtcgtcttccttgtcatgatagagcaagagctactacaagtaagagagagtgctgacgtgcagccgggctgtttagctggatccaggcttccagacaagtgtcttcttcatggaaagtcaagcgagttggcaaagatggacagaagaactgggctgaagatctgatcgaggtgtgtacccaccgggttaaacatatccctttctctattctactgatcatttggtctcgtctcatgtcgcttcggttgagatagaatgctatgcctgtacttcgattaggaattgatcccaaactcattaccgccggctctagcgcaggagctcattctggttcgtactctgagatccctttcctcggtgtccctaaatatatgcgcctttaaacaaacacccttcaccttctctacgcagcctcagtcggatcgcttttagaagcttcgaatatccacgtcattcctctctccgagaatctcgtggacagagtctggggagattctagacctgcccgatcaaagggcctcattggtatccatcccttcaagttcgccggcaagtcctcggtctctaaacttcaggaactcttatcgagtaagtatctcgagccgagcaagactattgggctcttggtttccagcttggacgagatcgcctggctattgaaccttcgatgtgaaggcgatgtgaagcatcttcctgtgttctactcttatctgtacgtcgcgtccttcgtttcatcttggtttctctttttctttcgatctgtcactcaatcctatcaccaattctgtagatggatttctacttcatccgatacatcccggacactctttgtcgatccttctaaggtttcagagcccgtcagagagtacctccgaaagctaaacgtcgtggtgaaaccgtatgagcaggtttgggctttcctcaaatggattaaggctgggctgagtcctcgagtagaagatctaaaagagaaaaacgatgataagaggaaggttgtcaccggtctatcggtcagttgggaggtagagttgtctatcggcaaggttggtttctttcgaaacaatatgcctttccactatgtatgttgcgagtgtcgatagcttgtatcaaatactcttgatcaaacaggaaaatctccaaacgatcttgtctcccatcaaagaagccagggcgatcaagaacccgattgagattcaaggtctcaaggctgcctatctccgagatggacgagcctccattaggtttgtctttgcctacgcttggtctattgttcctctgcggcctgattgcttgcttgcctgcctgcttgacgagttaagctgacaaacccttgggagggcctaggtggatggcagagatggacaggtcgattaggaaggaaaagaaagctgtcgatgaatgggaagctgcgttcgttccaccatacctttattctcctccctttcgttgtctcagggtcgggtaaggagaaagactgactctacgtggctcacattgactcagtgatttgctgactactttccggtcgaaagaaaagtacttcaagtacgttcatctcctgtttaaggaagacgctgtatacaaagatatgagactgacatcgtcgatctgcttgggataaaaaaaagagggctagcgtatgataatatctctggatctggaccaaacggagcgctacctcactatagtcccgaaaagagagcttgtcgggtcattgatcgagataccttctatgtcaagtaagttttcatctttcttctaccaacaagaaaaccgagggctgatcaacttctccctctcggggcgcgtggttttataaacagtgattctggagctcagtatctagatggaacgattgataccacacggacatttcattttggaacacccacacaggaaatgagacgagcatttacgagggtcttgcaaggtcatgtatggcccttctctttttcttctgattgaagcccagctcagaatcacgccgaggagtgtaattcgacggctgatttctttcttatctgttcggtcgaggatggcagatcgcggtggctaattctatctttccggagggaacgacaggtgtgccgatgaatatcttggctaggtccgtcttgtcatctttatgttctcatcagatgtttggaagaatagggattgagataaatgtcgactggtctttttagaggtccgctttggaaagaccatcttgatttcggacacggtgttggtcgtacgtttttccactcaagtcatcgcttgatatgtgctccttgattgactttgttccgactcatttgtgttgatcgtttagatggtgtacgtacgccagaaaaccaaggactgaactgaattaaaacatcgcctttagcccaagagtgctcaacgtttttaaattacaccctggggtttgtcacagatcggatcctacctcgctgtccacgaaggtactccttctattgatctcgttccctctctatcctcacatatttacctatctttgaaaaatcttctcttctcaaatgcaggcccgcaagggattccaacatcttaccccttcaaaccaggtcacatcatatcagatgaaccggggtattacaaagaaggccattggggtataaggatcgagagtgtgattctctgtgtggaacaacccgttcgcttttttttcctttccttcccttcctgttcggtgcatgatgacaaaagaaacgtatcaactgatttggcgcgcatgtatgatttgactatacgatagagcaaagcggcgcatgaaggaacctggctaggatgggacctcatcactcgagtacgtcttctctctttctctttcatcctcaagatctgcaatatgtttctgacatcagacaaaacccaatgaaaatgaatgaaggtcccgatcctacctagtctggtcgataaatcactcctctctttggcagaaaagcagtggctgaagaaccataatgagttatgcaagaaggatctgatgcctttgttgactgacgagggtgatgggcttgcgagaaaatttttgggaaagatctaagaatgaggagatggccgctgatctagtgagttttgtgtgtatgataagatatatgacggcgttccttgttgtcaacaggtgttgatcaccaaggaagacacttataaaacattttgacggggctcttcaagatacaaagggtagcatgtattgaggtacagataagggaatcatagagaaggtgaacatgcgaagaatcgctgatcacaagagtacagtttttttaatatagtctaagaggagcccaggcgaacaggtaatgtccatatcgatgacgagagacagagaaatactatgaacctagcggatgggtttcattggggtttccagaaatagaggtcgatacaaacaaagacaaaaacgtacagtcaaggaagggattcaaaaacaaggagaaaactgattgagaaaaccctgggaagtactcgttaaagagccataccgccgagccctctgttgattttgtcatactcttcttctccaggcggcctcggtcttacccaaccttgtctcgttctacctgcgtctgttcctacatttatctctgcgctcggtgaccgatcgggcaaaggaacatccgttcgaggacgatggtgtggcggtggtggcggaggcgagctcaacttcagatgacgaggtggtgggggtgataagtttctagaagctgtactcatactctgttgggaacggctgaaaggggcgggcgtatgagaaggcggtgatgagatgtttgattggggagtggctgatgataagggctttctgtgaggaagaggcggcggaggacttggcactgctcctactgctcttgagttcagatgagagggtaagctatagcctggcggagaaggagatggccgggacgcaagcggtagaggcggtggcggtggtggtgaaggcgttggggcatgtccgtattgaaggattcgaggtttcaggtgatcatcattcaaatgctccaccaacactgcttggtgtttttgctctttatcaagcttttcactgagatcgccaaatccaaattcagattggttctgactttgagtttcttttgaatccaattccgcgccgtcggagtagtctttggtgcgttcctgatgcatccgagatttaataaatcctttgcctgctcctttgacaagagcttttctaccgattcctctacataggcaaggcaaatagacaaaggtgtgagcaaagacgagtcaaaatgccgtcaagaggaaagggagcagagaaagaaagaaagaaagaaggaaggaaataaagggcagctaacttgacatcaatgaaggcagccgagacattgacgacactgcctgccgccaatctactggcttcaccagcttgtttcccgtacttatgttcaatcgcaccactcgagtttgaacctgcgctctggatcaaagttacgctcgagctctcgaatgaggtaataacaacgtcacctgctaacaaaactcttgacaacggtctttgtactttggaatttgaaagaaagcctggtttggccggaatcggaggtggcgatgtcgagggggagatgctaccaggagatttggaagcttctcgtttagcttgggcattgctgatttcagtggatcctttggtgatcgtgtattcaacacctcgttgaatgtttcggttgataactggatgagtttacaagggtacgcgcacattagccgcaagaggccgcgaagagggagctcagtgagttacgatttgacagagcggggtgaaagaaaaggcataggcgagcttacacgaagttcctttcttgattgtggtctttcccgacaaagcggccccacttgattgaagagtttgtgacacaagacgagatcaagaagatcagccgagttcacaagttgagaaaagatgaccaagaacctacttgactcgttcgagctgtcttctagttgaatcgctcacaacgactggttcttctctaggtgttgctcgctggatgtaagcattactcgcggcctgcatcttgttcgataagatattcgccccgttcaacatgtgttttcttcgatgcatacgtcccgaatggcttgccaggtcagtatcacagacaatctcagtgtaggattcaacgataggttgataatacgaacgagataaagcttgcgccccttagcagaggatcgtccatttcttctgcgggcacttctgtgacaacgatgccgttccccttcgttatgccttctacatccacaacgactgggccggttccatcaccgagagaatttgcgctgaggacgccgtcctgactgatgtccatctccccgacgacctgacctgtgctctcatcaatcaacacgaccttccctttgagaccatcttggttctgttcaatcacgctcaggtacgactcgagcagcgtgtgaaacgttagggtgtcttcctcctcagcatggttcgagggaaagggcaagaccagagtgataggagacgggtacgctggaggcgcagagggaagaatgtaggtattaagtgctggagagtacgatatcgtcaagtgaggatacaatcgatagtgctgtcgcgcaggaagtatacgtttttgtagatagcaagaaaagcccgagctctcgggaaggtcagttctcgggttcaatataatatagacgagtaggagctcacgaatttgtcgatgctaagcaacagaacacgttccgatccctgagaggagcttgccgttgccagactgggagaagttaagagacgcgacccgccgatagaaagacgaaagcaaagaaggaggaaaagccaagatcagcgaaggtatgaacaatcgatctgataacgtccaagtcaccaagtcctggtagaaaggaaggctgaaactcttacatcagtcgaccctgagcgataggaaccggcggggagactccctggtctgccgggttgaccgataccgaagctgaagcaagttctaacaggatagccatggccgacgtcgatacaagcgtcttggctggctcgtcgttcaatgttgccacagataaagtgggaggtgaagttgacgaagagcccagcaggcgattagtcatttgcacagccttgacgcacatgacttgacgccacattatgaacatccctccatcaacctcacctccccttacatcatcctttccttcagccatcatctctctggccaggatctcttcagccaccgatccatcaggaggacctagcaatgtccattcagtcaatccttataccggcaacacagacacgccagtctcctgcacctcacaccgtttatcaggttcgtatcaccaccggcgtcagatcgtgggacgtctacagaaggtactcagactttgaaagtctcgtccaagaactccggagtgagaccggtaaagatgttgacggcgaaaagatccctcccaagcgagtgtggagcctcaagaagagtataaacgatcaaaaggtctgtgcttgggaattgccttgaagacctgcttcgttgcttttggtattcaccggttgaacgtgccctccttttgcaaaacaaacatagctgatcgaagaacgacgggtcgggctcgagtcttaccttcgtcatattctctcccacaggaatcctgtttggcgaacatcccacgcgtttcttgactttctctccgctcctcctcttccttctgccaactcgtcacattctaaagctaatggacccgacccatcagcgactcctggctcttcactcgcccccgccccttcgtcgatcacgacatcacccgcgtggctagccgaacatgtcacgctatcctcgctcgttcgcaccatccgatcgtcactgtccaaacgagacgcccttctccaatcaggaaatccatccggaggtcacattgcccatatacaagccaagaaggacctgaccgtcttggtgaacaggctcagcactctcgttgtctcactcgatatcgtcgcaaagacagagcgattaggagatggtgagattaaacgacgggccgagcttctaggaagactacaggatgaatgcttgacattggggaaagcagttgagaacgcgaggaaaccaccggtaattggcaatggattccaagcaggctctctcagctccggcgcaacaggccgtcaagatgatttggtcgacggtgagagtaggagagcacttctcggaccgggcccatcagctgtgaagacagtgagaacactaggtggagcgccgccaggccaagaaacagaagagaccagaccgctggatgggggtgggttgatgcatcttcagcaaacgaagatcaaccaacaggactccatgctgacccaactttcggtaggttttcttttgccatctctactctgtacgtttggtgtgttcattaaaggcgctcatcgatcacatctctatcgatagtcaatattacaacgccaacgagttattggagaagccatcgggcaagagatcacagagcaaaatgagttgctcgacaagctggattcagaagtggatgtaacaggagcaaagttgggcaaggcgaaacgaacaatggtctgtctttcctctctccctattctcctgtgaccaacagtgaaaatagttttaacctcatactttgtcgtttctcgatttggattgatgcatgtaaacatcttctcagaatcgactaaactagttatctgtcaccaccaactttgtctcggctcttcgttctcctttcaaccatcattctgcgctatcatcccttctcgtttcatcttccaatccttttctttcaacttttggttccttgttctttgattcttgatacgacttttatgatactcacatacacatatacacatacgtacacaaatatacacccttttcctactgcttgttgatgtgcttggtgtttcaaccttctgatttatccacggaggatccatccactctacttgaccttctctctgccgtttaatctatttcttactcctctcttgccctttgttttgatcatacagtgctccctctccttctttccctctctcggtcactcgttgggcgtgcgcgaaagagacagatggaagaaatcaacacatctcgagccaagattaggctcaagcatcataatcatcatcgacctcttctaaccttctcttcactcctccagttcctgccgtacccagtctggatgccgacccgttctgctgagagtcatcttccatatcaacctcgtcttccaagtcaaggtcctgatctctggcagcagaaccagacgggaggtgatgtgtgttgttttcagctagaaggtcctggtctgatgtaggtgacgaagatcgcgaccgagacgacgtgggtgatgaaggagcagaggaagaatgtgaatgggatgaagacgacgagtgggaatctgaagaaggggatgaggggggtggatatcctggcggcggctgttcgcgttttattatgcaggaagagaacacggtcgtttcggatcgagcaggatacgttcaagcaaggtcagaccgagagaaagcagacaggtagcatcaaaagcagaaacaacaagagtaaaagcgcgggaagacgaactttgttagggatcaggttgaaattaggagcagtgaacagatggcgcgggtgagggagtcggatgaatgctgtttctggaacaggaggcaaaggatgagagtttaacgattgagctatcggggtgaggaacttgcgtatcccattttttcgtttgaatagaaagcaaagagagcaggacgtcagtatgagatggtcttgagaagagagaaggaaagaagagggattgagaagataggacgcacatcgcgttcgcctccctctctaaatccatagttgacctttccctggacggccaacgagacgtcgtcgacgtcaagtttgcctcctttaccagaatgctctgagaacgtcaacgcatccagtaggacatccgtcgtataaccttaggatataccagtatacatagagagaaaatcggtcagatccttcaggcgttcgtagaacgaagtagaagcaaagacgaacgatgtgcaaattccatcagctggagcaacacttgaggagtagtatcctcaattccctgtttagcgcgttcagagacaagcaaggagatgttccatcagatctacacacaccttctgaacaagagccagtcatcagagaaggtcaggacaacatactttggaggcgagaataagagcgataatccttgcatccctcggaagatgctcaaaggagaaattatcgtctgatgctcctgatgcttgttgagatacccctgatgctggtgctgatgccgaagttggacctgccgaagaagaagctatcggttgaacgggtcgagacattgttggatttgacggtgctgatggaagttgaaggttcaaggtgattgatcgagactagaaacagcttgtagtcggttcattacaaatgcgcagttggttcattaggaaattcatctggccttcctccacgcatagatcgatccttccatcaacactcccatcaaccgtccatcatcatcaacacccttcctgctattctgatactatggcttccctaggtgcgtgttgtttgtgcccatgatcccggtctgtggaggaaacttgcttgaaagacactgacctgagagatttatcgaacagtggccatcttggacctcaaaggcaaggttagtccagtcgtcttttgctttcatttcgttaggtctatgttctttgagaaacggtcgcttatccgtcatctcctgttcgttcaacgttgcactccagtctctcattcaaaggtcctaccgggacgatgtccctgcttcccagatcgagcgtttcctgcctttgattctcgatatggaggaggaaggtgtccaggtgacgccttgtttcacaagcgatggaatcaactttatgcatattcggatcagtaatttgtatagtatgttcacccattctcgtctgaactgagcttatcagaagtagccaaagcagaagaggaaagctgggtttgtgttttcgagctcatatcctggtatcttctctagtcctagccctctcgaatcgaaattcaaatgcttctgagattatcatcttccttcatcgcctggcttccgtcctgaccgaatacttcaaagagctcgaggaagaatccatcagggataacttcgtgatcgtctatgagcttttggatgagatgatggatttcgggtttccccagacgacagagtcgaagatccttcaagagtgcgtcccttctatttctctcttctttcttaagcgtcgggccaatatgttgagcgtatacgggcgagtgatgttgatacacgactttttatgatagatacattacccaagaatcacacaagctggaagctcaagttcgaccgcctatggcagtcaccaatgcggtctcttggcgatcagaaggaattcgttatcgaaagaacgaggtcttcctcgacgtgattgaatccgtcaacctactcgtacgtctcggtcatctcctctccaagtttgcccatcaattggagacctataccttacgtggaacaatgtgtgaacgtcaaattctcttcttatctggttaggtaaacgcgaatggagatgtcattagatcagaaatcttaggtagtgtaaagatgaagtgttatctctcgggtatgccagagctgaggcttggcttgaacgacaaagtaatgttcgagagtacgggccgcagtaagttctttcctcgtcgagttcttgttcttccttctctacctgatcactcaaacttttgaatataatctctatcttgatgttttgtagcatcaagaggaaagtcaatcgagatggaagatgtcaagtttcatcaatgcgtcagattagccagattcgaaaatgatcgcacgatctcatttatcccgccggacggagagttcgagttgatgagctaccggctgaacaccccggtgaagcctctcgtctgggtcgaaggttagcttttacttctcccctctggcagcatctcgatctatgctcttcctcattgtctaacgcgttgttcttttctacatctacagctgcggtggagaaccacagagggtcaagggtcgagtacatcgttaaggttcgagctcagttcaaacgccggagtacagcaaataatgtagagatttatgtgcctgtaccggacgatgcagacagtccaaagtttagagtatgttcttgatactctccttgacttttccttctgatgaagcttcttcatctaaccacatcctttcaaaccctcttactcatacactataacgaacaggctgcaacgggctcggtccactatgcacccgagaaagcgtgtttcgtgtggaagatcaagacgttggccggtggaaaagactacttgatgcgcgctcatttcggtcttccttccgtcaagactggtgcgtcttctcctttttctattctttgtggattctcagatacctcggaaaacactaagcttgccccatacgccttcttacaacgagaacagaggaagcacccgttagaattccgatctctgtcaagtttgagattccatatttcaccgtatcgggtattcaggtcaggtacctcaagatcgtagagaagagcggataccaagctttgccttgggttcgggtaagtaccctgcttctgttctatatccttgattttgagcgaatgtgtgtggactcattaaaaaatcactttgggttgataacatgttgggtagtatataacgcaacacggagatgactactcccttcgaacagtacgttcctccttccttctgtttctctcgcttttggaattctagatctgacatttgaaacaaaaacacgaaccgatcaacagttatccgactcgaagcaaaactccatcatcactcctctctaacgatctgtctaccttcctgtcttttttctttcacacccgttctctttgttcactctttttagaacaacattttctggttcttctctcgagggcttctctttaccgtcaccccaatccctctttttcctcttggcataccggagagtttgatcatcctttctctgatgaaattcctctattgaattaaaatattcaatagatggcattaaactattaaaactggtaatctagctctcagactactgtttcctcaccccttaaatccacacacatataagagacataacgagacgcaaacacgaatacaaattaaacaaataatacatcacgacgtctcggcaaccgaggcaatcttccctagcaactctctaaggccgaccagaagagggaaaagagagcccaagatgaatggatagatggacagacgagtacatgaacgatggtattatgtatatatagaaaggtcagtctagaagttacaaatggcagaaatcttctgtgtagaggtgaatctaattgcacttacgtgtagcgacgtttgagctgctcaggatcatcataagcggagaaggaacaatacaatggagcaagggttcttgaataaaagtaccatgctaggattgactagtgtagtgacgagtctgctcaccttctgcgccctcgcttcgttgaccgaggcgaacggtatcaaactcatacaagcttcgagccatctcttagccctttcgagcattgatgtgctggacgaagaacaatatcgtaccaacacgaagtcaagttttccaatcgttagcttctcaagaacatgcggcgagtatagactcttcttaaatcgactttacacataatcttcatttcctttgttccaggcaacggcaagcaactagccgaatcccaacagaaaacgcaggaagattagaatcacgatgcgtcatgactaccaaagcgaaagccagatagactcacccattcaacctcatcctccggatactttcatcaggatttccaaaagtcaaacttcgtacgttagtatggcatctgatatgtagatcacctgtttatactcaccgattgagacaaacttcctgcattggctttcaaaagatcaattccttgatttaatagacctgtttccattgattagttcgaatcttatcagaccgactaaactatcaatcagttcaaaagataaaggaggcgcaacggcttactcaaggattcttcaatgtcactcgctcttcctcgggcatttagaatgctaattaatgtccgcaaccatctagacagcttgtcaagggaagggattaaatccaaatccaagctactgaagagaatcctctgtcaaaataaaaaccaagcatgactcaggtcttggttgtgttgaagggaactagatactgcctcacacgtagtattgtatagacgactaagccgttccagatgcagaacatcagttatcagtccagaatcagagtggagagtagaaaatgagttaacacaactataaaacttaccgtcagtaggacatccatcctgcctccatatgatgttggcaaggctatatgtcaccaaagatcagtagtaaactgtaagtcatcaacaaaacggcgccgtatcaagcatgcacttacgattcgaacagctgaacagatgcctctttcttcgccataaattcctggattaaaatgcatagcagtgtattctatcgtcagctattgatcaaatcgatctaaagtgaatgaggccttacttcaactatagtttctgccttcttccattcttgcagcgcacaggaggcttcgacctagagagtgaagtaggttagccctttgtacattacgtactctgaacaacgctgatactaacctgaaaggctatcaaaaccatgatcatctctttaatcttgtcagacctaggggagtcactctgaggatccacaacttgtcggcatgtcttgagacaagtttcaatgttacgtccaagaatctgtagagaggatttctgtttcaatttgctcaaaacaaagaacagattaaacctctcagtttcatgcgttcataaggtaaatagtgaattgactctcaccttggcttccccatcttgttctcttgcctccagcactaacacacagaaacaagagctcaattcacccgtcatcaggaaaaggattcacaagcaagacagagacttacttcttcctgagcaggccgcaaagctcgcaagacagttgttaaaaggaagatctggatccgtcacaaaggaaactttttgaaagatatccatcatctgtgaatacgaaattcaattgaaaccattgtcagttgtgtttatcagaagttagcggagaagacaccatcttttactcacagaacttgatagctcaaacatcttgtaaacacacgactcagaccagccctgttgacatcctgtgacggcagcgttatatgctaaagtcgttatgaagtattagccactgcttcaacatcatcacacttgcacgcacgtaccctgcttgtaaagccaactgatctctttctcagcttgggaagcctcctgacttgcgacggcctcaatcgatttttctagaccagcttcaaagtgtcgcagaagagtgttttctagaccaagtcggttggcgctatataccaaacgctgccaaaggtcagtgaagagcgcaaagatgtaaactcagaccttcctactaaaactcactcatcaccaacttccgttggaagattttccaattgttttagtgataggcgcactagacatctacagaagttgtgcatgaatggcaagtgagtatgagtactaatcaaaaatgacatgtatggaggtcaatgcctaccgtatgagtacaaaaacggttgatttttccgcctctggaaaggttcccgtttggatggcatccagtaacgtcgaaagagaaatttctagcaacctagatagagacgcatcgctcgcaagttgtctaaactcttaaaggttagtcatggctatttgatgtaaatggactgttttacagacacttacgttgtgagcatgatcatttttccactattatcttgacatctagacatgtccttgatggcacccacagcttgaaataattagcgagaaaatagtagtaatgagaacattagcctaaggtagacagatcagtctttggaatttaggcacaccttcatcttccatacctattccgttatgtgtaaaaggagaaatgaatatcacaaattagaatcgatctagtgatacttgagcataattcgtgcacactcgctctgattgagataaagcaagaaccgaagatagtgggtagcggcttcttcccaaggcgatttacggatgtgttccatagccctctcgtaatcttcaaggcgaatatagcacatagcgatcttcctaataatcaaaacgtcaagcgtgagatttcaagagtggagttgtctttgctgttgaatgacacgaacttgtgaagcctgtttgatcagagcaatttgataaaatggatgagtgcactgtcaaccatctcagtacagaccgacacatactttggaacactttcccctagcacctttaatgccggatgcgttaatagtagatctaaggttttcccgatattgatagtacagtttatgttagtcagtatagaacttcagatagagcctcaaatacttacaaaatgcaatcgcatcatgtaggccccccactgcagcatagcgagcattgcctatttgccagacgagctgcataaagggaaccgcgtcagcagcatcctatcaaccacaagacacagcagtcacttacagtttggagagcagcgcaaggagtgctatctaactcaaaggaagtttgctcatcaatcatatcgaaagaggacctgatttctctgatcgatttatcaatatcaggctcgcctcgtgcaaaaagagctatggagagaagcactttgatgatggatgcgctcaaatcaggtctatcatcttcatcggcttgagcgtaggttagcagcagaacggaaagagtatgacgaaggactgagtaggagacattccgactgtatttgagtgaaacaaaggatcagtcatgtcaaatcgttccaaagataagtaattgcgtttctcagactgacctgatgcccagctttgaatgcatagtatctcgaatcaaggagtccacggtgcttccaaacagattacctgcattgatcacagccctgaaagctatgccacgagagatgttcttgatcagtccttgctgcaaatacaataaatttgtcgagagtagacctagccaaccttcgagcaactgagggtctgacgcaggcctctgcttaacgcagtgtagtttgagccatttgaactgctgagagcgcgggcatttctgttcaaggtaaggttaatcgtcagtgaaggccatatcaaagaggagtacaagatacgcacaagagcggtatcatctgccaaaagttcatccagagaagcctctgctcgttccatgttctctggtctgagactggaagatatgatgtacgcttgggctttggttcatttgaaagattattaggtacttcagtatcattaacatagtctgacagatgccactgaccaagattgaaaagaatatctcgctatataaccaagaagcgccaaagagcagtcagaaacatcatcctcattgctctgtttagttaggatcataccttaaccgtttccaccttctctgttcggcccttcaacaagctccagtgatttccttcagtcagacgcaggccaagagaaagccattccacagcagtcatggcattcttagagatctccaagtctccatcgttatgctcttttgaagaagtggtgagtgtatgaccgatgcgttgaataagatgcagtacagcatgtgtctatcatatacatgtccggagaatattgagccgaccagtctccatggttcgattgcttcagaacatgagcgaaacagaacttacttccttttcagagagcaaggataatctctgttcgtcggcagctttgccgatcataaagaacgccggctcaagcttatcttgacggaacatctgcgcatattgttccttgataggtcatgaaccgactcagaccgacaaccgatgaaagaaatagaattacacgaacagattctgcccgagacaagtagtacattgttgttgctcgagctctttctttcttttcactatccacattggaagctggagccttggacagttgttcttcgaactgaagaagaaaagatccttgattcagttatgtgcacgcgtgtgcagataattacaaagagtgaccagaatctaccgtagcgcattgagtcaaaacacgatcgacttcttgattatgcaatgtcgttactgaaacgaacagagaaacggtaatcgagaggctcgaaatcagctgttaattacgaatatgcaggtccacgaaggctcatcaagaatagagagagcatacacaatagcgctgatgccgctttgcttcctagcatgagcaagcgggtaagacctggttgtatgcgcatcgttatcagcagccgtaggactctgaaaaggtggactggctgtagacagaaacgcttaccaccagcatctagctcaggctcgtaggtcagaacgattagctgaaaagcagcaagtcggactaaattcgttttttcagaacgcacataagcagtgtcagcaaaggggcttagtgcttctctggtctgcgatcaaccactgacccattccatacaactcgtttgtatctgatttaggatctgtttgatgatctaaatctaacaacagctgactgcttctgttccacatagccactccatcggtatccagtagatcctggtctgccgcagggattggggcagaacgcgactgtgcgattgcggccgcaagattagaagcctggaaagtcaaagtcgtcaaaagatgttgaagatcggaggacaccggaattgaaggccgagtagcctggagaagtggtttgatgctggtgataagacctaagaaagagagaagattgatcgtgatagagatgacaggaaaggaattgatactgagagacctcgtttcacgaatggttcctcgaagtggactaaacatcgacatacctttgatagaaaccagaggatcggatgggtctacagccttccgtttcttgagagaagccatggcagaagagactagtaagttgatcaatgtggttgaggtcaaggttaggtgacaggttaaacgagcaaggcgaagcatgtcaatccattgatcaccgccggaagtgagcaaaaccatcagagaagaaaaagcatcttcttgacacactcagtcgaacgaaaaaaagcaatcatacttagtacttgttatctagatgtggagcacaaggtgatcaaagccgcatgtcatagagattcattccacttgctccttcgaagctagtcccgaacatggcttcctcaacagctacctctcctacttgttcttctgttcgctctacgtcctcgtgttcctctttatccttttcctgaagcttgccttctttgataaatctaaccagtcggctctctaacctgcccaacgtggtcatcaagtcctcctcctctactcccagagtaatccccgcctccctaacgaccagctcgagctcatccgggacctggcctaacacatccctcgacgcatatatcgaatagacttctccaggaatcagacaggtttcgaaccgatgcactgctagaggatgaagaggtgactggggtttcgtcacgggcaaggcgtcgatcggctgagctgggccagatacacgatgatgactcggccagacagcctctaatggaggcggatcagaaggtgttggcggaggcggaaggaacgtcgaaagactagtatatgcgctcatcgtgtcatacgctgtatgaattgtgcagacaaacattcggatcgcagacaattttaataaaggcaagctctatgtgagaagagaaaagagggaggacgcacccttcggtcgagacattccatcctgaagcatattttgacataggtctaggtatcgatccaagtcttcttctaccagttcgagaggatcacttggaagaccaatgtacacggtcaaatcataagctcacgaacagaggcgtatgaagaatactcatgatgaactcacaacttcgtcgatgccaacgtggccttatcgaatctattttttctttgttcatgttgagttcttaactgggtcaaccattccgacttaggcagaagaatgactcctggatcgtttgcgttcaccacaagtctatacatatcaaaatacgagatgatcagaatgagtgcagttataaaatgagtttgcatcaaacatcagaacaaatacagtacgagaggacccacctttctattccatctagtccgtaagccatcttgaggacgatcaaacaacaagacatgactgctatttcaggcatagcctcgtcacccaacatccgtcgttgtctctcgagaggttcttctgacatgtccgattgagcatgtaggaaagcttctgccggagtaattaaaagaggatgaagtgccaaggaaattctcagctgtcgaaggagattgacgacggtaggatagacaacagctaatcaggtgaacccaagaacagagagatatcaataaaatgaccaaggctagatgaatttccttggagaaagactaacgtgaacatccaagcgacctaaggcacttccatattattggtggcgcgttcattggagggaatctgatctcaaactttctctggagctgcaaggctaacttggtcgtattcttgtacagtccagacgatgtgggcgcccacttcaaggtaattaaatggacgggaatgaaacgatcaaatgatgaatatttgatgtcaaaaaggtcaaccaaagcgaacttacaggtggggtcagcatcttgtaaagatatctgttcaaatgcggccggatagaagagggaatatgtgtagaatacacaaatgcaaggtagggaatctcatgtgaatttgtcaaactgttctcgataggacaacaacccccgaagagaacaacgtcagtccatgtcaggtcgggcagaaaattacagttcctccctcgagaaaaatgtttcaacttacttgataaattcatgaaacagcaccggcacgtttaaactccaacagcccaacaccacgattgataaacaatccaacatcgagagtctgtcactctgtcctagttctgtgctatacgttgggccttcgccagctttcttccttcttctccggcccttggtctcggattcttttccagactctccctttttggttttcgttctagcctctgatgcaatatgagactcatcctcactcgacgcgtcagaggactctgagggcgcgtggattcgctcaagttctctgatggtctcttcgcgttgctcacgactttcctcatctaattctgattccgaagaggacgagtcagacgagtttgatgacgtagatgaggatgaggaaggttcggtatcggaatcgggagagacaggtgagcgttttgccgaaggaggtttgcttggtatttgtgacaagggttgagtagagctcggtggcgcttcaaaatcgtcttctgtctgacccggtggaggaggtagtttgtagaagagtagacataacgagaacaggtctcttacgatcatctgtagaggagggaaggcaatgacacaagcataatgttcagacgagacgtgtcaatcgtcgctgatttctcgaacgaaaacgagaagactgacctcgaactccggcggcaagtcccatatacgcgtgagggctttgacttgagttcgcacaaggatttgtaaacactcataatacaggtattctgcctgatctccccagtagactattcgatgatcatgagtccagacaagacttcagatcagtaaggatggatgatgattaggaagccaggtgaacgggaacggaccagcatgcttcgttctatctttcctcaacctgtttttctttgttcgtctatgtctagccacaggcattccgcctccttctgctgtttccatcgtttcctgcctgtaagactacaaaaatacgttgtaatcatgacagagttaagcctggtctatttttgaagaacgaagcttgagcaagaacacgaaccatgttgatgtggccttcttcacaaacccggataccacctggacctctcctccattttgtggatccgcattgggagcaagctttggccatgggaaactgtccgtgaagaaaggtgtgttgagtgatcggtgtatatgtccaaaaagaaaaaggatatgaactgattcgagccgagccggttagtcaccgtctgctagagatatgatgtcgtctgcccaggaagacattaaaagatccaaatcatcaacaacttcccatccaaaatgtcaagcacagatcctttcctagcgccagaggtgctcctagagcatttgcaaacgataacgatattagaatccatgtttccatcagaaataacgcttccatcgtcgttcagcgtgctgtcagaccttgtacctatactcgaatctaataatccggtcctccctccgtcgacacctcttccagcagactttcgattgatcctctcgctcgatatcggtagctctcctcctagacttttagaacttgagatggtgctgcctctacgccggtcgttcgattcactcacatcatcaccaagaccgccgtcgagaatcgttctaaaattgccaacgtatctgtctagatctcagtatgccgaattatgtacatctccgttgttagaactccctccggaggcacccatagaagacgaatttatcgaccgactacttctcctggtagatcatctccgagaaacaataccaacattgatctcagagaacgaatcccagagggtccatcgtgaatcctcttcacaggagtccgagttcaatcagaaggagcttgacagagtctggttttggttacctagtttatcaacgaaggaaaagagaaacgatattgttcgcatggcaccttcctggaatctcaccggtttcgttctcgcaggttcgttttgcttcattctttgatcagcgtagattgtcttttattttattcttaaagaacgtgtttctctcgaacaggtaaaccagggattctctgtctagaaggaaactcgaaagctatagattcctacatgggatggatcaaatctgtctcatggtccgacattcctgcttttcagagtgcgtttcaaagcttctttcattcgtcttttccatgtgtgcatcctctgagagaaccgcgcacgattgagagtctgatgataaccatttaatggcgcatttacacatccaatcattcatattcttcacagaaagtatgttgttctctatattccaaggaaaacccttcttttctgttctttgaatattctctctcatacctgttcgctgctccattctacccccttgcgcgtcgactggactgactccgtcgattgcagaaatcaccgaacgtcatcgaactccactcataacacaccgtttgttccaagatatggtcgaaataaccgatctaatcgagcacagaggctaccacggaaaccggggtgagatggggcaggtccggacatggatcgaggaccggggtgtgggtgctgacgttttaggaaaagtcttgaatctggggtgatgaaatagaagcgataaacgaccgtcgttggctaaggggtgacgagaccggtttcattgacgttgacagggcatgattgagcagcaagggagttggggttggcatcaggcgcaacacgatgatcgtgcaggcgttcagatgacggacgagctctaaaaagaaaagaaaagagagaacaagagaagcaaacgatggaagccgaagccaaactcctgcttaaactctcttctgcgccaaaactccctcagcaacgacacaagcatctcttacgccctgcctcctcatgaacagatcctgcaggcttctctgaacttggtctgagaattcattcaatgaaggtggcaacactggggctttttgatcgacagtggacatggaagaagatagaggatcttgagtcgacgttgcagcaggagggggaggagcgaaaggcaaagccccgagaccggtagttgatagtaagcgaaggagatccgttagttgagtagataatgctctgagagaatctgtcgtatgtttcacatgaagagtcagaaaaggaagggtttaactgattggtatcagtcaattcaaagggaaagatagatttaccttgttgttttgacccgttttgaccgtcggcattgactctgtcattaacatcgacagctgattccctattgattcattaatcaaacccaaacgacgaaccgagtcaaccacaagccgttgtgtaagcttaggaagaagtatcatcagaagttgattaaaagagaaaggaatacatacaattcatcaaaaaaagcattgacgtgtgcctctaatgccggtaagtgattcatcgtaatcagctcgatttgactgtcaattggttgatcaagtaattgatccattgagtcagtagatcgctcgaaccatactccaactgtcaaaggaagccgataggggcgaaacgagcaagagaagaaagcttaggcaagatggacagttcgcaagagaaagccaaaaaagcaaacgaaaggaaaggaaaggagaacagagctcgaagaaagcggagaggagaaaagacggaggacgaagagaacaaaccgagtgatttccaacggaggaggtagtactccaatgcccatcactcctcctccacccattcccatgctcattcctgttccccccaaccctgctcctggagtcgaggccgaaccagacccgaatggatggtttgtgagagagagggaaagagccggtgaagggactgattggggatgaggttgagatcgagcttgattttgcatgtgtgtgtgtatgtgtgttggtactcgtgatcaggattcagaaatgaatacgagagtcaagagttaagagtcgaaagtcgagatgttgatgtcgatgtcaagatattgatgtcacgtgttattgccggatcttctactacgcgccctgctctatgtgggttacccacaaaatctcattacactgttatccgactcaaccattcaatacagcgcagcgaacgcatcccgaaagcgagcaagcaaacaacacgatacacatgcaagatcgtaaagagagtgagcttgaaataaaagagaagtcgaagaagaagaagaaagacagacgaaagaagaaatcgaaaagttgttgaaagacgtcaaaagagtctaacaagagagaagaaagatagagtcctggaggatgttataaaaatgtccggaggggatagacacaggaaaccagaaaagtcgaacgagacgtacgaaggaaggtagaacaagaaagaaagtatagactgttgagtactagtacaaggcgcgaaggctgactgaaagagggatgtaaagagacaaggaagacgataccgaaaagaaccggaaagaaaaggaaatgacaatgttgatgttaatgcaattgatggggggacgtatgtatagagtataaaatccaaagaagaaaagaaaagaagtacaaaagccgcccctttgttcacctgacaggccggcctagttcaggcacccctatccatccatgtgccccgttctcatctcctgcttcactgcccgacgaggaagctggtgaaaattcttctgaaccctcctgttggggccgggctggttctccgtcaagcggatatctcgcctggtctgccgtcgagagcggcggggttaacggcggtctgggcgctcgcttcgagagcggtacccaagtttttgcagccttcgaagagtgaatcataatcgaggtaaggcccggtccatttggggtaaacctggaagcggtcaggttcgagggccgtgacggtccggccgggatagtgataacctcggtaggacgggcaaccggagaagggagccttctcggcggacaggttgatacggtcgaatccggaggggtcggcagcgtgtcggcatcggcgtcagtgatggtggtcgtatcagcgtctgtgcacgtggcggtatcaaccgcgatagagctagccgcatcgttaacgacggacagaacatgaatgttgccgttgttgtctgcaggctgggcattaggtggccggtaggattccctagaggtgacctcaaaccctcgttgggtcacagtctttgccgtcgttgttgaggtggccggcggagccgcttgtgagaacatgtcggactctcgcctattgagagtgagaggtgcgtcgctagcccgtctagccctacctttgatactctcaccaacactgcctgcgttgcttccaccgcctagactaaagaatgaaccaggcgagccaaagatcgaccgcctcctaccgctcgttgaaccgtttgccgttcctcttctaattccgaccgtgttatcgacagagtcactcgcttggccgtccattctgatggacaccggtgcggggaggtcagttcgtaaacttggcgagtttcggccggttcctggtttccaccaaggatgcttactcggactggtcgagccagttcgttctggtgcggtaggcgcctgtttcagacggccggtctgtatatttacaggggcctcaacaggggtctcagcagcaatgtttagatcacgggacctaggggaccgaccaagaagctcatttcggagtggggatgagctgcgctctcgaaagacactggcaattggcatcctgtgggcagaaaaccgatgttggtcttcctgctcgcttggcgtgggcgtagtcgaggccgagccgttagcgatggagtaaacctgggatctttgcgactttggagacctcggaggaaattcttcgtccgagaaagacgaggctgagtctgaacggatcgagacggatgagtacgatgccggaagagaggcgatcggtagaggagaaacagaaaggggtgggttcgaaagaggagatatcgtccgggagagaggaatctgcagctgactaggtgaggagacaggagcgtctgtaaagacggacggcggtggcggaggtgaagcagtggtcagggcggtatgcctgccttcttctgccgttggaccccactgaatagtcgtctttggggttcgagtatgttcggtcgtattcgtgaccactggttgggttgaaaagaatgacctctttcggttattaactgaggaggatgagtaggaagaagaagatgtgttggagagctgcttgatgagtccaagatccttttttgactcgttgcctttgccaagtccttttttctgctgcttctccgtcttcgagcgttcttttttgttagttgaggactctgcgaaaccggcaaagaagccagtccgttcttgccctgggctgacgcttcctcttcttacaaacaggccaaacttgccgccccttgggttgtctttcgagacgacggcaaggggaacgacgacctttggagaggctagagagacgggtgagacggtcgtcagtgaatccgtggcggttgacaggctgagcgggtagagggaggtcgagagtggcctggtgtattctgcgctaggcgatcgttgggcgagtgacctcacagtgggcacgttgtccgtccaggttgagctctagaaagaaagagtagcagtcagagagatatcagcgcgagacctcagagaaagagaaagaagagaagagggaagtcaaggagagagggagaaccctctgaacttaccctactttgggctggtctgatggatctgacaggagtggatacacgcgaacgatccgactcatcggtgctggaaagtctcctcttgggagatgtcagagacgttctggattctctaggaaggggtactgaaggggacgaaagaggcccgttctgtctcttcaggaagttccaaccgcctaagatctttggggatgagagcgaactgggctgaacctggtcgggaagggctatctgcggtaagacgagtgcggtaggaagatcgatcttccggcgcggaggctgtttccgtcggaacgaaggcttgcggatggtttgtgtgcgtatgggttgtgtcgggtgagagtgttctggtctaggttcacctggcggctgcggttcctggattggatttcgaccgatcaggataaacagctcggtctctggaagggactctgacgagaggttttctttgaaaagcgagcccaccgagccatgagacgtcatggtgggagtagcgtgagagcggcgtgtatgagagagtgtgtgtgtatgcgtgtgaatgagaatggaaagcgaaaagtcaacgacgggaagagatcaagatgggcctgtccgaggtggggaagtggggaaggggacacctgattcaggaacgagggacctaaagagtgtgggtatgagtgatgagttttgagttgtgaattgtgagtgttggtgtgcttatgggtgtgggtgtgggtgtgggtg

SEQ ID NO: 1136 - DNA, 8623 bp, Xanthophyllomyces dendrorhous
gggtgtagaaagagacaatccagatctactgtatatgtgaacgcaagagagagagggtgtgtggggatgaaagtgggagtgggagtggaaacagacgatgtctaccagagagacaagaaggcgacggaaacaaggagtcacaagaaaacgcacatgagagagatcgagaggaaagaagaagaacgtctagtgtctaggaagaaaaagaggggcgaaggctaggtgatgatcatgaaaatctatattaaacaaaaggggaaaaaaaaagaaaaaagggcccagaagtaggaacaaggtctagaacatttggtcgatcgatcgctcaactggactcaattgggctcaactggggtaaatcatgaatgatctgtatgaaccggcgtgaaccagcaggaaccagcaggaaccggcttaaattatcaggaaccataactgatcatcactcaaaccagcgctgaaattggttctacctctccgccgcgggtttttccgtgccgctcctcttccagaaggatgatataaaaagaagaaatagaatcgaaacaaaatacgaacaaataaacaaacaaataaacgaacaaacaaacagaagaattttggagcccttaaaattctatcttgtctttctatgtcttgttgaccataaacatatatgagtgtacgtctgtgaactatgcttctaaaggatcagatactcttcccatctatttagtctttgtcttaaagttggtcttcgttcaaatgtaaaacagtccacagtttcgttcgccgagtttacagttaactcaatcaccatttctatgctctttctctctttcttgctctcggacatttgtgcctttctttcccccgtcatatcttgctctactgtgctttgtcacaaagaaaagaagataacaaaaaaaggataaagagatcttatcgagcccaaaacgtagtgtgaaagtaagagttaaaagacgagtttatggcgagaggtcaaaagaaaggaggaaaaaaaggtacactgaaagatcaaagatcagaaatcaagagggatagagaacacaaggctcagagcgccgaggcatcataacaaagctgtctaatagtagtgaacctcctccttctctcgtcctcgctggaaaggaggctcggtacccttgacgtagatgtccgtccagaactcaacgttgatgtctggctgaggggaggcctttgcctcgaccacggcctggtcgacctcggccttggcgtccttgtcgatagccttcaaagtggcctcgtcggcaactccccactggtaaaaacattgcccataggccagtcggtcagtaaatctcctgaatcttaagaccgatttatcaaggcaagtaaaagaagaaaaaaaaaggacccacctcgatgatgttcttcttgagtccgttgatgggatcctgggtggatcgcattcgctggacctcgtctcgggttcggtaggtggttccagggtcggacatggagtgaccaccatatcggtaggtgacgaactcgcaaaggattgggccctttccatccgcgcaccactgcttcacgaacttggaagcctggtgacaggcaagaatgtccatagcgttcacctgaataccggcaatgacatctcctcgcttgaagtactcggtgttcatagacgatcgctcagcagacgttcccattccgtacttgttgttctcgcacgtgaacaccaccgggaggttccagagcttggcctattgaaaaccattaacaatttctcaacgcgctgttagcttgtcttgctgctaaagccaaatcaattagcagaagggaaaccaagaacccaccatgttgtaagcctcgaagacctggccctggttggaagcaccatctccgtacatggcgaaagtgcacttcttctgacccaagtacttctgggcaaatgcaagaccggctccgacgggaacctgggctccgacgataccgtttcctccgaagaacgaaggagtgaaaatgtgcatagatcctcccttgcccttagacataccgtcctttcggcctaagttgcatgatatcgttgaactgatagtcaatacatgcagagagcaacccaaaaaaaaaagattctgtacttaccgagaagctcggcaataactcccttcacggttcctcctcggaggacggcgaaggggtgacatcggtaagaggtgatgaccttgtcgtcaggatcaatggcagactccataccaacagacacggcctcctgtccgatcgtcaagtggcagaatcctcggatgagtttagccttgtacaaagtatcacaagcctgctccatctttcgcatcaaagtcatcttggtgtacatgtcgatcaacatgtcctttgtcaccgcgacagaggtcgaaggaggatcacatcggtatccgtggaagctgtattgatttcaagaaggaacataatgtaagtctcgcgttgtagactttgaagaatgagaagacgaaacatgaggaactaacgaatcggcatccaagttgatgttgaactattgtgatcgccaaggataaaaaaagttttgtctcgctcagaccaaaatcatctcttgatggaataaaacagccctcatgaaagcaactcaccacctcgtctcccttctcgggaacggtctgagcaggagttccagagtcggcagcagtctgaagagaccgagcaaagaggggctatatggtgaaggagaaaaagaggaagtcccgccgaaaacaaatacgcaggaggacgatcggagcaggtgcaaaagatcgggttttgatcccaacgaggttaaattcaaacaaaaagaagaagacaaaagtaaagaacatcgaaacgtttgtcagacatagttcattacagattagatatcaaacgatgggtcaaagaaagcaattttgaaggagaaacgagcggaaaagtagccagtgtggaaaacaaccggttggggaaagaggaagatcacttacaaccctggtggaagccctggtgagagggaaagcccgagagatgagagtcctagacatttcaaacacaaacgggagagagatgaggaaggtataagaaggaaaggaagaggaaaaagagatgggtggtgtcggacaaggagaaatggaaagaggaagcgaaaagatcaaaagtggggaggagagtgaaaacgaagcggaggttgcggaaatacgcgcagtaccgcatccccccacgacttttttctccctctctcttgccatgagactaggaattattgatgatactattagagaacttcctaatcagttttcttgttatcaggcgaactatacatctcgatctcttatccgtatcatctcctcttggttcatctctccatcgccacaggactcatccccgatggaatctatgatacccgtaggcagcctttttgtttttggtcatggtcgatgttttcttgacactgcttgaatctgatacgccttggctctcgatttctaatcgcgacagattaaactcgagccgtatgtcctgctcgctaaagggagcaaaggagcagccacagctaaatgcatcgaacgagctacatcagctgtaagtcatgatcacatcttagttccacattttgtcatctaaatcgtgatggagatttgacggaaacgctccttggacggacgagcaaacagccaggtgtctacgtattctcggaactgttcaatgtgcctagcgtacaacaagtcagtcggttcttgcaagcatcatgattgcgtcgttgcgtctgtctgatagttgagcttcctctcggatattccatgataaaccagctgaaagagagctcagagacggagccaagttggaaactgctccagttgtttgcatttggaacttggccagagtatcaaggtttgtactgagttcgagagctgatattttccaaagtggaggctatggactgatttcgtgtgaggaatttttgcacattctttctcttttcatagcaaacaagtcgatataccctatcttgttggatgctcaggcaaccaaactgaagcatctcaccgttgtatcgctctcaaaatccaaccgggtgggtgtttgatcggtgtaagggtcagatgtgtgtgatactgacagatatatacattctttcccctccagaccctaccttacacagtgcttctctcgtccctctcactttcctcgatcagagagcttgaggacctgctgatcgaagccatattccatggtctcgtcaaaggcaagatggatcagcaaaaggcgtgtttccacgtggatgactgtataggacgggatgttcaccctcaacagggaattgagaaactcagagatgaactcaagcaatggttagtctcttggtctgttatcgtctgacttgatatcattacccctagtactctgactgacttctgatttgtgcttgtccatactgtctagggcccaaacacaggcccggttaatcgacgagctcaccacgacgatcaccctagcccagtcgagcgcgaacgagcaccaatctcagttgttatcataccagattgcgagggatgaggcggtgtccaccagcatggaaactattccggatctgcttatgcaaggtcggaatagtacaggacaaggcatcagggctggcggagacaacgatccagtgtcagagacgcccgggaaaggaaagaccaaaaagtgagtgtgttctctgtggaacaagactgggtgtgattgcaacatcggaaaagatggaacctccacgctcaaccatgtctgcgtttcattgaccaggctgaacatgtcttctcaatctggatcaagccaccaacggaaacggaaccgagcctaggtctgagatattgattgtattattaaaaaaaccggattgtattatatcatatatatcatgtgagaacatagtgagacctctaaattccttggcagcatacaatgatgatgatgatgtaaaacaagcggggttagaaaccgcggaagagagagtaaaggtagaaaagaagaaatagggccgaactgcgcaaatggtgagtgacctgctggtcgatcgattttcctattcttttttccttcatggtcatcctctccacaacacatttacaatactaccaccttcctttatatcgttcggcctgtcgaccaattccttacagaagaaagcagttctcaaagaaacataaaaatcatagagtcaggcaaatccagagtcgaaagaaatcatcatgtcatcaggtgagtcttgctgagtttacgcaaagagttgtttgatattcagcgcgtgcgtccctccggaaattcgactgcattcgatttgccgcatgaagtgaaagaagagggtctgagggtcgcctcgtcagatccaaccaccctctttttttcttcttctggcttttcttctttcataactgagatagacgatggtctagaacagatctggttggattgcttcagtcggccagctctgatgaacagacaggcagaaaggacgagtagagcagaagatttacctttgtcggtcggtcggtctgtttttgcacccgacctgtctttcacacctaacggatcgtccttcacagtcgtttcctgcgtcgctcttctcaccttctgttctttccctctctgccctgttcttttcgttcgttgtttcttcttctgctatccaattctcatcttccactcaatcccaaaacctgttttcttgcctggattcgttcactcaaagtcacgaactaagaaagagaaaaggactctgttgctaacgtcatgtcttccttcgttacccttccatcgacatctgattcttcagcctctgcccctgcctcatccacttcggtaacgcccagtactgttgaaagttcttccacaacatcttccacaacatcttccacaacatcttcaacctctatccttccctcgtcctcttctacctctattgtctccgaatcgtcgacctctgtcgctccttcttcgacttcctccgtcatcagtacttcctcagcttccatcgcctcatcgtcctcggcatctgcctcgttaacgagcgtttcctcaggctcggcatctgcagcagcatcttcgtccgcttccgactcgcttacgtccgtatcttcagcttcggctttggcgtctgcagccgcttcctcaacgtccgccgttgccagtagctcctcggcgcgagtgtcgacggtgtatgtgtatcctttgactctctgttcgagcaattcggctagctttctcggaatctgatagtatctctcccttgttcttctagctatgtcacctcaaccgactcatctggttcgacgtactccgttccatccagctcgaccatatctgatggtagctctggagcaaagtccaacttaggtgctatcgttggaggaacgtacgttcagacttttccgtctcagaatcctcaaacagatagctcgcatgttctttttatttttgtctcaacgaggtttctttctttctttttctttttgttcgaatcatctgtcgtttggtatcaataccactcacagcgtcggaggtgtaggtggtgcattgctcatcgcaatcgcgctctggttcttctgtcgccgacgaaaccgaaactcggatcaattcgatgaggccatgtgtaaggtttttttttcgctttgtctacataaaccttttgatgctcatcgtctgttttgacgtatacaaacagttgacccggatcgaggacgtcctgtaaatcatgatgacaacttggacctcaccgctgctcctgtggttgagccttatcagtacaacgggtctaacgccccagggccagagatggcccagactggaggccctgcatctggctatgctggatacggtggttatggtgatcacaacggttacaacgccgtcgacagccagtcaggtggttggcagccagaaggactcaacccggctatggctggtgtcggagcgggtgcggccgcgggagcgtactatggatcccagtacaactcatcaggctcacaggcgaacggtgtgtccagaggaccatcttcggtctcggctggttcgtcctctgccggagatggaagcctttccaccggtggcatcgccggtggaggtgtcatgtctgctgcagcggcgaaacgagcggaagcacagagggagcgaaacaggatgtacccagcatcaggatcggcagttgcgcctgagttgaacgaggcagatgagcagaactctggtcatggcgacaacgtggtggtacaccgttagtgtgctttttcttcaggttgcttcgagcccttgactctgctgaacgtgtctcatcttgctcttattgcggataccgcagaggatggaggccgaattgaagagcctgaacagcccgaagagatccctcctacgtatggatcaattgatgatgtgagtttcgtttgcttgtgtgctcgtcgtcaagtacttatgttgtttacgggcgatttctgactgttcttcatcgtttcaacatcgatgccttagtcccggaggtcgtagatatagatgctgaaacagcactcgtgttttcgatacatcctttcttcttcatcccgtcttgttttcgagacctgatattctctcctagctgtctcacttgctcgtctgtatgaattgcttctcccttcttttcgtcttttgtttttctcttgattttctttccttctttttgtctgttctcctttgcctgaagatgggttgtttgtatacgatccctgtcctctcttttacgtattccgccactcttttagtactcacaactagacgtgctctatctctcctggttacgttctattctctgtgaaagccttcagcccacctgttcatctaaattcgttctagtactcattccttttcttcttgactaccacggaccctgttgatataacctcgtctctctgtttctgtccctcttcttccttctatgatgacgctttcttctgttcaatcgtcgggcgagaccaaaaatcgctagtgtaaccaccatacttggttacgccactctgtaaggcgggactcaccgaaatcggtcgttcatcgctaatcaatctgctcttaaactaccaccccactatccctcaccttctacccttagctcatcttactcctccaatcgatcggtctctggttcaaatcccattcgttcatcaaccatggcttctcgaaagaaagttcttctcaaggtttgttttttgtcctttttgtccttgtcgttctttgtacaaagatgctagaataaaggtttggagaactgacgtaggtttcgctgcttggcggcgttcggtgtgtcatactttgttttaggtcatcatcctaggtgatagcgggtatggtcatctctcttttcttgattccttgttctcttttcatcttttggcgtgatactatccagtgtgacgtagaacgagataaagaacgaagagagaaaagttgctgattgttttttccatccacccatgtgctcatcgttgatctgtgtcttttaatctatccgtctatcggtctcgctttttgaacgtcttcctctttcacgtgtgattctatggatcgactcttcatccgcacaactcgaaccctgcatttgttccgacaattactctatcacgctctgtgtgtgtgtgtgtgt

SEQ ID NO: 1137 - DNA, 21984 bp, Xanthophyllomyces dendrorhous
  misc_feature (11250)..(11259): n is a, c, g, or t
tgtgtgtgtgtgtgtgtgtgtgtttggttgatgcttgatgatgtatagtgtgggtaagacgtccctcatgaaccaatacgtcaacaaacggttcagtaaccagtacaaggccactatcggtgccgacttgttagtgctcttcccatcatctgtcctattatgttctcgcctgtgtatgtgtgtatatttttgaagaactggaagactgaagagtcgatgactgtaaacagccttaccaaggaggtcgttgtcgatgacaggctcgtcaccatgcaggtttgtctcttccgcctccggccacacatccgtcaacttcagacttttaattcttacgctaaacatctgtattaaccctgtaaattcgatagctttgggataccgctggtcaagaaagattccagagcttgggtgttgcgttctaccgaggagccgattgctgtgtgctcgtgtacgatgtcaattcgacaaagagcttcgagacccttgacagttggcgagacgagttcttgattcaggtccgttcttttagtccagtgtggcttgtttcttgactctcttctgaacgtaactgatgttttctttttttttggggggatatcaaaaacaaacttggtaattcaggctagccctcacgaccctgacaatttcccttttgtgagttccttatcttacacatacccgagtgcgggctttgatcatcgttctcaccgttactctcctatctccgacgtgctccttatttcgtaggttcttctcggaaacaagattgatcaaggagagagtaaacgaactgtatgttccgtcctgtatcggacttgacgaaaacttacatcaaatctagtcgaccctgaccttttccatattattctgatgtcgcgtgccaataaaggtctcgcaaaaacgagcgatgacgtggtgtcaatccaagggaaacattccctatttcgagacctcggccaaggaagcgatcaatgtcgagcaggctttccagacgattgccaaaaacgcgcttcagcaggagaacgagattgagctgtgagtgataatgttgatcattcatgagggaaggatctccttctcattggtccaagcgtctccgagctagagtctgatcgttcttcttttctttatgcgatgcgacactagttacgctgattaccctgaccctataagaattgattcggacaactctcagaactacggttgcagttgttaattctatcgaatctataatacattgctctgtcctacttttctctccttctgagctttggtcttgcttctgcagatccttttgtcgtttctttgcgttgctcttttttcctcgtttctcttcttcatctataatcttctgtcctcggccttgttctcacgatcttttttctgtaatcctcttacctctcatccccgtccttcattcccgttcttatccttctactcgcttatttgaccgatgccatgtgaatgtatgtctgataataagagaagcagacagaatctggatgaacgtttgaatatgtctgcggatgtcttgtttgtgtgacgtcaggatgagttccgggcagcctcggaacaaagccctgcgaataagactctcatctcccggtcacatcaacccggtcgttctccctcccctaatccatctctccccaacgcaagcagcaaccgagggatacaaaaagcggacatctcatggtctttggcgttcgacttcgaacggtcatcttctttctattggtacaactcctcgcattcatctacaacccaatgtcggaagaatcagaaaacaacaccgccgatgtcgacgtcgctgtcgtcgatagagtagatgcctcaacgatccaaggaaaattcatgatgggctatcaaggatggttcttctgtggaggagatggagcgccggtagatccaggccaccatggttggattcattggattaaccagccgttggctaatgacggaaatgtatcgttcgatctgtggccttcgactagagagctcgacgacgacgagctctacgagtgagtccttccttcttgagttcttcttcctctgcttgttcatcgaataattttttttggtttgctcttgccttcttttgttgacgggttgactttttctcgggctttcttgaaagaattcctggtttgaccatcccggcggatcccaccgacccaacttctaccccccgtccggctcggttgttctcttcccggaaccccaagacggtcaacagacatttccgttggatgagagaatttgatttacccggtgtcttccttcaacgattccttggtgaagtcaacggaggtggctcgagaatggctttgagagatgaggttacacaaagagtcagagaggcggccgagaaggagggcagagtgtttgctaacatgtgggatcttagcggagtccctggcgacaagattgagcagagtaaggatcacccatgttctctcttcgtttgaacacttgttgtcatcagctgacatctcccttatcacagatatcaaggatgactggctgcatatggtaggattctgttcgttatgatcttgcgcacctcgccgctgaatattctgacaagtcgtttgtcggctgatcttgttagatcaatgatgaaaagatcctagagtcgccttcctatttgcatgaggtgtgtcgctttgactttaacgcgctctagattgaattctcgctcattcccttccgctggtgttatctaatctttaggacggacgtcccgtcattgccatctggggaatgggcttcgctgaccgaggactggatccagattcacttatccgaatgatccaatggctccgacaatcagtccccactggtgtctggatcatggccggaactccaagtaggcattctgcacccgtgtctcgtccgagtaaatattccctcatgtagcctgagctgatgcaaaccatctctgaccgaacatggtgacagcctactggaaccgagcgatggaggatcaagatcctaacccagacttcgcaaaggtctggaaagaggtagatgccatctcgtgagtgtcaggtttcttcgctggtggctactcagttccattggatgagtttgagttgatttgctgtgttcgatttggatggttcagaccttgggctgtacgtatcacttcattctgtccgtgatatcccagaagacgaagagtcaatctgacagttttcaactttctaatcgttctgcaggttggtcggttcggtgatctggacggcgcagacggctaccatgaggataagacgatcagagatatggagatcatccagaatgaagatcaagacagacctggaggaccaagagactagtgcgtttggctatctttcgggcttcaaatgaatctttagagtgaatgtcgatcaataacgattttttttttcgttttttgctgtcgattcttctttgtttaaattcgtacagtattcccgtcgtcttccctggattctctgtgagtccccacttcttgtattatctcttgctccagcttcctgccgtacagaaggaaataggaggagacgataacttataaacatcatgacttattcgatatacagtggaaaaatcttcacggaggtcctctgaacgagatcagtcgacaaggcggtcgattcctctaccgtcagctttacaatacccatcagtcgaatgctagatgcatctacggagcgatgtgtacgtctgttcttatcttgcagcacttgaaaccacggttgatcctttaacatactccgtcaacctttccctttcgtgatatatatcatgcagttgatgaatatgacgaagcgacggctctcatgcctgcagaggtccataaatctagggtgccgaccgagagacccttcctgtcattggacgctgatggggacactgatatacccgacaactggtatctgtgggtggtattctctatcctttctttgctcttcgatatctgattgcgtcctgatcattcactcctcgtcatattcaaaaacaggcgtatctgtgcgctctcttcccgagctttgaagagtgggcaacaactcccagaagagttccctcgggacttcttgtttgggaaatctctgcgggaggcagcaagaactcatgatgagctatagagtagtcttgatactatctctcccaaacgttttttacatgggaaaaaaggatcaaaatactatccttttcaaactgaacatctcaaacatatagacgaatcgtattcaattgaacttgacttatgacgctacgggggttttcaaccgtttgactgcctttgtatatcgtactgctcgctgctttcactaagtgcttcagccttcgctcgagtagcccatgaaagtcgaaatgatataacaacgtaatcgcttgtgtgcaacagttagggttagcaacaagtttcccaagtgtctatgtacatatcgtttgttctcacatacagctcgtgatcacatatatgaagatttacattgaatgaatatccagatgctcgggtttctattttgactgataggagcttgtgttatttggtattgtaacgacaaagtcgatgctgtggaatggcaatgacaaattagtgttaatcaggtatgaaagttctgtgagcactgataaaaataaatgtggtcctcatgaaacttgcgcgctcttcggactgttcaatctcatgttacgatcacctggtttcagtaatgtgtgatgaggataccaatcgatgacacattacaagacagttcatgctatttggttatttttgtaccacgaaagatgccaaaataaaatataggaaggtaaatagggaagaaaaaaagaagaaagataaatcacatccagtctttaatgagatacaatctgacaagtgaacaggaagaggagcatgaaagagaaaggggtaggtctggattggggaagaggaaaaaaaggcaaaggataaggataaggggagtcacaatccttatcccgaccagctgcaagtcgtcgtcatctagcgacaaacgaaactgagaacaaaatacacaaactagaatatagtatcaaacagcaacaccaagaggggacaaagaagaaagaaccagtcttttgggaacgaggcactcaacacctcaatcgtttcacattcctactacctaagatatcgatcccgatcgactcactccctctcttgactgagctcacactcggctttcgctgcagtccgatgtctttcttctgacaagtatcgagtcccttgtcggctgaatcgacgagcgtcgtgttgttcgtgcgctcagaccgaggcgttgactcgctcaatgaccaccttggcgcttctatcctcttggatcccccaggggatctgaactgctcattcgttgggacagcagacgtggatgactttcgaggtgttgccatcaataacccctcattgtcgtcgtcatcatcatcatcatatgaagcgaaaacaggacgagcagacgtgcgggtcattgattgaagacggcttgagagcgataccgtcggtcgtcgaggagttgtctgaacagggaacagaagtcgaggtcgaggatttgaaggcggcgagtagtctggatgtgttatgggatgttctaccgagggagacggttgcgagtggttgtaatgtggattcgcaaatgtcgtttttgtacctcggctgaaaccatgagaatatagataccaagttgcaagatcagtatccctcgcgccaacttccgatgacaacgatagggatcgtgggagcagaagagtaattctaagacgtacaacacataaccaattgtctgcttttcgtgtgcctcgccgattctttgtcgcctcaaccaactactcttagatccaatatcactctcgttctcgcttccgctttcgctctcactctcatcctcgttcttcattatcataccgatacctttcaggaatggattggcttcatcccaaatcggtccctttttcgggtctgtgttcctgactaactgcttcctctcccgcgtcggcattgaccgcttgggtcgctggcttgactcggccggaggcgtccgtaaaggtatcaagggcggactcgaggcttgttgacgtgtcgcgtctggaaaaattcgacttgatgaagacggagagaacgtgaaatagtctgggatgtccaaggacgatgatgctataggaagagagtctgcgcttgcggtagagtccgcaggggagtataggggaggagtgaaggaggaggtgaggaggaacggattgtccagagaaacgggctttacacatgaacttgtatctcgtttggatcgaacaagccgagagaattctacaatctcgggaggagggcagaggccgttctcgagtgcaggagccagctcaaaggacatggtcggtcgatgggcagaacgggagacgcgtgttgcatttggtgaaaaggagggacgctctgtttctgggggtgtaggaggagaggatgatggataagaggcagagatttcggatcgtgaggagtgggcgaagagcctggatgcgttctttgttctggggggtgttggaaggagactgcccaaggataaagatgtgttggtcgttcatcagaaaggaacgaaataagatagacaaagaggcgatctgtacacacctggactttattcgactagtctcaaatccaatttgtttgttttgacaactgttatggggagcggattgataaaatgggttccttgatatctgtatggtctcgtctggcgaggttggaggggtagcactatggaaaggcatgtgtcggagaaaggtgacgtaggaagggtgaagtataggaacggaaggaaatttaacgggtagggataaagataaggacagatggaagagtaggaggagaggataatagaggaggtggcactggagattaaacaaacaaaaacagacgagaggaaagaaagaggtggatggatggatggaaaggtcaaggtaagaaggcgaaagcagagtaagaagtagaaatcagtcaacgatcttttataacgctatacatgataagatctaacacccatatgtagaataacatataaacccatgatgcaggttaacattaaactcacactgtcacataagcctaaccctaccaagccccgggatctcacttcgtttgcccagccagttcatccagaccgtcgtctatccatcacttatcaacagcccatcatgaagctcatcactcttgcttccacagctctcgcatttccactgttggctcaggctacactgaatatcaccggctcgctgatatacaacgagcatctcccaggtcagtgattcttgtttgcgtgacggatggtttcctcagttcagtccaatcgcttatgccttcattcttgtccggctcgtcttatctacaaagatcgacagagtctcgcaccgtccacggtgatctcactggattacggagaagccaccgcgtttttcctcgaggatgggtctttcatcttgtaagtctttccttctcttgttatcctctcgttgtgcactaagagcatgatgctaataacagtggtccatcatctcgattagcaaggacatcgagccaggatttcatgtactccaagttctttcgaagacacactcctttcctgaggtaaagttcctctctgtgggtcattgtacaccatggtattcattcacttcctgattataacgtcgacacttgaccctccttcactcaaacacatatagttgtccatcagtcttcctcctgcttccccaccctttgtagccccgtatgacccttctcggttacttgctttccatccctcctccccaccagaggttggatcattcccatttcctcttgaactatccgctcggtcaaggacaaactttaatgagcaacaggctgggttcgatctcaagggaatgtttaaaaacccgatgattctccttacggtaggtagcggacttatgatgtttgtccttcccaagatcatcgtcagtcctgtttctcttgtcatttctttctttgttttgagactgctatcaagactgataccaatctgttgggtttcattcccatattcgtagtcgaacctcgacccagacgccgtggaagaggcacaacgaacgctcaacccaggtcgaccatcgtcttcagctgtgtttacgaccacgaacccatcgttgacattatctcaaactcagatagataaactagcggtacctatcacacctgtggcacctgctaaacctggttcaatgaatgccggatctcgggcagggggaaaccgaaaaaggaaataaggaatcaagaacctacatttcagcgtcttgtcggggatttcaattgaagaacaggatcgttcattgtagactcggacgtatgatcaggattaggaagaccactgatgaataattcaagaatcaagaaccaaagtaaaagttaaaatcgagcattaaagaagagataggatttgtcaatgttcagacgtgaaaacccaagaaagaaagaaccgatcaaaaggttcaaaggtttggatgaaggaaagatatagaagaatgtatacagcgttcattcaaagactcgaggaaagaaaagggagcgacaaggaagagagacaacaataaagagcgatatggaagcagttgatgtgagaagagagaagaaggggctagcacagagagatgggaaaaatcagtgtttggtataaacgtcaagtatttcaagagaagaaaaaagaagagaaaggactgtgtaaaaggaagaagtggaaaagaagggacaagaaacgttcaaacgaagagagagaatagagaagaaaattgagtgattcggtgagaaacttagtttcctccgtaccatcccttcccacctctctgctgctgatgctgttgctgttgctgctgaggcataggagcagcgctgtatcctctcaccgaacctccacctctactcgacccactgcctacattcgcataataatccctcccaccataaccaccgacaagagatcccccaccgttcttgttaggggagtacatcgactgatcatcttcagcaaactccgggttgggcgtcgccagcaacgggtccttgacctcccagagagctcccttatcaccaacggcgaactcgagatcttccttagtgatcgagtcccaatactaaacagcaaatgtatatgactgagggttagttcctccgatccctctcgtttgttcaaagatagcgtgagaaagaaacaacagcctaccttgtagaccatcataacgctcaacagcatgcagagcacaaagatgaacaggccgtcaatgtagtgctcaaccgcatcgcagatagtcacagagaacacgaataggatgatgcagccacacgtgaagaacgcgacgccaaatacaatatctcccaagacctgtttttggtccatcaagaaaagaatgactgtcaacgatacgtagcaaaacatcagtgggagagcacaagatcagaagaaacgaacccatcggtcatccagcgttctgaatacgagaacaagttgactgatgacatagattgcgacacagacgatcgggaaaacgaggtagacgatgtaaagtcccatgggcttcatgtacgagaaaccagcatactggttgaaagtcgcaattgagataaagaacgaaatgccccaaacgacgaaacaagagatccgcagactctgtatcgagaaccaggttgcatttcgatggatgagtttcgaaaaagaagattatcaattgcagtcagcatcagaggaaaatcacgagaaagaaaagctatatccatgcgcacccaaagagacaatggtgtgccatcctcagcgaactgaagaccgacgaaaccgttgacgagcaagcaccaaaagatagagacgatgagtccaacatgaacggcagcaaaccactgtaatgaccagccggtagagtaatagttactgtcgcgtcagcatacaaaaacatatagcagagaggatgaaggcgaaagagaacggctacgaacagggtacacaacgtgagaggtcgggatgacgcctgaatcaacaaacatgcccaacagttcgatgagagcgtaaatgtagaagaacaggacaatttcctttcgacctatatcatatgagtcgaacgtaagatcagatggataaatcatagtctggtttagcatcgaacaggtaacgacaaccttggtgtttgatgcgaataggttataaactgagacgaagaatgtactgaccgacagccgtatattttgatcggatatgagccaccatgatggcagtcatgatgagggccacaatatggatgaagcatgctcctgaatacgacgagaaagcaggaaatgacggacaaacaagtaaaatagcgaaaaagaaacatcagacgtcagctacttggatgacaagccggaccaacaaggagaacatggaacaggcatgtcaatagaataagctttctgccattcaagtcagaaaactcgtcgaggatttgtatgtgaacatgatgatatcgtcttggcattgggagtctctacaaaacatattctctgcccatccgagttcaatcctcggccttactagagaggcttgtagtttgcccatgcccattgccttgtttgccgaggaaaaaggcagtcttcgagcaaaacaacagaaacaacaccaccaccacccagtcctgatagaaatgcacataaattgagcatgaaacgagaacgaacctggctggaatatcaaggtacccccaatctcaacgtttctagagtaacaagacggttctgttccctgggcagaaccgacgagcgggcagacctgaagagcggctgtactgcatatcgagtcgaacgttccgaagctaaacgtcatggatgagcgatctggatgtgtattgataggtttgcgtgcgtttgagctgctgaaacaacccgttaaaccctgacgagcgagggaaagagagggctatgtctcggtggtgtatgggtgtatgggaataatccagagaagagaagtaaagacccaacaaagagacggacgcgatggcaattacgttattggtaacagtggttacaatccaggtggttacactgcctattctaaccttcgaccttgagcccgatatctttcgtctggcttctccgatgtttgttctatttgatgtgctgatgtacagtgctgaaagtctcagaagtatgaggatggacagtgcgtaacgaaatggtagaggcaaatgttctgtttcactctgttttttttttctttttttttnnnnnnnnnntctttctacattcattcaatggaacgattcaccgccttttcgacttctccagttgtccatcccccactttccttccagtagatcctcatggaccatgaacacccggttgatcttgccctcttcgaactctccgtcccaacgaccgatgatttttccattcttgtcttctgtctgagcgacaatgtctggatagggctcattcggagcatacttcagaggaccaagagcccaggttgagagcggccgaggagagtcatggacgaacaaaggggtggtgatcgtggtgtatctctacagagcccaagtttttcagatcgcgccaggagagagaatgaagggtttaatcatttagcgcacttgacaccaggaacaaagaagatccaactcacagcttgaagaagagcgttatacgtcaataaccgaatagcaggtgttgggttttcctccgtctttggctctaacaattcgatagtgtttacataaggtgaagaacaccaaccaatcatcgcggtcgacaagattgttgtctgcaataaccaggttgtgcgtgaagtatgacgtcgagggacgaatggtcagtatataagctacgacaacgagagtagagaatcctaagagaacacacgaacagatatagcacatccggccaaaaaaatccggccagccattcctagaggggcatctagaatgaagatgaacggcgagagggctgtagagacacacaacgaagacaacgagaaagctctggattgaggttgaaaaacaggtttgaatttgtttctatcttgagcacctcatatctaaaacacaatctcgtccagcaaaagagacacatactcactttaataacttgaaagctttggcgaccggtccttggtaaacgatcactgggtactcatccaaccccgtccacggcccggcctggccgttctttcttgcggcctcctcatcaaagacagccactggtttagctcgcatagtctctggatcttcttctatgacagcatattcctcagtttgaatcgaactgattggtttagaagcatcgtcggtcgtatcggaaagtgttggcgttggtgatgatgttggttttgctacgaacttgggtggaacgatagagaacgatcggcccaaagtggttgtcatgggctggacacacccagatctggtaaaagcattggccaaacgaacggtagagatggagacggagacgccagctgttcggtttgtcaggagagaccgaggctgcatagtacgcaagcagactctgatgaagctcatggctcaagattttgacagtatcggaagggatggttgtgagaggaagagagaaaaggacgaaaaacagatccgccggtagttatctttcgtcatctatcattcatcaccatcgaccatctcattcactggcatttatcgtataaagactggcaaagctagacaagatggcatctcttaaccacacgccattgaatcctcaagcttggcaagacacgctcaagagccagctgattgagagaaataactctgagtcggcttacgcgaccatcattgatcaatgttcgtctagggtttcttctgaattgtagttcccttacgattcatgtcatgccatcagtaccaatatctgtgcgttcatgaacactagacagaaaactggccaagcagacgaagctgttaaaggagcgtaatcaagcgcttctacgagctgccacttcgactaaaccctcggacggtcggtccggaccctcctccggtctcagcacgaccgaagagtttgttgcttttatatcgttaatcacctcaaatctacactggattaacgatctggcttttcttgtcttgaaaaatcgtgcccagtaatcctgttctgcaagcatatgtgtcctccttggagggaacaatcaatggcctccgaaccgagctttcagacgtgtacaagaaccaaggccagaacactcagaagctactcactttgacagaggtgggcagagaggagaacctcttcaaatatgagtggatattcaaaattaacaatccaatttgtgggctgtctgtttgaatcatggtagactattcaagaaaaggatcaccaggccagattagaccaggaggagcttcgtcggctgacagacggggagacccgatggaaacggggcacagaagaatggtcagagcgactcaggataaaggatcatgatattcaggtctgtccaagtctatctactgttcctttcaaattccagacaacgactgatgttcgttctatctggcctgtagaatttacaagacgagataactacactcaaccttgagctttcccaggttctactgagaaacgaggcactcaaggcggacaacgcgaatttgttgaatcgatggatcgagaaaatgaacgacgaggtggacgggatgaacatggccaatgagttcgtcgaggtgcatgagccctacttcctttcctgccctcctggcaacgattctcaccaacatctgctgtcatggatgctgatggttcccattttttctcttctcctatgattaatttatcatggctcatactctaacttgaacgaatggaagatcagctcagtaaagactccgctatagaccgcactaaggatgttcatttgagcagcccaaacggcgcgccaatggcctcttcggccaaggatttttgagtaggaactccagagagaattcagagagtgtaaataaaggatttgaggaatctggagttctgatatcaacagacactgctgctgctgatgatgatattcgaggagaggaagaggactgtatggtacctgcgttaggaggagaagacgatggctgggagttcttggacgagcctctctgttgacgacttctctttcgttttcattttcttctctattctatactttccatcatgttgtatccttaaccctcatataatgttcagtcgatgtacaaagaaagagcgaagaggttgagagttgaaatcaatatgtgcatatagtcatgttttgcctctcgcacgcgcgcagccgctcactaacaactcaacatcttccctcgcttcgtcttgaaccttgttcacctcattctctcatcaagagggcccttacagcaagtaacacgacgtggaatctggatagccagatattctctttcacaaaaggccttctttacttcattgtgtgactcgttctctaccgtcatctttgactacttcttccagtcccttgttctcaatctcgctcttagggctggacctgggtgaactagatacgtcaaatgttcaaatccaagcggaacaagaatcatgatctggatgcttcaatcagaagttcaacgagctcccacacaagtcgtgatagaactactgatgaattgggcatgatgagcgtaccatacgacaagctgggaccaggaggaaaggtcatcgccggagacaagacgtaagtatcttcggttcttttgtgtcgcgttcagttcgtcttgtctgaaagagagcacgagcacgacgcgattctatgtgtttctcttcttcctagttctccccagcttactgaagggttcttttctttgtcgttctctttcttctcctctatgtgcttttgaatcgacacgatcaaacagcgtatctggccgatcaatctcaatttcttcaccaaacacgaacccgactttgacagcagaaggaaccgatctcaatatccatgctcaacaccttccagctcgtcgagagtccaatcggtcgaatcagtcaatgtctgcgtcttcaaataataccgctcattccattcatcggagagacacgaccgcttcttcgtattcgacagatagcgccttttccggcaacctacctcaacctatacctcacacgcctacacctgccagctcgggtaacccaacacatcatcggtctgactctacatcctcttcaacctactcttatcgacccgccactcaacacgccggaggtccttctgtcagtgctagaaagccacccccttcgatccaaagcgagcattccgcattttcttcaatatccgtcaatggggcatcctcctcgcttgttgatcactctggttacccttctcctgtatccacctttcatcaacctagctcttcagtacctcaatcacttctcaacagaccgtcgacctcaatgtctgtggcatctacaaggagtaatagagactcaacggggaggtatcccacctttactccaagcgaaaaaattagtatacatcctccggtagacagaaacaccagggagggcctggtcagggaggaaccgtatgggcaggtcactggagaggcttcagaaaagttttcttatccacgaccttcaagagaagaggtcgagagactgttcgaggctgttattgataacacagccaatatcaaccgttcgtcttcctctctgcttctgtctgtttctgtcatgactgtctgacaggtattctttcctatccattgactttaggcccttcaatgatgagccatgacgtttcgacacacgttgccgacatgcgcgcactctcggacgataagaaatggatgttggttgaaaatgatgccaggcaaaagtggcaaaccgagcgggacagactcaagcgagaaagcgctgctagagctagaggaagtgataccagaggaatttatggaaaggatacaccggaatggtatattcaacagttcatgagtgcaacgcctacggccaaggtggtttctggattagcagtctctcttcgaaccagacctaaacagtgagcttccatcctgggtgatagatcctctcttgctaaacgccaatattaacagtgtcactttgatggctcacctttaagatggctgagggaatttgttcaactacaaggatcaagcgtgttgagcaatttgctaggaggcattagtgcaagaagtcttcagttagtgtcttctcgtacttctatatcaaatttggaagtcgtttgactttattcgctctatctatcacaggtcgagaaaaacagctgatcttgatctcgaatatgagctggtcaagtgccttaaggccatcttcaacgactcagtgagtggtctcggcttcataattttgatagcttttatatggaccctgaaaattgatcgtcttgtctgattttctgtgtacgtcttgatcgtagcttggggcggctgacggactccgtcacccacaaattgtcaccaacatcacatgctccctcaattctccaaattttgccacgcgtcgacatgctatggacactgtctcaccgttctgtttttacgatccacctagaggttacaaaatcgttctccactctttgagtgttttatccaaagttcatggatccccatcggacacgccgttcacagtatggttagcaagtttcgagggcgtgttggacggcagaggtagaatggggagcattgttggaatgagtgaagatttaaagaggggtttaggcggagcaggggttgctcctagcggtgaagcaggcctcatcgattacgccgtacgtcctcctttacttcctctatgtttctctaggttcatttgccgatgacatagaatgaatttttactaatgtttctcatattctgtgatgtgcgacagattcgaaacgtgcatctgatgtttggtcttgtccgtctgactaccgaacttgaagtccgtatccacacgcgtgcacagttagacgcatcaggtgcccaacggatctattctaaacttcgagatctaaataacgaggagatcgataaagtgttagaggctatcaagaccgaggccgaagacgatgcccttgagcttggttcccgattcgatcaaacaatattgaaggacattgattcgcctgctgatatcttgaacgcgatcattctgtctgttcagggaactccagcgcaagaatttttcctctcggtcttacggcatctactcttgattagggacgacgacgagaccaggctgagatactatcagatcatcaacaaacttgtcgcaacagttgtcttggatgaacgacttggatcggaggaagccgatctaagtacacttctcggtgtaagcgtatccaaattggcttcccaatttgaagatcaggatcggttggagaaagtgaaagcccaggtcatcgagatgaccaacactgctcagcaattggcgctcgacaaagcctcgttagaagaagaattagcttcttcaggtcaaggtctcgtcaaacaattgaccgagaaactatccgctaccgaggaacatctcaaaacctccaggctggctactcagcgactagagaaggagatggaggagatgaagcagatgtacgaggatcgcatcgctaatctcgagctcaaaattcaagagttattcaacatgcttaaggagtcgtccgagctcgagggcgttctatctaagaaaggcagtggcgctgtcgatagagaggagctgttggagaagctggagaggaaggcgcagttgcaaaaaacggtagaaaagctggagggagttcatcgaaaatcgaaacgcgctaaaaggcgggccgacggagaggaaggagttttaacgagcgaagaagaagacgaaaatgaagagaaggaatcgaacatatctagtgtgaagggcaatcctccaaaagcgaagaaagtcgacagggccgataggaggatcaaagcccagtcgggctcacaattcgtagacgcagaagatgaccaggtccgagagcatattggagccagtctcgaagcaggattaagtaaacttgtgagctttcctccagtgccctcctatctcattctaccaaccgccagtcaatctggtttgaccactaacgacccctcctgtcttatagaactcacctaacagcacctactctaggagtgcccgaaagaatgttgatgtccagcgaaacaaagcacacttgcatctcaacgatatcgagagaaaaggaaagcctttcctagcccctaggtttgtcgaagagctcaaaggccgacgggtgtcccgaagcgcgtccgctccttcccttaccaaagatgatagagacgacttcgatggaacggaaagcgaaacaacagatcgccgggaaagtagctggacaactcatacggatgatacgcgagcgacctcagtatactctgcgtcacattcatataatacttccaacaatatcaacaattctcgaatgcccaaaaagcgagactccaaacaacgaacaaactcgattactgatgggtcgagctctgccttacagcccctacttgaaactagtgagaaccctggcttgttgtcgacttcaccttcaacgtctggcgagccgggcactttctctctaccaaatgtaccaagcccttcccccaacaagtcaacatttgttggcatcccaccatcaccatcacctatttctcaaccttctcgaccttcccatccctttgccgctggtcttctatcgcaaataaaatcaataaagtcgaatgacgagaaagaaaacgaagagccgatttcaagtcctgtctcgacaaattcatcaaggcctttcagcccgttcgcagctttacacgctcaaatcaaaggcaaatcagcatcgacatcagcctcatcagatgtggatgaagatgaggaagagtttgatcccggtttgaaccgctctcgaccatcgtttctatctgatattgattcgcttgggaaaaactctgaaggaagtctgtcttcgaatgcttcccgatttcctttcttgtctggaatcggatctggtgcttccaatcttaaatcagccggaagccgagtcctggctgaaaaatctgatcaaccaaacatattcgggtccactaaaccagccgaggcttttccgtctagtgtcaaggctccaagaaagactgtcaactacaaggcgtctgcgaaagttcggcagcttcattgggataagataaacgagctcaaagtgaatgagaacacggtttggagtacgacaacagatgagaagctagagaatgagtgggcggagaagctcaaagagcttaatatctggagtcagatggaatctacattctcttcacaagaggccaaacttcagattggtcagtgtttttctcgatattttatcaatagggctttcccaactctccgtgttatgctaacatcgtttctttctctttgattcttttagataagcaaaagcaggtcgagctactgagtgtccttgatcccaagattcgaaagctagtcggtaagtttacaactctggtcgagagatttatagattgttgagctaaaaggactgcgatgttcggaacttgatagaaatcttcatgaagggctacaaaatagatgatccagaagaaatcagagtcaaaatccttgcatgcgacgagaagtactgcacactaaactttttggagaatctttctaaattcctaccaaatccagagcaggttcgtttgatacgtatcttatcaaattcatgtccgtgctatatatattatcactaacggccgaccctctctctcaggttggaaaacttaattctcacaagtcagacacgttggcagaattgatgttgcttcacccagcggatcgattgatggttcacttgattaagatcccccggttagacgctcgggtaaatggaatgctgtttagggctcggcatgacgagaaaatcaatatgcttgaagaggtaaataataacctgctcgtttcacttgatgcttcttcgttttgacctctattatctcctccccagatcgtcttgcaaacaaaggaggcttctcttgctctgttggatgctcccaagttccgacagttgctctctgtatgtgcaatactctttttcggtgcatctgtgatttgtgcctgtacactgatgatattatctacctgattatagcttatcctcttgatcggaaattatttgaatggaaactcgtatgctggcggagcatatggttttaggatcggaagcatcaacaaggttagttcttctatgtacctttaggcttagaacgaattttaagaccttggttttctacagttggtcgagacaaaatcttctgctggtcaaaatctgctacattttgtcgagcgcacggtctcgaatcaatttcatgatatggagggattcatggacgagttagacaaggcttcagaaggatctcgtcgtacgtgaaccttgtacttcaccgttgctcaaaaatcagagtttggtcaatctgaattcctaaatattcttttcacaaatagatgatctcggtcctgtgtccaaggcaagatcggatatggccgctcaacttcaagcgattgataaggaaattaaggcccatcttcaagacaaacctatctccggtgaccgatacagtcagcggatgcttcgtttcgccgccgaggctcgggaccgtctggacgccttgaacgatctacgcatcgaagcggacgcaacttatcacgatgccctcaggtattacaacgaggatcccaatactccttccaacgtgttctttggaatcttcaagacctttgtcacatcctatagggtaagatttccatatttctaaggttgttatatgtgatcaatgagtgatgtgactgacctcatcttgtgatacataacattagcaatgccaaaagcaaaacttgacgtgggctgaactagaggcagctaaggaacgacggaaagaggtatgtcgagattagtctctgttctatgaactgtcccgactgtgtttgactctcatcacatcttgactctctttctacttacaggctgccagacagcgagcgattgaaaaagcagaacgagacgctttgatcgatgattctgcgcccgtgatggacaacattatggaatctctccgggcaatggctcctcgtcgaactcgacgggccggcaaaagagcagatttttcgtcagcctcgattgcgccttctccatcaatgcagagcttgtcgatcgacttgaaggctgctggggagaagaacgattttggaggtcaagcgatgaatatcttgaatacgcttcgaaatcgaggcttcggagacatgggtagtggtggacaaccatctgctggtgaagatttaccctcgacaacgatggccatgccgacgacgacgacgacgacgggtttgccattggacacgaatgaatcttcaagcgcatccctcgagaagttttcgactttggatacaaaagacgatgctcttgatgaacgaatcttgacgtcaacttctccggatatttcaagacgagctctcccgaggttgtcgttacacatggacgatttaaatttcaacgttgatcttgatccatcggatcggaggtcgatgcctcacacaaacgaggtggacgaggtgaagagtgcacgaactggtgaagaagaggacgagacgtttgttttagacaaaactgagataatagaggagaagggagaggagaaggaggaaggcaaacaagaggagaaagagatgctttcgacgagcaagaatgagaacgacgacgaagcagtataggtcatcatggttcctttaatttttttcttacaacactgtgtctcttccctttacccccttctgtctttcatgataccatggttgccatttttcaattttttagattcttacccttcatttcgatcctcctccacctccatgtgctttccctctcgtcttgtttttgattacttttcatttgttatccttccctttctttagatatatacatatattgtacacaaatactgttc

SEQ ID NO: 1138 - DNA, 15823 bp, Xanthophyllomyces dendrorhous
caaatactgttcacccccttaacaccccctcccccttcccttttttagaccactgcatttcccttcttttatcttgtttttcttagtccatagcctattcttaaattatgagtttcctgtttgaaaaagtgagggagacaaggtcgcttctgcttttcgttgaccaaagaatgcttctctgttcgaactgccttccgacgttcaccagaaaccacactctcgaggccgatagcaaaacggccaacaacaaatagactgagcaaggctatcaactcagttcagatgatgatagaaacaacaagatatcgggtctcatataatataaaatattcataagctgtccaagagatccaacatgtccttttccctatcttctattgtttgaattgtagaaggtgatgtggttgagaaacttgaggcgtccactgaagctggtgtctgggagagggctgattgttctgctgcgagagctttcagactagctagtttgtttgaaagctctgcacactttctgtattggtggaaacaataccccaaattacgatagaacaagaactatcagtctgatgatgcggaacgaaagtgaagggaggcgaatagagacgtgaacgaaccgtttggcatctgctgtctctgatcgtcttctttgtagttggtccaccatgatctgttctaatgtcgcttgcgcctgtaagaacaacagaccagcagattgcgcggcgatcggaagaggggtctgagcgaaagagatagatagtagaacaggaagggagagaaagcgaaagaaaaagaacaaaggagacacacctgaacacctcggaggccgttcacaccgaccatcatgttgactcctacctgctccaatcgttcaacataaggcgccccgacaggagccgtctgttcatcctctgatccggcaagtacagatggtggtctggtaagtgcgcccaagagaagaagggtcgtacgtaggtaggtgtgaaggaggctaagaagatgaggcttcatatctgtacagtaaaggcaggtttcgattgaggaaatcaggttcccttaatgaatattgcttgggaaacaaaatattggaaagaagacttgactgactagtcacatcgtcaggaattaaacgaggaacacccatgtcctctatggtgggtactcgtgcattgacctgtagagcaagaacaaaagttttgatcttcggtcaaagagatgttcgtttgcttagtgcagaaaggaagaaggacatacaggaaacacgtccccgaaacattcataagtttcgtctttttcaatccaatctagcttaggaggctcaagctcattgaagtcccagtctggaaggtctggttcttgtattctttctccgttctggtcctgagactcgagatctatgagtaacacctctcgttgcttgcctttgtcgagagagagcggtctagccggatggtctctgagaagaccaagtaaacggaggttggccgaggtgaatttcagatgatgagccggtggttgagggaacgtggatgaaagtcctaggtcttctccctccattgtgtgagacggagcgaatggatgagaggctagtttggcttacggccgatggaaggtggacgatggttgacgaagggtgatgactgatggatgttgacgacctgttgaaggtcaatatcaacacgttcaacaagtgctcagcagctcaccaacagaccccaacctgtcgagccatccctgctctgccacacacatacacacacgtacactcactgtggtctgtagaacacacaccaggagttgtgtccgagacgtgttggatggtaaaagactttcgtctatacgcatagattagcatgtaagcatagtatactcaagcagagccgagcgaacgtcatccccgccgtgggaaattctcccgttgcccgttccgattttctaatgaaaactccaccgtctcgtcttcgtccagccatcaaccacccatccatcttctgactcatccacacccacacttgcacccacacgcatacatacacacacacgcaccaatgggcctgctggattcagtcaaacgtgcagcttcggctacgccagagagaattaccgggagaacaagagctggctcgacggccggcccctcgcccggcgcatcgtcatcagtaaacccggggtcgaaagatgagcagcatcaggtagaatctgcagaaggagatgatgtgagtgtgttggacgagcgagagggtaatgttattatggccatggtcagccaacgtgagtctttttgtcatctcatctcgttgtcttactttccccccattctccatctcgggtgagaactgtatgaaggcaggccgcagggcatgagaaatccgcccgtcaagctcacatgatggattcaaaacgagatggagatggatccgttcggactatgatcagatcacttacgacccatgctcgaggctttggtagacaacaaacgctgatcgtgtccttgttcatgtaccggtcaatgccccatcgtgcttgatttaattcgttgcattagttcgtatcggaatggacctcaataaagtaagtgtcaataggaatatctccttctgcttccttcctatcagttgggaggacacgacctcttgtggtgtttcgacgttatcttcgtccttctgttgtgatgtgtgttgctattgtcgagcccatttctgacgcaccgcctcacttttgcttctctatcttcaagatcgctctcccaaccttcgttcttgagccccgatctatgctggaacgtatcaccgatttcttcagccatccggatcttatttttgggtatatatacttctcctgccgacttttgagccatgaggaattatagacgaactcatcattttcggttttcctgactcattcttgaatacacagggcagatcagatggaagatccaaaagaccgattccttgccgttctgcgatattacatgagtggttggcacatagtacgttgctttctttgtcttcttcctcttctttaccctgtgctcttcattctatgactgattggactgcgtctctatagaaacccaaagggcgagtcgtatctttgacaacatgttccctgtttatacgtcgttgtactaaccaatccatccatcaccatcacatatcaatagtgtcaaaaagccctacaacgccactcttggagagattttcagatgttcctacaaatatcctgatggaagcaagggcttttagtgagtcactctcttgtttgcctcaatgattggtcaagtactttcatactcatgctctgatcctttgcaaatatgcagtgtcgccgaacagggtacggctttctgatcaattacatattttcctcacaaacatgtatgtgcattaagacgttctgaagctgacggtatgcttcatccatgcccgtcattagtgtcccatcatcccccagtgtccgcctacttttatatctcgcctcagaacggtgtgctgatctatggagaattgcgcccaaaggtaagtccttcctcataggttcccttgcgctcagatgactcacatggtgaaaactgcctcttggaccccttgtagtccaagttcctgggaaatagcgcagctacgatcatggacggagagaacagggttatcctcatgaacaagcctgaggatggagaatatcaaatcagtatgcccaacatggtgagtcttgtttcgttcgccagaccatagcctgcagcgtccatttgttgatcgggtgtacacaccttatctgttttactcaattagtatgctagaggcatcttgttcggaaaattaatcctcgaattgggagacacaagctcgatcaacaacgtcaataccggaattcattgcgatgtcgagttcaaaaccaaaggattcttttctggaacgtataatgcggtcaccggtaaggtagctaattccaagggcacgttaggtgagattaacggactctggtcagagagcatggaatacaaagattcgaaggtcagatccttttttcctctcaacatcactcagcattttatccgtttacgatcgcgaattattctactaatcacactagctcatctctgtacttacaatcgttgtttcgaaaacgtctagacgggccgaacgcaaacattatttgacgcgcaaaaggcaaccagtactcccaagacggttgctccagaaccggagcaggaaccaaacgagtctcagcggttatggaaagagttgacggacgcaatcaagcgacacgatatggagggtgctaccgaagcgtacgtaacgatatttgtctctcatccaattgtatcagtatgacggatatatattctgtcaccgtatgaaagaacgatccgcttattgactcgttgcttctcatgtgcaccatgtctatcaatagaaaaactgcggttgaagaccgacagcgcgagcgcgcacgagaaagaggtagcgaagccgactttcccttgcggttctttgaggctagaggggagaaatacgtgcctctgtgtggagtgaccaagtaagatccttccatcatctgcctgtgtcttccgctttcttgtctttttctcgaacatacattgagctatccattgcaaacgggatttacagcttgcctaaggacccggttgaatgcactaatttcatccagaactggatttggtctgattcgacaagctcctctggtcttggtcattctccgtccgctccttcgatgaatggcaagattcataaacaagaatccccagccaaggttgctgctgctgctcgtcgccagagtgttggtagcggctctctgcatggtatgtatccctatcctgcgtttttatatagcatgttatagggaccttgttgacagtatacccgtttgaatttgaaagttgtagaggccgtcccgacgattcctggtccgccgagaggtcccgttcaggatcaccctcccggagcatactagacgataacttatccgccccgttgtcttctcgttcatctatcatcattgcttctcatctatcgtttagtattcgtcattcccgcttatatctttttgtcccatccatggtggtcgtccgcctttctttctgagcttgcttcacactgccctcctctccgcctatttcattctgactcttctgggcttgagcttatacctgattgtctcgtgtatgtatatgactacgcatcatagagtgcgagctctcgaccttttgtgtttcgtcacgtacaaattctccatttttgtctttgtttctacctctgttttgtcgtctgttcttactatctcaacttcgtcgaacattcgtgactctggatctcgttgttgagcgccacgactggacgtcaaacgagagccacattctcatcttctgtgtatcgacctgtctctatttttcttgcttctcttgaaacatactcggatcgtccgtactcgattgtcctttttctttcccctcgttcttctacacttgttacggtgtaaagcatggttgcctgtcgatcagcccactcatgagcaagtcacgtgattccgaacttgcggttgaatcagatcttgagtcatgtcttctcacactttctgtttcttcaaccctcgaagatcacccgtcgttctctcgcccgtcagccttctgtttgtcaacaggagcacatatcaagaagctaagctatacagacagatacagagagccacacaaacacgagacaaagtttgaaacgtgatggcgcaagctcgagtagtccctcgttcgttaccgagactttcgatattgtacgtcatgattttccttcttatcttgcctctgtcagtcgttgtactataagcagaggtacaatctagcgcgagacaggagttgaccaatccagtttggtacgaaatcatctttgtggtgtaccgatggactttgattgatgaacggcgacgatgacgatggtgatggtattgctgttgtatgagggatgtagaaagctggcactctggatacctgtcgggatattcgctatagatcatgtaggagaagtcgtatctgttgaaggatcaagtatgagtgtacgtccgagatattttctcatccctctcgtgtgtgtgtactcgttcaacccaatctgctgattgtgatttctgaaccctacacactttgttggacctgaaacgggcgggaccacgatcttgattgaaaatccgtcaacagccgacgttgaacccagattggaaagaaacaaggagacgggattggatctttctcaacaagtggcatgtcacctggaagaaaccctggcatagaggggacgtcgtcactctttggtctgtctaccttttcatttggtctctccttccgattcatgttgcattgggctgatgaatattcatataatcggttggtttggtcattcgtatgatggacgatcgcaggtccccgacatcagatacacgaagattaacagttaaaagaatcatcggaatcgaaggtgacactatccgtacgaacgcaccgtatcctgaaaaattcgtcaaactggaaaaaggtcaagtctgggtggaaggtgataacgatttagagtcgaaggattctaggatatacggaccagttcgttcttcgtcttgcatccttccttccttttctcggctcttcaaggttgacttcgttttgtttatctatctttctttcttgcgatgatgatggtggtgatggcaatacgttgcttgatgacatttcctggttaggttcccatatcccttctccaatcccgtgtatcccatgtgatatatcctccatcccactacaccactctcgatcctcttccacccttctcctcatcaagcgacaaggacagtattcatcactcgcgcgtcgtaccgcctcctcggttgaacacgattcatagaccgatgatgggtcgtcttccaggatctgaaggtgttggatggggcggaaaacacggtttgggtgagggcgagagctcagagtctgaggagagaagtagaaggaggagagagagcagagagcagagagtagaacactgatgtaatataaactttcattcaattcaaacatccatcttaccctatgtgacattctcacgaaagaaaggaaaaaagaggagggtagggctcgaaagcgacatatgtataattcaaaagtaaaaggggtatcttgacataaaactatccgaccagacaactggcctaacgaggcaagtcctgtccaacatagtaagtcgacaaaaggagaggggctcgggcggtttgggatgtgatgccagcgcggacctgtctgttcagagcacgtatctaggtagatcggatgatgtctcatagagtgagtttcgaagtcttgatttgaaatgttactattcaaatgatgatgagaacagaattcataagaagataaacagaaagatgtttgatcagcattgagtgcagtgacctaagggtaaggcaaagagctaggaatataccttgcggtagtcctccggattcggctgttacagttgctggcagaccgagtctggcaagcgctcctcggatgagaccttgaggctaaaagttcacaaacacagattcacagatcggacgccaatattgttagaagaagaacctctcagtcgcttgcaagaagtcactcacgaaggccagatgctgagccagaaggaaaacagtcagtggagaaaacttaagaaagagtaaagtcattgagaaagactctcactggagcagctaatttgacatcctcttgaccgccagcaggtgtggatatgtgagctatcggagggaatgcagagtcttgaagcacaaacacgccctgttgattgaagagttgagaacggttatcagaatcaagctttggaagaaatctgaagggaaagggaggagaggatatgaactcacccgatgattcgttcgaaggttgtcaacctgtttctcatacacagcgatccaaacctgtaatggaacagagcgcagaaacattcatctttcttgagcttcatcttgatggagacgagcttggcaatcgggatgttgctcagaacgtacatccttgcagatgaatttgacaatatctaagggatcggcaaatcgagatcttgagaaagtcaacctggcaatcaagataacacgttgccccaatcagtatgatgagtgctagcatgcagcacacatttaagagatccttctctaatcttccgagcgagcaatagagaaggcgagacatgtttgtaaaggtttttacaaacctctcagcgatgtctcctcctatcctaaatccgatctcctccatacgtttgcccactcctccgtctccctctagtctttgcttttcagattccttcagcacatcttggggtagaatcccttcggcaaccatttcctcctccctgagctttgttctctgttgagcaacgctagccgagcgtcgaagggcttgtaccatgtggatcagaaggtactgattcgacgcgatagctacctggtgggacggagcaactgagagcgccacaagacttggagggagaggagaaggtgtaggagcagagtatgatggacgggacatattatagtgcgaagttaataaggagagaatgaacgttgcgttcttgaaagttcgttgatggccgtcttcgtcaaagtaggtgatagttcgcgtcgaaccgacaatgatcatctcttaatctcaccctcaccaccatctaatactaagcttcaatatggcccctcttcctccatcggaatcgcctgtaatcctcaagattgagcgactactgaatgatgtatcagtccaccagatccctcttctcaaatcttgtaccgggccatacaaccgccatcaggaactagcgaaggaaattagaggagatcttgttagaatcgagagactccttgttgtgagtcgtttctctctttgcccagtgctcattcaaagtttaacccctaagctattaaaaatggcattccatctattctcacataacagacccttgaagaagaagctgacgaccaggactccgagcgagcgagattggtcgtccgaagtatattcgatcagttgagcagaaagcttgattcgtgagttatttctatatcttatgtagcctatccagttcgtaatttcacttcactactgtctttctttagagcaagaatagaatacagaagcgctctcttgaccagtaaaaagtcgatagattcaaaccctgcggcaatgtatgtacgatggcttatgtcttttagaggaagcaacaaggtctcatcggcttcgcgcctatatgtatatcttttagacgagaggagttgttgtattcaaagaatcggtcggctgagtctactcagtacgtgtaaattcatttcgtctatcaggtcaatctagagctgatggtgaagaatttaaaaccagagcggacgacccgttacaagagaaagccaaccaggtcaccgttgctctccgacagacgacagagatgatgaaggatgagattgaccgcagtgttctctcagctcaactgctcggtttgtcctttgaatgatttgtttcagtctgctccgcttatgtgtcaaagtgagataatatactaaccttctttgtatcacgatgtattagatgagtctaccgctacactccgttcgacgacgaacctctatgagacctattcttcgcttcttcaggcgtcttcctcccttttaaccgcgctcgaacaagccaactacaccgatcggatcctcatcatcgctgccgttctcttctttctcctcgtgtgcggttatattctcaagaaaagggtgttggacaaagctgtgggtggattgacttatatcattggtggacctggcggagctgccaagaaagctgccaaatcagcagcgaaagacgtcgtccagccgaccatagggaagatcctgaatcagggaacaagctcggtcctggaaaaggcgagcacatcgacgacgccgctgtcaagtcaagtgacgagcgttttggcacaaacggtcgttttgacaaccgcaactaccaacatcatcagtcctgcatccacgtcctctgcaagctcgagcttgccagaacagggccaattgttggaagaagagcgagaaatgttgcatgaggactatactgaggagagtcgcgttgggcatagagacgagttgtaaaagatgatcttgttgtttagcaagcagttcattgatcatagaagggcaaattcgtacgcgcacgggcgtcattcgatgcatcgaaagtaagaaaagagaagagagggagacaagatatgggatgttgtttaggttaagaaacaaaggaagaggggatcaatataccatctgaaagccagcttattgtttgccttaattcccgtgagcggccagcctgctttcaaggtttctcaaggtctcttccttcgcaagctgtgttcatcccccaaagatcaaaaaaggatcagtctgaggtcagacacgtgttgaataaacaagggaaagccttaccaattcctgcctcctctcagcaatttctttctggacccgtagctcgatctcccttaatttttcttcttctcttctcagttgttcttctttaattcgaaccgactgagaagtcatatgctcaggaagagtcgaagatggtttatcggtcgttcgggataaagtttgctctcgactgttgtatggagataaacaagtcagttcaaagttgaggtcaagattgaaatgaaggaagaaggaagaaacttagacatactattctggaagattagtcaattataaggtgagagagagacatccagttgtgttaggaagcttggaaaatcagattgtcaagagagctcgactagacaccagagacaggcaaaggaaagtggatacggacgttcgtatagccaatcgtgtgtgcactttaagaaacaacatcattacgaacagtcagaagacctgcgctccgcaaatctgactcaacccacaagataagttcactcacttctttcaaatccggcagatgtgtgctataaaattgcccaagaaccattacgttagaactctctccctttgtagcagctccatgttcccgaatggtatcagacatacctaagcaatgcgtttcgaagtgcagtgaaatccgagtgatcagggttgtcgacttcgacaagaccccaaggatacctgtccatgattgaaggcgcatacaaatagaacatcagatcaagtattaagaattgagagaaagaggaaacaagacttggatgaacaaaccttcgaactcgaacgggttcgtcttgaacaacgatctcttcttcggaaccaacgatagcgaacgggagaagtgactgtatgttgtaccagtccgggtatcagcaacgcttacagcaggggcaaggagaggcaggaattgactaacgcgcagatgttggttttcttggatagtttcttcgtcatcctcttcagggtcgtagggaaaattgtagatcgggatgttgtagctgatttgattcaaaatgaacaccggttgtcatattagtgatgatagctaaaggggaatcaatgatggagataaagcggaacgcactaatcgatatcctccatcactcttttcttgaaagctttcagctcagagggagtgagagaatcacttctgccaattacaggaatcacattcaccctagcagcgagagttcgcatcagctcgatgtcgatctctcgaagtgcatggcctgagggagggataaagtaaatgagcgcgtgtacactgagcatcatggagaaggaaagttagcaaacacgatgaaagggggagagtaacagagagagctgtctgggaaacggaaacatcatctcagggaaggacgaaccggttgtctctaaatctaggatttcgcttgattcgactctcctcggccatgatatcatcgtattgtctttcgaggtagcctaggatctgaccaaaggcgggatcgttatctatgctatctccgaaacctggagtgtctacaatagtaagcgcaatcctgactccgtcctcttccagctctgattcaatatatattgatggttccaaaatagatagacgtgatgttagccaggcaagtaggccgactatctgacaatacagcttgaaaatgaaggacttgccgacattaaccggtttgatctcaagagggtcctcaatatgggcttgagcaggctcaaactcggtttgatgttttagcacatcactctcgcagagggtgtctgagtaccacaggaattgcatgacgggaacaaacgagaggagccaaatgatgatgaatatcggttcgttgggacatacgctctttgctaggatcggagaaaccccaaggacgtactgacaaaagtggttcgaccggtaccggaggcgccttcaaaacgtaattttcagacaaacaggacgttgttgttgaaggaccgttccagaggttaaaataagtttagaaaaaagaactcgctgagcaaagagagaacacgaaggaaaggaaaacaaagacatgctcggacgcctaaggaaagagaaaaagaaagaaggaagacaaatactgacctacaatcatcagggtgaaagtgacacccttctttatggacttccttgatcttgttggtggtggtggcatctgtgtgggagtctgaggatgagtgtatctacaaatgaggatccaacgatgttgctggtaagcaagagctcggtgaatgtgagagatgagagatgttgaaatggcagggagtgcaaacaaggcgcgtaacttgcttatgtaagccacgaatgtaaccacatcagttggcatctctttcagagacaatgagactccaaagaagacatctgcagaaggagaagagtgtatgaagatgtctaagaggctcgcatcttgggtcatagtatgaatggttcaagagaaaatggaaaggccagtacgagagttgctacagatcaacttttttcaagctgacgtgattcccatccgaagataccttgaacgctgatgaacgctcctctatttccagcagcatggatggtatgtgcagatctgcgctcataattctttcgtgttctaaagatagatagactgttgaacatgctatccgttcgattgtgttcttgtgaggactggtcgtactggctgggtgagggtgatgggcggttgcttacataagctgtctcaccagaggcttgcaagcgattcgagatattcctgttcctggccacgcgttcctgccactctccctcattcctatcgtttcgaccttctccatttcctcatcttcaatttcatccagcggtttcatccctctgtcttcctttcttctttccctctccctcccttctcgtccgagatggatccctcattcccatctccacagccaccaccaccattgccgtcttctgggcagaactcgcagccacagctcgcctcgttcgctctctctcaacagcagcagcagcatcaacagcaacagcaaagccatccaggtctctcgaacaatgttcagaacgggttttcttccattcagcagcagcaacaaatgcagcagcagcatcagcaacagcagcaatctcaggtcagacagtatcctccgggaagcctgccgttgcctcagtacccaggcaacatgacccatcagatgatcggaggtcttactcaggacaggttgaagtatattgttcaggtttgtaccagatcaacttctctttccttagactcggatgcatcaaactgcctcacttggatcatgaatggaccggacgatctcgtgatggccgctcagatgaacgctttttgctcattttggttcttttccttcgcgtccacttttctacagaaatctcaacagctcaaggcccagggggcgactgagcagacgtcgggggagctcaagcagatgatgaccgtcttgcaagcttatcagaaattcatggaatggaagtcagtgtctccgtctctattctaagttttttctaatcctgtctgagcgtgttgaggcttatcacttgatcgacgtgtcggctgtttttcacttggatatccataccttagcaaagcaaactatgtccatcttcaacagcagaggctgcagcagcaacagcagcagcagcaacaacaacaacaacaacatacatccagcaccaatgggctttctcctgctcaaggtaagtttgttatgggcatcgtttcgccaactttcgctaaaactaacgcgttttctttcattgtttctatacatgctcagctctccctccttcctctacgcccacttctttggtttccaacaacccgacaattgcggctcctccatccgggtttcctcaaaacgggcagccgccacaacctccttcatcttctgccaacccccaggcctccttttcttccgccacaccggcagctacatcaacccagccacccgctaacccgcttaccgcgtacaactttacacccgaacaaattgctcagcttcgaactcagttgcacacctttaagcttctaggaagaaacatgcccattccacctcatcttcaggcagcaatcatgggccatactggtggggctctggatataaccgagaaggacaaaagtacagacgttggacagtcgggcttaactaaaagtctggaaaacaagctaacagaaggcgcggtgaatgtggctctcgcggcagatgcacaaaaacctgaaccaatcaaggagactggaaacgtctctgcggagtctgctgctcctgtggaggcaatcgccgtgacagcttctccgtcgccggctacctttgattccactgctgatgcagccaccaacggaccaatcccggacgacaaactgtcttctgtgattgcctcgcttcctgttgagttaccgcccgcgctcgagctcaacagatcatcgctcatctatccctacaatgcattcacccatcctttcaccctcgttcctcaacctgaacctgcgtcgagcgcaccgtaccttagcactaagcagcaacgaacgttgattccttcgctaatgcctcccggactcgacccatatatccttctcgaagagcgaaaccgattcgttgacactcggatcaaatggcgaattcaagaacttgagcagcttccggcgatgctcggggaagactgtggaggagagcccatcgtcggtttggttgaaccgactcgatcggatgctaaaatacgagcactgatcgagcttaagtcacttcaccttctggaaaaacaaaaggcgatgagagagaagttggctactcaaatggacgcttcctctggcttgttgaccgaccgaacggcattccgaaaacacaaaaagattcatcaacgagatgccagggtgactgaacaactcgaacgacgacaaaagttcgaccgggagaagcagatcaaacagagacagacagactacatcctcgggatctgctctcacggaaaagaactcgtcaaggccggctctatcgctcaagataaagttcgaaagcttgggaaactcgtcctcggatttcacgtcactaccgagaaagaagaacagaaacgtgttgaacgaatttcaaaggagcgtctcaaggcgcttaaggcagatgatgaggaggcttatatgaagttgatcgacactgccaaagacacgagaattacccatctgctcagacagacagatgcttatctagattctcttgcccaggcggtcgtagcccaacagaacgatgatgtccataaagacgcgggtgtaatcttgccgtttgagaccgaggacggtccggtagatgaaaccatgttcggagcctccaagatggacaccgaagagcctggacaggcaaacggtggtggggccggggc

SEQ ID NO: 1139 - DNA, 1602 bp, Xanthophyllomyces dendrorhous
gggctggtggggctggtggggacaacaacaaggtggattattatgcagtcgctcacaagatcagtgagaagattacagaacaaccaagtatcttgatcggaggtaagctcaaagagtatcagatcaagggacttcaatggatggtcagcttgtacaacaacaggttgaatggaattttggccgatgagatggttagtctccttttctcttgtgtcatcctctttaaatcaaatgggcagtggaaggatgcttgagagattaacggctgacatttcctcaatttttgcctctcattttctatagggtttgggtaagacaattcaaacgctctcgctcatcaccttcttgatcgagaagaagaagcagcatggtccctacctcgtcattgttccactctcgacgatcaccaattggactctcgagttcgagaagtgggcacccggcgtatcgaccgtgatctacaaaggaacgcctcaggctagaagggatgcggccgccagagtcaaaagtggaaacttccaagttttgatcaccaccttcgagtacatcatcagagaaaagtctctgttgggtaagatcaaatgggttcacatgatcatcgacgagggtcaccgaatgaagaacgcgcagagcaagctgtcgatgacgttgacacagcactatacgtcgaggcatcgattgattttgacgggaacaccattgcaggtttgtgtatctcgctgttttattcagaaagaacctgttgcacatagtgactgccttaaaatttactgtctattttcttagaacaacttgccagagctctgggcgctgcttaacttcgtcttgcctaaggttttcaactcagtgaaatcattcgatgagtggttcaacaccccgttcgccaatgccggatcgagcgacaagatggacatcaacgaggaagaacaattgctcattattcgacgactccacaaggtgctccgacctttcctcctccgaaggctcaagaaagatgttgagtcagaattaccagacaaggtcgagaaggtcatcaagtgcaaaatgagcgcgttgcagcaaaaggtatacgatacctaccgaaagcatggctttttggcttctgaaggtgtcgataagcaagggtgtgttcctcgacttctttgtctttggatttcactctgattcacttgaagatcatgtgttctcatatatacatttcttatttggcttgtttctgaatgtgtagtcgaagtaatgtcgtcaagggtctcaacaatacgatcatgcaacttcgaaagatatgtaatcatcctttcgtgattgatgtgatcgaggactcgattgtgccggaaaagattagtgacgataggttgtggcgagtggctggaaagttcgagttattggaccgaattttgcccaaattgttcgcaaccggacatcgagtgagtttgagcggccaagttgaattttcgttttctcatgtctcaaccttactgaacatcatctttggcgatgttttctctttctttttttcctttttgtacaacaggttttgatgttcttccagatggttcagatcatgaacatctttgaagattaccttaactaccgaggttacac

SEQ ID NO: 1140 - DNA, 44607 bp, Xanthophyllomyces dendrorhous
aggttacactggccaatatcttcgacttgacggttcgactaaagccgatgaccgaacgacgatgatcacagagttcaaccatcctcagtcgcctcataaaatcttcattctttcgaccagggctggaggtttgggtttgaacttacaaacggccgataccgtcatcatgtatgccttttcttttttgttttacttgtatagagtggaaaggatcgaactgaactttctgtgttcttttctcaaccggcgatagttatgactcggattggaatcctcatgcagatttgcaagctcaggatcgagcgcatcgaattggtcaaaagaaggtcgtcaagattttccgactcgttaccaacaagagtatcgaagaggatatcttcaacgccgctcaaggcaaacttgctatcgatggaaaagtcattcaagctggaaagttcgacaacaaatcatcagctgctgagcaggaggcgctcctcgtatgtcacattctcttctgtccttctttttgggaactcatttcacggtgatgtacaggtcgactgactgggaatctgacatctctcaattccggtttgcagcgatcattgttagaagccgaggtggaagagggagatgaagaagatgacggagagatggctgacgatgagatcaacgagcttctcgctcgaggtgatgatgaactcccaatttttaaagccatggatcttgaacgagagaaggaagctatccgagtctggcaggcccaaggaggaacaggacctccaccagatagacttttcaccgaagctgaggtcccagagatgtacaagcgagagcttgtgagacaagtggatgacacgcttcatttaccagaaggccgaggtcagcgagtcagggcggatgtccattatgatgacggattgacggacgatcagttcttgcaggctcgtatcaatcgtatcctctcattaagcttaaagttggctttattgacgttttatttggattttcttattttcaggctttggagggtgaagagggagatttagaggaagcgatcgagaagaaacgacagcgggtggaacgtttacgtgcaaagcgagcagaagtcggatccggggaggatgggcaagattctgatgactctatcgctcctcttggtcgacccaagttaggtaagaagggtaaaggtcgtcggtcatctacgatggccattgatgatgatgaagacacaccgttcggcccgaccgcaaagaggaagagaggaacgacatctatgtcggccacgcctgggatcgacgatgaggaggacatcatcagctcgacgaaacgtcgcaagactactggtctactaggtgctctcaaggatcgtatgaaggacgccctcaatgctgtctacaccggcatccaacggcctttcaaccgacagatgaatcagccccattgcgttgcgttcttgcagcccgttgataagaaggttagtatatgtcttaattttgactgggttcatttatcaattacgattactaagatcgtggcttttttctcctcttcacaaaagctatacccatcttactaccaactcatcatgaaaccggtgttcatgtctcagatcaaacgtcgtatcggaaataacacctacaaggatgtcaatccattccgagcagattgggagcagatgttcgccaacgcccggttgttcaacgagcctggttcgtgggtttacgaagatgcagattatcttgagaaggaattagatgttttgtggaataagcatatcgtcggtagcgggttgcccggtgcgccgttgacgacaaacgccaacacgacggctgccaactcgtctacaaatactcctgggcccggagggagtgggatgggatctgcttcggaggaggcaccgccatcgacaccgatgacagatggaggagagagtgtaggtagtttcaaaaggaaaatcacgataaaaaggattcaaccaaagattgagtcggatgaggatgaggaggacgaagaagatggtgaattatcgtccgatagtgatgactagagtgtcatctcttatcttggttctctgatttcacatgacttgtctcatttcctttttcttttcggttttgaactcctatcgttcacggtttgtctgtatacgcttagtagtactcttttgtttgttcagttcctctctcacacaatcttttgtaaaaactcagtccgttagagtcttgatgtacatgaattttctctcttacccatcaatgccggtttctttctccctgattttctagtccaaagagatagtcaaagatgttctttcttccccggttttcctaagctttcctactcaatcttcgacttttctgtcccgacctctatctcactggaccgatcttgttctctacgaatgagagctcgtgctttgaaagccacgaatgcgagcgccgagccagagagggcataacagaagctaggtcccagaacccagtatgtggtgcatgctttaaaaggcaagaaagagtgtcaaaggacgaatctgagagggaagagaggcgaaagtaggaaggaactgataaggacgaaccaaagataggtcctagagctctgcccaattgacctgcgctcctgaatccacccaacgtctttccctttcttagcttttctccttctcccttatccttctgctttccttcgacttccactctcttctcaacacttcctacgtgctggtcttcatcttggtcacataagagactaacgaagccggtgagaccggtgacgacacttgcagaagtgaatgctagacaggccgctcctgaccaaaggatgagtgcgctgaacttgcccggaatcgactcgtttccggatgaagaggcggagagaggaaggagagacaggagtaaaagaccaagtgaggtagagaggatccctctatgggctaaaataagaggatatcgggaaacagaaggtcgtcgggtatatcctccttgcaataactttcatattccaagagtgttgtaaagggaaagaaggaaagagggaaagaaggaaagaaggaaagaaggaaagaaggaaagaaggaaagaagaaaagtagaagaaaaagaaagacctataagtcaaggctctcatcttttaatgcgctgaagaaaggatgaagacgtacggacgacaaaacaccgatactgaacgcaagacaccagatcagcgtcacaagtcaaatgacagagaatttgttcgagagaagaagagcttacaagcctaagagtctaccgttctgagcgttcgttgctccgaaaagatcgtatgccaagaagctataatttatcatgtcaggatcacaagtgcagacagagaggtattgaagagttaaaacgtaagggataatcacgttaaagtaaattcagctcctacaaggaacatttttgagaagagaaatcatcgttaacaatatatttctcttctcagcaagtcagaataagttgaccgaggtacaaacatgacgtaccactgaagaagaatagaaaaattctgtgtagagcgctaagctcgtcgaccatcctctttctctcttttacattcattgcaacctgtctctcttcctctcttcctgctcctttggcagtgtttgaactctcttcctcaggagacagtctccaccctcttgtttccggcaacttccaggcaaggaaagccgtttcaatcgtgatcaatactagggtgattgcagcagcgtaagaatagacgttgagcctattcaagagtgatgtatcgctagacacagaaagaggaagaggaagtgaagcaaaatatgctcccaaagccggactaaaaaaccgaatgaggcaagattgaaccgaaaatcaaccgatgttcagtatcaaattggaaaagatataagggaagagggtgagacgaaggggcgtacccaaaagtaaagcagacggagaaagccaagccaaccaaggcgagcgccctagatctcgtggaagcaggagtgacatccgcaattattgctcttttcaatgtatgggagagcacaagtgcatatttgaaaattggtcaatgaacatattaacgagattaacgattgggacgtacatcgacagctggacgtttccctcactcagcccgcctactagcctagatagtagataagaagcctgagcgatacctgagttagccatcgatcttgctcttattgtttcgaaatcattgcaaagcaaaaacgatatacatacaaaggtcgtgctttgaaaccagattccggccgaggcaaggtttccgatcatgctgatcaggagcactcgtttacgaccatacttgtcggatagtcccccaatatgcggtgccacaagatattggcagaagctttttcatcaacatagatggcatcagtacagatgtattatgagctctattgatagagagaaacgaaagaacggacgagaagatggagcccaagaagccaccaaggagaatgatgtcccattttttatggacgttggtgacgactggttgcccgtctgaccggtatgatactaaagttgcccggaaggaacgaaggccggctaggactgaggagagtattgtatgggtctgatctgccgatgagctgatggcctctctggaggcgtaccattcaatgatccttggaaacaggggaagtgggatgctgggaaagttgtcgagaagattatcagataacgagatgttgacagagcagagcacaaaccgagcgggatactcacgtaaacgccagaagatccaacaccagagatacaaacacaactaggatgaccgagcgagctttcatcttgtgttattcctccagcaagtggatgagtgggtgagtggacgatcggatacacgattatgtacaaggtcaaatcttggggggtgagcagaaggataggaaaagaaataatgcttatgtaagcaacgcctagttatcccacaaagccaacccagccaacaccctccagatggaatcgcacggggaaggagcgcattgttgatgaaataagcgtatcgtagaggaagctgaggtttttctgtatgctataatattgagtccagctggagataagtaattgaaggaattctttgagggtcgacgagtcattccactacatgactgctcacttcggccgataattaactcttcagagctaacttgttctctcttaaccatcaaccatcaccatcatcatcatggcacccaggctcaacgctctccttcgacctcttcttcagtccggctcaagccgggtcgctactggcaggcttgccgcctttgctagacctcttgctcagagaacctacgcctcggacgtctcccgggatcctttcaccggcgagcttacttctcttcctgatatcaacgtacgcctttttttcatcgtattctcttcttccttccctctctcctttcttcttctgcttcacttttgttcttctgtatgatatcctgactagacagttctgtcaattctcccaaataacgtctccaactttatcttgaacgcgttctaatatcgacattcttagcctaaagcacttcaatacaaccagaaccactctcctgggacgcccccatcaagcgacaagcttacattcggtagggtcttcaccgaccacatgcttactatcccttggaacagcgtcaaaggatggggaaagccagtcatcggtccttgttcgtctttttctcctgtcttgatcttcctctccgtctccttatttcgcttgttcggaggagctccgacagaagacattgaaaagtgagtcacattcttacaccttccttgttcacctccagatggtcctcttgccctcgacccttcatcgactgtctttcactatgcattcactctcttcgaggtctgttctcctttccctttgttttaaaaggcgcctacgctcttcgtcttttcaacacgtttatcgtgcaggcgttgaccattttttggtatcactatcgttacagggaatgaaagcatatcggtgcgacgatggaaccgttcgactcttccgacctgataagaacatggcccgaatgaacactgtccgttccttctttcctctacaacatcatctgatatttgttcggtcgtttcgttcgattgctgacgagactttttacctaaacccggctgactcgcgcatacatgcaatctaattggccacgaaccatcagagtgccgctcgaattgctcttcctgtacgttagctctgaagctcaacctaaaactacctatcaatggctgaccctaattctcaatttgtttcaaccaaaacttgtaatgataaaaaaaaaagcaatttgatggagaggctcttactcagttgatcaaacgcctcgtgatgattgactcgaactggatccccggagagcctggtcactcgctttacatccgtatgtctattctatcaagcctccggtcttctactagatgctcgacttacccatatccctctgtgttttcaggacccaccatgatcggcactcaagctggactcggtgttggcccttcatcagatgctcttctattcgtcatctgttcccctgtcggaccctactatcctagtgagcactctcttcttttcttcttttgcgcaccaaaccttctcatgtactgatctcgtgcgcaaacaccctcgacaaatagctggattcaagcccgtttctcttctcgctacctctcactacacccgagcaggtcccggaggaaccggcgcgtacaaacttggagcgaactacgctcccggagtcgtgcctcaggtggaggccgccaagagtgggtacgcccagaacctgtggttgatcggcaaggagcactatttgacggaagttggaaccatggttcgtcggcattcttctttctctcgtcatgcacttctcgtagtagtggtccggttgaacgtggtgtttatttgatattgtccatcggcgactacagaacttgtttgttgtacttgacaagccagatggaacctgggagatcgtcacccctcctctcgaggatatcatccttcctggagtcactcgagactccatcctttcgcttcttcgagatcatgctgccggaacgatcactctccctggcttgccttcaaagatcgaggtgaacgagcgagccatcagtatgggtgagattaagcaggcaaaggcgaacgacacattgagggagatctttggaagtggaaccgccgcacttgtcagccctgtcgacaagtacgttcgcatgttttctcttcatttcttgagtaagatgctcaaaaattatcttgcggtttctgtccttaccctacaacagcatcggatatgagggaaaagacatctctgtcccgactggtcctgagggactgggtcaagttgccaagagtggttcgtccgatctctcttgttttgcctatacttgagagagtgccaatctaactgatctctcctttctcatggacatcgtagtgctcaacaagatcgtcgctatccagatgggcaaggagcctcacaaggactggtccgtcattgcctccgagggtatttaagatggctacaagactatcatgtctttatttcgtgttagatgcttccgaaaagatattcagtcgctattccgatgcgtttcccttctttgcgtttttgtgtcttctcctcttcttcttagatttatgagtccttctctctcgatttttgtttgcttctggagatgatgctagagcgttacgtttgtcaaagatcaagaacacacggtgttttcttgctaatgacgtttccaccggtcacaaccctaactcgatcatccctctgatcggtatactatcaggttgaccttcaatcaaccatcatcaccatcagatcgtcttttattggatagtaccttcagtttgcagctcgatatacggacatttagaccaaccagattcagatggtgctccagaataaacataaacgattggcgagcgctaggtggaacaagtatgtttgatgcttttcttccctgctctattcctcgtgtctcttcatggttcacattcatgagccttgagtatcgactgtcataggtttctgttctgacatatagactgcattccgttctatgtggcggtgcgttttgttgttaaagagcaaggggcaatcctacgaagcaatatcaaggaagaaacctcggagttgatcagcaaaggaatggtggtgatcactcgaacggagaagaggaggatagaagtgaagatgatgaagacacaggagaagacgacgagggcaagggggaagtccatggaggagaggaagaagaagaggaagacgacacagcgttcccaactataagaagtcgtccctccggtaggtcatcacctacacttcattcacgcccactaccatcatcaccgtacgacctacttactagaagcctctccttgatttccttctttcctttgaaacttgttactcgacaacaaagaacggcctaatgcatcttcggataaacctttaccccaatcctcacaatcaacagaaaaatcctttgctcgtcggccactcaagtcgaacgaagatcgatatgcagagccagaagtcgacccatacgcagaagttgagcctacttcagacgatgaacgtttgtcctcttgccttcccctctcccatcatctcttgccgttggttctctgaacgaagtctcagacttttgatactgatccgccttacggttatatgccgtcaatctcgaaacaaatatcgatgataggagaagcacacaacctttcgatattgatgaaacacagactagacttatcgacctcaccactccctgaacttcgagacgactcaacagacccttcaatcgatcatgcgctcaaacttagaatgcaaactcggtccggcgggaaaaaagttctacatctctccagtgcctcctcatcaacgtcaagtcttagaacgaacaaaccggcgggacagggaagggtcgtgcctggagaagacagctgggatcaagcgtcgatggaagaaatgaacagggagagagctaaagctgatgcgatttctggttgagtcttcttctttcttcctcttattctgctgatgtgcgtgttctgccattaagttgtttggttttcttcttcgctcatgatagacgtcaaggcgagacttttgagcgctcagtttcaaagatcaaatgcaccgtcgccatcactcaataaccgaccgacttataaaagcaagattcaaccgccatcatcttcagcaacaaaaaatcgtcaggtggatgacgttgatgattttctgaatagtctatgaatcgatgtggtaatgatgatatgaacatttaatttcaaacgatggtgttctctttcccactgtcgttcagacaaacaagagaaaaacactggggaaggcaatctcttgcctaactaaagatccttgaatcgatccgcgaattcacaaagcttgtgcatcgtagcggtctagtgaaggtccaacccggatcaacccaaacaagagaacatccaggtcaattctgttcagctcaatcatgcgctatctcaatcggcaaatgtctgtaaaggtcaaacctacctctcgagcagaatgcccggcgtcaggaatgatcgtcaactctaattcagggaacgccttcttcaaatcgtacgccgttctaggtgggcagacgacatcgtatcggccgttcacgctacgtatacgaagcgtcgtttattccatttttcaaagcaacatttattaagtagagtgcgcttctgatggttataccacgatggcatggagacacgtacacaaccgtagggatatgtcgaattttactatagtatcacgaacaaacagaacaaatgaacctcaattacttggacatcaagtcttcctgcctgggttaaatcaaagacttactcgatgctctgggactcgagcaactggccgtctcgcataaaacctctgttcacaaagtaactacgtagaaagaaaggaagaacgaaaaagatagtaaacggtatcaaggatcagggatagaaagagcgaatgcacgatgcacggcataaagtgaaagaagatttattctgactggttttcgattcttgcgaacgcatttgcccaatcgtcctctccggccttgttgacatattctggatcgactcgcagcttgcttgtagtcatctgtttatttcctcgcccaacattcgacatcaatcagtctctcttactgcctctatgcctagcatataaagaaagatgatacacacctcccatttagaccaggctcgagcagcttccagcctgactgcttcatcatctgaattcagtcgagagtgataggccttcatcatgtcgcctctttcttcctcagggataggagctaaatactcgtcccaggcttcgggaaaaagatgagacgttccattttggtagaagaattcgagttcacttcgtcgaaggcaaaagattcctcgcaggatcaacgccttcacgacctttggatgagtttgggcataagccaaggacaaggtcgatccccatgatccaccaaagacgacccaggattcctattgaaacaacagaagaagaagaaaagaagtggagccaggtcagtcaagatatttaccgataccatatggaaagatagagagaagactacgaacgatcttgagttccttcctgagcttctcgatatcttccacaaggtcccatgtcgtgttgtcctccaagcaggctgtaggagttgattttccagctcctctttgatcgactgagcaggaagataacaaagcccggtccaattgatattgccaagagatgagcacaggaccaagatgacaggttttgcgatgatagacgtacgaagaacgatccgatacacttcggggtcaaagtattccttgtcggtatcggcgactccgcctcccggtccgcctagagcagaccatttgatgtgtagagaatctcagagttgacatctcttcatcagacgactgaaagaagtacataccgtgtaggaagatgaccggctaagatcatagggaaagatccatcagtccgtcttgtcgtacgatgtctctatgatcagaattcagccaaagatctacacacctttccatctttctttccactctcctcataactgtatggttccaaaggaacaaaccgatgtacatatgatcgttttgtcaacaatactcttctaatgtatcagaactaatggtacactgtgcggctaggatagatttcggccaactccggtcgaacataacggagtttgcaaggaaactggataagatagactgactagagagagtggacgtcggatactttgaggagaccagaattgaagctcgcttgagaagggtacatggctgaagatgaaggcttagacagtcggtcggagggttctaaaagaagatgattgataggcaaagagaaacggaatcgtccagatgggctttcttttctgtgtccaaatcacgtgacccaagcttcctcactctcattctctcacagataagaaagatgttccatctcattctataaatgccttacgcccgatatatgtaccatgtccgagagacagcatggctatgttttacatctaggaagtaatctcagagttcgtcccttggacgggcaacaacagaacgttggacgtccgatcgatcgatatcagaccatctatattgatccgatgaatgtggtagctctcagcgctctgtccgactagatgattttaaaagtaaagatatatactcacaccggccaagtcagctgaagagtatcgggctcgagactaggataattctcttttatggtggagattaacaagtcgtagagcaccttggtttttcatgaagagaagaattgatcatatcagtcatcgaggcgcctatgaaggctcttcaatcaacatgcaggctcacttgatacccttccttgttgaaatgtaacccgtctctcaagacttccttcgtcctttccagatctcctccaagatagttctcgatacctcggaaaatatctactacgggcacgtttgtatcctgtcccaccttcaacactgcatccgcaaacgccttggtgttctcctgagatcgatccagagctcggggagccatgagaccggctcgagtaggcccatgaattggaggaggagtgatcaggacgagcttggtctgcggcgagcgagtttgaacagatgtaatgattttatcgaggttgtttgaaaaatcggagatggacaactggagtgcgtgaagccgtgcaagaggtgggacaaagatgggaaccaacaatttaaaatctcgaagatatatacagatggaggtcggatcagaactgggcttacatgttgtgcagatgggggtaagcaagcatcattcgcaccgaaccagacggtcataatctcgatcttgggagagccatttgtaagttgctcctctcggggtaaaatctggtaggatcatcaccaaacatggtatcagtctactatgtcgaaatacaagagtctaaaatttatacaagatctgttcttgtatcaagacttgcctggtcaaggatagggagtgccctgaagatattacaatgaccgacgatgagcctgtgtatgttcttggaagaaaggagcaaggactggccaaataagatcgcgactaaccattctgtgttgtatcctccgtatcctctgttgatgacatcgagcttacgacagtaagagtcttttagaatgagggcgtgagtatctatcacagtgctttgctaggcaatgaaacagaaggcgatgagtgtagatgaggacaaacaggcgagcctttggcataacgagccttcgtcccaggtctgttgtgaatatcacaagaacgaaaaattgcatcagtaaccgttgggagcaacctgaaacatgtccatcacactaacctgagtgagagagtctccgaaagcaacgaacaagttttgaggggatacagacatcgttggtcggatggagaacagtaacaattcccagaaggtgattaaatgtgcggtttatctaatcttagctaatctttcccatacctcctctcccctccgtgggatatataagcgaggatgaggaggccgtcgtttttcttctttcgccactatcttcatttcttcaagtactcgcattcataaaccacgtccatatatacaatgacatcatccagaaccatcgtcaaagctgttagagcaatcgctcaagcagaaggagccggagcagtcgtcaagcgaagcataggcagttcttcgttgaggtctctgtccccgttccttatgctagacgaatttgctgttggaaaggatgcaggctttccagatgtatgtatatctcctctattttatttgacagtcgctcttattttatactgactagtgtcgttttgcgcttggccgatgatttgtacagcacccccatcgaggtagctagctttacatgttttctgattcgtgagatcggcaactgatgagagtgcttgtgctacattaggtatggcgacagtgacctatctccttgaaggtaaaacagttgctttccgtcgcatcctatttccctcatcccggaccgaatctggtctcacacctcgcttactttggtgatctcaggtcaatttgagcatgaagattttgcgggtcacagaggaaagctcggcccaggagatcttcaatggatgatcggtatggcattctcatcgttgtatctttgtattgtaccgttgtatttatcactatcttgccttgtttttccttcatcagctggccgaggaagtaagctgtctcttcttcaaatcattttcgaacttatgactcattgacatgctctttcttctattgttactcgatcccagttgtccacgctgagatgcccgttgtaacaaaaggcggagtgactcctagagggcttcaattgtggatcgacttgccagaggcagaaaaggactgtgaacctgactatcaagaacaatctgcgcaggagtaggtcccaaatctttcatgtttgttcatctgctttatatggagagttctgagtgtttatttgggtgaatcaatttacagaatctcgaccgcgcacccttctgaggatgtagagatccgggtgatcagcggagaatcccatggtgtcaatgtgagctcttgcagacttcttctcttctcgttagatgatcttattcaatccaaatgggtgtgtcggttattgtcattagggcaaagttcgacacaaaggaggctgccactactacgatattcgtctgaaatcgcctacatcctcggtgttccagaccatccctcagggatggaccgcctttgtacgttccagatcgttgctaagagaacttacttgcatctctaattgacctctatataattcattacagatttacacattgactggctcgctccagatcggagaccagactcatcctgcatcaacaacactggttttatcatctcaagtcgggcaagacggagtggagatcaaggctgctcaagctgagggcgagacccggtttgtgctgattgccggagagcccctaaaccagccgtgagcgcgtttgcttcaatgagcgtgttgttgatcctcaacagagattgttcttacgtctgttctctttttatctatttctgcgaacagtgttgtccagcatggtccttttgttgtaacaagtagggccaaagtgatcgaagctttgtgagtcttcctaattttccatctcacatatccataccaggaggaagctaagatgagctctgcgtctccttctcaaaccatcctcgacagccgagattatcaattcttccaaaacggattcgagagagccaaaggatgggctagtgagatcggaggacggatgggctgaaacggatcctacacctgtactcaaagattgaacttatgaacgtttgaagactggttgttaagatgtatgatgaatatatatatttgattataccactccgtacttatcaaataagtcttgccccgcattcccactcgcttcgcaccccgtccaatccgacgattcgcaaacatcctcatctccatctacattcagaccgttccttctgtatcctcccttccaaccaacacgtctctgcctatatgtcgccttcacatgatgaacacgaaaaggaaaagatccatagagttgaatacccagctattgcttctcaggaagatatgaaagctcacagactgcctctagcttaccgagatctctgctcaaagtacgtctgaaatctctcaatgtcttttagagttctcatcctgcctcttccaagcaggagcttgcttccgatccgagagagacggagagaagggacgtttagaattcatgttgatctggattgaacataccaacttcctcttgtgcctatcatgcttatcctatcggcatcgacagacacttgatcacgttgaaccaatgtcgaaaggccgagtacttcctaccttggaagtgccatgcagaaaagtacgcccgtccatctatgtcatctctttattgttctccctcttgatatgacatagtctaatctctcaacttctgtactttcatccatcgtagggaggactgggaaatgtaagtgctcacaggcgaacatccgatcctgatacttttggagaatcggaaggacgggtctctcgtcttctccttcatatggggtctgactgatccgttcgaactttgaatgatttggcatcgaatgactcgttaatcgcttcgatcaactttggatcgaatgttcactttacaaaatttgactgaatcaatagctgtcaatacaaagagtgagagcgattgtcccacttcaaaatcaagctactgtttgcatgttttgacatcatattcctctctttctttcggttctttacatcactcttctcctggtgtttttaaaaaaaaattcttcataaaagcttcctccgaagaatgcgtaaggcgacccgacttcgtgccgaagctaaggaagatggatcgggtccgatcccactcttggacaccgtgagaacgctgaatgccgtcaaagctgccgaacgaaaccaagaggattagagaccgttgctctgagccctaaatcaaaggacaaaccccggagaaagcatggatgtgtgtactggcgcgttcgctttaagataaggctggtcggaggagtggggattttaagatagtcgataggttgtatgtttacatgttgtcataaatctctcttgagaacacactcttctctttccatctctcttctgctttcactcttcgttctggattacaacgcgacgagacatggataacgaccttccctttacatacactctcgccaaataaaacctagcatcacgctgaaacatgacagtcttttgactatccgctttctactgagaaacttccatgggcgactctgtagatgatggtgtcgagattggaaatgatgatgctgacgacaatggtaccggtggtggcggcgaagttgatgtgggattaattgttgatgatgatgggattgaggatggtaaagttgtcgaagaagttgttgagggttttgtaggtataagaaggccccgctgtttgatcatattggcgatcgcttcgacctgtaccagaaattgaccgaatcttgtcagaacaatcaagtaggctgaaaaacaaatcgtatcgtactttctgggtaacaacttcgatgttggtatcccaccgctctgtgtaggaaacaccttgaaagtcaagaggtatcttctcgacatcgcccaagccacccgccgttgtttgagctacggtgtccgtatcctgatgagtcgattgaacagcagtaatgatcacacaaatgagtcaggaaaaggggaccattgagcgaatcaagtacagaagacggattatattggatcgagcccaaaccgaaaaatgaacacatactcggccttcaaaccagatcagctcatcgatttgactgtagagtttggccgaggaagatcagatatcagaggtgctcaaagaagaagaagaaaacattagacacgaaaagaacaaggaagcgcactcgatccagcctcttaaccgctcctgctcgatcatctttcgggccaacaactcggctcctgctggtgccagatccagtaagacccccaaccccgagaaagagatgttaacgtaaagctgtaccagagacacgcaggacgagacgcccaaatagaacatgagtttaggcccggttatctcttcaggaagtctttgaaagacgctcaccttggaacagctcaacaaattatgctccagcaccgccctatccagcaccgtcgtcggtcccattcgcttactcacaccttccattggttcgtcctgatcctcctcccaatcgaccatcattttcacggctggcagcttcgcgagttgatgtacctgaagccccttttcaaactccaccacctcggccgggcgaatgatgttctcgaggaacatcttggagagtacagtgtaggtcggaagggaagccgttcggtcgtcccgacagagagaagccaaggtccgttgacgagctggtccggcgggtgcaaggatagaacatgtcactgcggccgacctattgacacggtcagaagtaacggagagaacctgtgagcttgacatgaatgatgtcactaagacgagagaagcgaagcgtacagtgtttggagccgatcatccgcatctaaatccgggacccaacttaattcgtggtatcgaagagctgcttcattgaactttctactaaaatccaaaagacgtgcctgtatgtttacattgagatcttgatgagtaacgatataaacaatgtgcttggagggcttctacgatacggacgaaaaaatactcacatgacaaagcttgtaggccagtcgggtaggttgatcgtcacaatcgtgaatgaacattgatgccttgttgaggtctgtccgtgcaaaagagaccaaaaaaaagtttctgtttgaataatcgaaccgactttggtatgtaagcgaaacccgatacttacatgtctgagcttgcccattgtcgccgacctatagaaaatccgttggagggtaagcttcctcacacgatctaagtcgccacctcatttcaaaggtttcctgaggtgatctgacaaacctcgatgagcaatcggacaatatgaactaaatgagccagcttttctgagtccgacatcttcctaaagtaccagatcgatataacaaaacagatatcaacgtctgatccacaaagtatatccagcagaacagaagagatgcaaggccgcgaacgcacatgttactgttgtcgagcggaatggcaatcaacacctgggctgcctccaaccattcttcttcaccttccagaatggtcgccagttgatttctcagcaatgaggtcttgataaatatagtcaaagacggggcgcatatagccatcaagatgtgctcttcttctttagttttgtgcgagtgccaaaatagaacgaacctgctcctcgtagtttccgggattacctccaactttttctaaaattccctgcagtacttccttgacaaggtcctcgtttctatcctcgcctggtctaccgactttctcattcccaagagcgtgaacgacctcggaatagacctgtctgcctaccaccaaggagaccgacgaatcgtttaccagatgatccaccagatcgatcaaacccggagatggatcactgtataagtctggcagtatttccaagtaggcaggaagcctatccttctgtgggagatcagagatctctataagctgagtcgagagagacatgatcccgatatggggagctagagatggtgattattgagatcgtacgcgtgtgaatcgtttgtacatgagtttaatgtttcttacgtgttcccctcgtaaatcacaaccctaacagcttcggctatctcctggatcggagtttgcggtaattcacgtgataagaagtgtcacgtgcgtgacgctcgatcctcttgccgtataaatttcgacaacttctctatccaacattgttcccaaccagcaacatgaactcctctctcttgccttctctcttgtatctttactaacattgtgagtattcaaccgtcgttcttctcgtctctcaaagttttcctctaccccttccctttatgtgatgattggaggcatttggctagatcatcagcccttggaacgtcttgttccttgggttggtatgctgaaaaattccgctaccttaaaaacacctctgaccctacctctacctaccttccttctcgaacttgtcctcctaaatttttgatacattaactgacttgctcttcctgtttcccccccgaatgtgattcagattgatggcgttgtattttatgaattgttatctatattccttcgttctctgagcaaaattaaaccaagtgacctaggttagccaaatataaatacagacatgacaaatttcgactgtccacatccttgatagtccttgatggccttcattacaacgatattatcaaagcactgagattcaatatccctaagtcatggtgacagaaagcagctgattcatgtcattggcggataaacagattgcgaccatagtacgtggtgatattcagattaggacaaagaggcaaaatagaagtactgtagcgagaaataatcgagactgtttcgaaggaataaaggatcaagatagaagtaatagatatatgaaagaaagattcctacgaaatgaatgtcaactcgtcgaacaatttaccctcaatcacgctctctccttcgactccaggaacagtaaggtgaagcttcgcgtcttggtagtgctgataaatataaggcttggtcgaagcaacaacttgaacgaccttcttgatcctgtttaatgaaatacatccagccagccggttgatcagtcagtcatccgtgttgtcttttattcgcgagagtaaaagagagaggaaagaagaaaaaagaacatacaagtagggaatctcggccaacacgtcaaccttttcgatcaaccctttctctccgacctctccacttccagtctcattctcaacccaagccttaacagcgccctcgttattcaaagcctctccggcccactcaaacttgacgcgcgagggaggggagtacccggtaaacgaatcctgaacaagatccatgtgagttgccatcgaggttgtcacagaagatttgtcgtcttcgggttgagggttgtgtagctgggaagtcaccagagagagtttgctgaagaacaaaaaatcgaccttcggggttagatactgctctcgtcaacaggcaggttcgcacagaaagcggatgacttacttgtcgtagacgattcctccaaggttgactttgttccggccagtcccctttccgttgacgccatgctcgtcctgcaagtccgagttgttttaagtgaagataaaagtcaatcagtgcgttcgaatactgacagatgcttgaacaaatatttgaacagacgttggtctcgaactccatcatgatcgctcgcactcgtttctccgctccaggattagaagtaaagaaggcaaagttccaccttcgggcaatcttgttaggctgcataccctgaatggcatggatgaaggtcgcctctccgtcagtagagatggcctttttgtcaatgatgatatgacctgtcgaggtctgcacaggatggaaccggctatacacaagcaggatgaacaaaagtggaccaccttttaggatctcccaatatctcggctgagaagaacataacgtcttcagaacggcaaaaatgtatagacttactgaacagcaaatccatccggcttattcttgtcggttccaaagtagctcataccaccctgagcgccctctccaatcttgaagccaggaacttcttgaggtcggacaaaggtgaccatgatctggagattggcagcaaggttggcattgatgacgtaagtctcctccgtcgaggaagttccagtgtgggtgatcgtctggtgcaattcggcacccaaaagataaacgttggcaactgtcaacgacgtgttcgaaatacatccttgggatgtatttaggaaaaatagtgacttaccacctgatccgacttcatacctttaccggcaggcttgaagtttgtcaaatttgtcgacttccagaaagccttcttggtctttgggtcgaagtgcttgaacgtaaactggacagtggcgggaacaaggaagatactaagcaaaaattgtagaagggtcatattagcaggctggaatgaaaaatgcaacagtatttgaagcgacttacccggtgattgaccagataatctgaaacatacaccaacttccatcagctaagatagcataccaactctgagtttcggtcatgaaccccttagtggtatcgcacgcccaggtggtatcctgttcagtaagcggcccgaaaagcggcccggaagtaggaggagacttgaagttgggtgtgtcggccgaactggagaagagatgtaggtcatcacacgacaaaggatcccatccatataagtcaatgtcactcggaaagacaggagcgaagtacaaccatcaagatgatagatgatggcagtgcgggttttgcatcgcaagaatgctcatcttcttccaacttctttctccatactagacaaccaaacactctctcctaatagggactacagtcatcttctcttcaatttccctagtatcgacagaaagagcggcatcttgatcgtcgatatatgatattcttcgcactagccgtcgcttgtttacttaaatctaactagggagaatttgttgaattgatttgaaactcacacggcgggagaagaagacaataaccaggacatttttgtgaggtctatggagagggaataaaacgagttcagattcaaacgtagattatgatgatggttgaaaagacgaaagatcgaaatgaggtagacttgcctttggccgctagagaggaaccctaaccaatgatggccgatacgtggtcctcttggacctgagtatctttagatcacaagccaccaagatcttgtcgctcatacgtttagtccgccctgattatgtcaggaacgtaacataggttacatcttatttgtaacctgtgacctatagactgtccactttcgctattcccctgtcttctagttcggcggatcatatcttcagcgcattctatacagcgttcataggatctgagaaccggatataaggcgagagttctcggccagttgtagacaatcaacctcaagcctggtttcttcgtcactttctgcttctatctttcatcgtcctcctatccttgttctccattgatcatatcaatctcttcaacctcgtacactcacttcttttctactcattctcaacaaatcagaacacggatacaaaagtaaaaaaaggattgggagagatgaagaacacatagtacactatacaacgcaccaaaatatatatttacagcgcagtcgaaataccaactttgcataacaaaaagtcgaaggctggctgtatggcctgtacccaccatgagccatctggtgctctactctcccgaaattcctgatcgagttgtaaaagaaacaacaacaaggacaacggtcagatgaaagaaacatatgtttagagaaagatgtctccgtgtgaatcagaaagcctgctgcggagactaaacatcgaaagatacgaaccctttcagcatacccgtggattccatcggttgcaattgcccatctggtctctaccttcaattctagcaatttgtcccgaagaaactcgttttgacaaggcggaactaatgtgtctttgtctccccaggacaggaaagtaggagggtatgcggcggtggcaagataataagccgacagattgatccggctattatcttctgatccgtcagtcggcgcggcgatgagagaatggagattgttgagctgggctgtgattcccaagaatgctcgtcggggtgttatcgctttagtctcactattcgagaggaaagtagacgagatgtttataagtcaccgggttcgtaaatatcatggttgcacagaacaactcgatcatcgactgtaatatcacctacccaatgataggaacacttgtagtgacttctccatgataagacatttccgcaaatgctacttcttgaggcttgagctcccgcgcttgctcccaagccgcggcgggtccaggagacaactcactatagatggccggtaaaatggaatgaatgaatcgtgaatgaatatagatagtatataaagacaatcttttctactaactcaagcttggacggcccgtagaacaatatcatacatctcggtggcgagagacctagagacggaagtttcgatatctgaggtgatggtcaaatccggcttggccgtcttcaacacaaacatgactgagtagattatacacaggaagactaaccatacaagacaccaagtgcgctccggcactatacccgacgatagagactttgttgagatccagagtgcgatattggctttgttcgagctgctgattcaatgcaattgataatcgtccatctgtgacgaatctgtacccatccagacagtcttgcacgcaatcgacgaccttcactctgaataggcgcgagatgacaaatgacaaatagagggtatgagaaggagactagtttgacaagtaaacgaaagatgaataccctcttcaccgggataacttgaacatactgaggggcaagtctgtattccaaggaaactactgcaattcctgcccttagtagataattcaccgaatcaggctgaatatcggtcgaggctccgatgacccaactcccaccatggacgaggatggctgagcgagatagacacgcgagaaggatatcaagtaagatgttagagaaccgatctcagaatacgatttagctggccagacaagaaaaaaagcatgttgcataattcgagtagtcatatactaaccaacagggcaaggctcatcaaggactgagttcttggtcgactcaggaagatacacatccatatgacaccctccattctgaacgttggcaagaggcttgaagagaacacgattgagatcaggcaggcctggcatggctgtgagtattccagattgattgagtatttgaggataactgctagacaaggactattgggaagatccttgactgaatacctctccgtagtttggctccgaagtgaatcgggtccggttaatagttaggcccggatatgagtaatgtcaggatgatggaatcttttattgaattgccttttcttcttcaacccacatgtaggatatatatcatcaatgtggttcagcctctcattttaattccgttgtaccatacattcttctgctgcttttatgatgtccggcgcaggatactgtgaggcaacctctacggagcaaggccaagaattgaccggatgtttgttatagaagtcacgtgttcaggaccgcctcagcacgtgaccattacacaggatcgtcccgttgttttcgtctactcgaggacagcaacaaacgtgacccgtcacgcccgctctcgaaaaaatctgtataaattctgctgcttgaacgagatccagtttctttttccccacttacaacagcccgaggctaaccaaagatagcgaaccgcaacccctatgttcgattcatcgatggagcctcggtgagaaggccgccaattatagtgcgtagaggaggtcttaaaatatctttctcctgagtcttaaggagaaagttttttcgctggcattccgatagctccaccgtagttctgtttgattctattgaatggatgttttgacaaagagagtccgttctgttgatgcaagagatcatcttgacaaaatctgatgatctcaatcggctgaatcacaaaggcaaactcgatccaaaatatctaagaagtatgatgtaattcgtgaaaaaaaaaagaaaaaagctcagagcaaaaagacgaagacaaggaagagaatattctacaaagcaagtaatgttgatacagattacaatggcgttcctccacaacaacgcctgaatcgaaatcttcacctttcccacctccctatgtataatggcccaaataagaaaataaacaggcaaagaacaagaagatttggtaaaaactctgcaaattcatgattatttatttataaatgataagatatcgtgatagaagcaagcatagagaacggccgcgatagatgaacgacttgaagacaagcagtcggcatcatgtccatgattccggaccgaaccgctgtccgtcctttaaaattttatacgcagggtgggacttgtcatagactgtgttgccccaccatgtttgtatcgtgttctcgcctaccttcccatctttagggaaactcagagcaaaaaaaatgacaatggccgctagagcatagccagcggagagagcggcgctacattcaagtgagaaaaaaagaagaaagaaagaaaaacaatttagtcaggttcaacttgcaatcaatagtccgaattgatgagaacatgttggtcgcccttacgataggatataatctacagagtcgttagaagaaagaaagacgattagatacgcctgctccacatcaatcgtttgacaaagaaacttactataacgactccaccaagcaaagtagtatttacgcgcgactaaaattgatgaaaaacgacggttatagtatcaaatgacatgatcgatgttggatcaacaagagagaaagacgagaagaacggcgcaccatattgaaataagaagttggtatagcagaaggagctaacgctgtataaagagtcatttttgagaaatgccgtgtcagtaaattcaatttcaggtatgatacgagaaacaaagaagcatacttgatcggcaggtacggtggaacgagctaagaagaaggacggccacaacgacaaacatcagaattgtgatccttctctcgtgatgatattagatataagtgtacataacacatacagcggttgtcgaaaacacgaccggccaattgacaaactgagaacgaaggttatgtttccatttggactcagtgaaaccagttcaagcagaaggattgatacatataacacttcactcaccttgtaccatttgttaggatttctcttagctagatagtagaaaggaaagggagccagcgcccctatatgaaatgaaggttgaagtcaaggtttagcgaccatacagtctgtgcaatatctattctaaacctgtttaagtgtagaacgatacacaccgacaaagaatccccatatgatagggtgatataccttcccgtagctgaactgacgggctggtccaacgagtcccctgtagaaacatcgtatgtttcatcagtgataataacgatcgagtcatctagaatgatcaggaagcaaatatgagaaaagaaggacaacgaaccatatcacagaacttgtaccaaacacttcggatggcagacatgaaaactgggctaaatttacaagaagggtcaacctttagagtcttatctagttatatatgtggagacagatattaccggtacttgacgttcgagacttacggtgactcgatgtacacactgaagatttccaaaacatcaggtcgaatcaggaattgtcatcaacgagctacgcaagcccctgaataaaccatcaaccaatctgccactcactgccaggtacgttcgtaaatagccattggccaacgcccacttggactagcgccgccaagatggtagcatggatctgagcgaagaacatcatgcgtggtggaactttctgtgaaagatatcatgaacgacgggcgattgtttaacagacgtgcttataggactcaaagtacgacacttctcagcaaagtcttgatagcgagcagaacgtaccatatagtgacccatcttcatatcgctaacaaaatttattccttgggataagctaactgcagacgtgttcacgttcgggatcacagagtgttcgtccaaaacatcagtcaaaaactaagggcttttcagttcaacgacaggtctagtacgactcactgtaggaataagttttgaagatcatcatcgagattggacgcccaggagcgatatagccgctggttcaacccaacaagaattcaaaatcagcatcatgattgctgttataagcatcaaaatcacgatgcgaggggcctgtaacttacatgatcagttccgaaatactaccgtatgatcatcatggtaaacgaaagagaatatgacgaattcgtatctggtaagtttacaaccacattgcacaaccgaagtaaactatgcttacacgttcaacgcaacctgttgatttgtgatcgcctgaacgatgccgactggcaaagcgaatacggccactataacaagcgccaggattaaggtttcaaagggcatatgcctgcgatgagattttaggtatacccgcgagcagacgaaatggttgtcacatcagtcactatattgcaagagcagtttttgttagaaggagaaaaccgagtcagcgactcacgtctcccaaccaaggattgcaccacaggctatgaattcagcaacaaacaagtcaaatgtatacatcaacacttgaccacaatctgcaacgatcggcaaatagtactcaccaagactgaagttgataaccagcgtggcaagataccaaagatctgtggtcatgatgaacatgtcagcgctaatgagttagtgtttctttctatacaaagttgatgcattcacgtacgaggaacttctttgtagcgtctcatgagctatgtcggttcaaaagacgcacgttaagactagatctttctcattttgagagggaaaaaagtgaaatcgacgaacccgagcgtggatatccgtttcatccgctaatgaacgacaagcttgttcacgtatctatttgaaaaggtcaatgtaactcgtcagatactgaattgtatatcggaacacccaaattcgacatgactgactgtttttcgataataaagactgatacacagcataaaacacacacagcgttagacagatatatctaaatactgagtctcggtgataatgattgaattctgaacgggcgtacaaggtatgaaccaacgttgccgtcaagcctgcaaaattgacagctgtttgaaaccagccaagcatcatcaatacgctgattattaatgatcaaaagagagggttgagtcgagcaagcgcaatgctttaccataggccatcgtgaatgtgattcttcaagattgtagagaagggagcgaaatacaattagaatggcttttcatctgaaattagtccaaacaataagctcgaactaacggaaggtagatctgagagtattcgtgatatgcactaagaaacaaaagatgttccgatatagttgacatagagtgatcaaccgacgtctctgcatttcacaaatagatgatcctgtcctcacgtttcgttgaatccagcatctgtagtcagaatccgagaaatgttgtaacgagttgctgtgttgtcatactattagttgaaagcggagaccgagtgtttggtttgaagccatcaatctcggctttcgtatctcgatacgagagaaatataaagaaacaaggtacgaacagatcctgagcccaccatgggtagataccaggcatcccaggctttttataccgatcgagcaaataacattagttttatcgaagatcaatccatcagtatggttggaaagcacaaaatatctgtgggaagtattcaccgcccgtatagtataaagccgggtaaaggatgcacagtatagacccaaactaaaccccaaagatgtagaaaattgctcgagagtataagctacgtctgctcactagatatcaagtactgagattaaggacgtaccccaaagaccatatttgcagccgcccaccaaggcattgcgagaggatttccaatcgtcgagatgatacccccttattataatcgcatacaaagaaaagcagagttggagcaaggttttctctctctctctcatatatagacgcgagagaagatctgactgacagtcgaacgttagaagacttagtccgagtccataatcaactgtagagaaaatcacatgaaccgcctcactcagtcaagaccttttgacgaatatatgaaagaagaaagactaagtgtttctcacatccaaatatctgatcgaccacggtattgtctttcacactaagaacacgcaattcacgataaagaatcagcttcaacatgagaaagcacagactacgacgaagacaaaatagagaacaatctgagtgcagacatacatccatgtcacccaatcaaatgtactcagcgcggtgaaaatatatgatggactggtaggaagaaaaacaaacgatccggccgtatacagatcagattcgaggttcaagaacaaagacgagaaacaccgaatgacagcaacttacaaccatgaccaaagaaacatcaaaaacatcgctctaaaaaagaactacaagatgaacagaggcagacgcgtcagtcgatcttttcatcgagctcaggactcgagcgataaaagagaactcaccttgtctcttgccagacttccggaatatgagcctcctccagagctcatactgtgcaatgtgttgagcaaagctgtgttgaccaaagccgccggccatatcatcgcagccggataaacaagaaatcgacgaagaagacctcccatcgaaaagccgatgagttgggtagaaagaacgagcatgatttggtaggcaaacgaccaaacttgattgtaaaagtatcgttgaacggtgatgatattcgttgcataggccgtctgttgagcaactccagccatcacggtgattagagtgtgttctttgatgttaaatggtccagggtttaagaaagaattgtttgacgggataagtttggccattaataggccgagaggataactgatgagctgaatgacgagcgccgagacagtgaccgttggatatctaaagtagaaaaactatcgatgaggaggccgatatagagaaggacagcgttcaactgataagtagcttgcatagagacttttgaacacagaacgtgaaaagacatacctgattgatgcctgaaagaacgacacatcccacacttcctaacaaccaaactcttattgtgttcactggcatcgtcgggtcatccgtgttgctcaccgccgctctcacttcagcataaaccgaatcttcttcaccctcaccgaacccgtaatcggtatatacatcatctccactaaaattcgataccccttcgccttctctacgtgatgaagacgaggaccaattcaaaccagaaggcagagttgaaagcgagtattcaggattgactccgtcagagttggcatctgcagaggtctgccaacggttgagagctgagcgttcccggagaaggatcgagtcgtcatagtttggatccaacagatgcgatttatgaatctaagtcaactcaatacagaccaagaccatgcccatgaacacatattcatagaaaagcacatcagcaccaaacaactgatcgttgtgtccaaactcaaagaaggaggaatgacagacctctcgaagctcatccaagcttaagtttgactgccttatccaacttccgttcagccctttatcactctcaccttccctcccttctccttcctcttcttcaagcaagtcttgctcttccatataagctaaatattcattccggatggatgacgatgtctcgaaggagagtgatgtttgcgttcctaccgactgagtcacgtttcaatcaccaaaaattcagtcgatcccagcagaaaagataccaagaagaagagcagatgatagaaacgtaagagaggaaaaaggtatcagtcgcgtgcagccacagctgatgggaggctccagattggaccggtccaaactaactctttcgcctgacatgaccgtcctggaggctaaccgctgagccaacatgatttatcgtttcccccttcgggcctgattgattcaggtggagagtagcagcagaagcaggaaaaggtatgaggaggggcccgtctgagaggttgaagagtcgtgcacgggattgagcgtatgatctgctgccgtgcttgataagatgcttaggagtgagagagcagagtagtcacggcccgatagattgagacgacctagttttatgttaaccttgaacctcttgagcttgcaaggtttaaaaggaagtctgagaaggagctgtagggtatgtaggtaggatgatggccaagagcgggttctcgttcaattcacatgtggctcaaggccgccgtcgtcgtcgctttcctccgatcggtctctataaatgtggtaaggcaaaatcaagattgacaacagaaaaattaaagatcagatatgactctcatggttttgttcatacatgggcagcgttctcagagcatacttattgcttatcaggtcgatcgttgtatgacggccatccgaccaagcctgattaagcgaattgattagagatattacgggacagcaacgtcggatattagaagaacactcttgacccagaccggattaatcaatcttatcgtctggcacaaattttatactaatctcgtctttcgacacatagaatctgagcgaaatcaatctatatcacacacagataacctaaaacagcagagatcaacacaaagtagatgagttcaagagatggcaattaatatgtaaagagatgtagagagtatagagaaaaacttggtctaagaagtcatcagcgatgatgcgcggccacaacgagaatacaacgtatattttgggcgaggattcaacctagctcagatgctcaacaagtataaaactatggacctaatacagaattcagatcaaacaaaaagcactagataaactgaacttaagagacactatcacgttcatcattcaagaccgtctgacgatgtattgtctctccgggcacggacgataccggtttcctgatgagcccaaaatgctttcgctaagcatagcaaactgataaaataccatcgcacgtaatacatggcagtgtgttagtcatctgagttcatccgtcgatatacaacatgacacgcctgcgcctgcgcactcacaagcaaggagggatgtacgacttgtactgtatatgtcctaacatctcggcctccatgctgttaatttcttccagcgaccaaggcgtccggcgaacgaaagcgatgttggcgtaacatgcgtccgatatcatcttggtagccaataggaaagaggaaaagatcactcggagcgccgtgtcttgaatgcctgtgaattcagagagagagaatcgtatggcgtgggtgagcgaaagagagtgttgaagaaatcaagaaaatgaaagttcgattgagaggcttacgtcctgtagtggtgatgagcggatgaatcgccttgagtagctcaatgtaccaaatcgtacagatcaacacgacgagctgtatccaaacggatcgatcgtcgaactcttttaatcgatgctctgatctgtcttcaaatactgcgaaggaagcgaggtacgaaccggatgtagggtcattgacgtccagtgaaacagatgtcttgccaacgcttccctttccgccctgatctggtctgcaggcatcgacctgctcgtcagacgcggcagcaggatttgtatcatgtctatcgccagttctaatgaaaaggaggcaaacaacgatggtcaagacctgcgcactggaaatctagctcttcacacatgactaaccacagtccattagggttgcttcagtttccatgagctcatacatctgggccttattgttaagatccaacgggattcgactgtggatttgactaggaccggaaaccgctgtcgattcagacaactcgtccggatctgttctctgaaagttttcatcccacgaatcggtctcttcagctgacagcaaggacgatggtgatcttgaggaacaagacgtcgtcgttgaagatagttctgacgatagagatgacggccctgatgacagagatgatagccctgaaaagggaccatgggcatgcttttcaactggaacgatgttgcctgtcgggacagcacacagacaccagcctggctctaccgaggacgacaggtcaacgaagccctcgtcatctgtgttcagataggctgaagttgaagtttgggcaagcagaagagagtcaatcatttgaggaaaaaaaggatgactgaaaggaggatctgagaaacgatatcctgatgaggtggcggtaagaaagaagaattcaagaacaagagaacgttttcccccatatcttccatgtagttgccactcatttaggttggaaaaaggttaatccgacggatgaagggacaaggagaaaactgaatgggaagaacgcacggttcgcttgattgacggaaagcatacgaagcctaaaaaaagatgtcagagagttttccgatcaatagcgcatccaggttccgatcgactccatcagtctctcaagacgggccgaggctgccttgttcttaattgttttatttgtgaaggatggaggataaagagtcggtggtcaagataaattggccgaacagggacaggctgaaatatggaccagaggaaggtcagagggccttggtttgtatttgcgatgtaagccttgtacgtcacatccgactcaaccgaacataggcaggcttgaatcagagcgtcttgttaatggtaatgctcgagaggacagaatggcggagggcaggaagatggaacaagatcgatagagcaaagaggcatgatcatcaaggcatagaatagatacatcaagtcttaaacctcatcagggtacagctatgtttcccaaacaaccacccatcggattgtagaacaaagatcagtcatgaggaacacaggaagggagtgaagattggggcaagagaacacataccataagctcaggtcggaccttatcgtcgaactcttctggggtgagtaatccgagcgacacagtagcttccttcagggtcgttccctccttgtgagcctgttggttaccgagtgagcaaagtgagagaagcaaagagaaatcagtacatctttcacatgagtcgacatggggttgaccaaaaccgcaccttcttggcacacttagcgacgttgtcatatccgagatggctgttgagaatggtggccaacataagggactcgttcaagagagtggagattcgcttctcgttcgcctcgattccaaccacacagttcttggtgaacgatcgggctccgtcagagagcaatcggatagattgcaggaggtttttgatcaaaacaggtttgaaaacgttcaactcgaattgcccgtacgatccggcgaccgagatggtcgtgttgtttcccatcacctgggcggccaccatcgtcaaagcctcgcactgcgtcgggttcacctttccgggcatgatcgacgacccaggctcgttctcaggcaacgagagctcaccaagaccacatcggggaccagaggcaaggtatcggatgtcgttcgcaatcttcatgaatgaaacggcgatcgtgttgagcgcgccagaagcctcgacgatggcatcgtgggcggcgagagcctcaaacttgttgggtgcggtgtggaaggtgtatccggtgatggccgaaatctcagcagcgaccttgacatcgaacccaaccttggtgttcaaaccggttcccacagcagtaccaccctgggccaacaagctcaatcgaggaatcacgtcctcaactcgagagatcgcgttggtcaactgctggacataaccgctgaactcctgaccgagcgttagcggggtagcatcctgaagatgggttcgaccgatcttgatgatgctctcgaacttggctcgcttgacctccatggcgtctcggagctcgtgaagggcaggaaggagcgaagcgttaagctcggtcacggcagcaacgtgcatggcagtggggaagctgtggagagcagaatcgaggttggtcttgtcaacagaccaaaccagaactgagcatacttaaaaactatggactaacgtgtcgttggaagactgggacatgttcacatggtcattgggatgaacaggcttcttggatccgagctctcctcccatgatctcaatggccttgttggagatgacctcgttgacgttcatgttggtctgggttccagatccagtctggaaaacaactaaggggaagtgatcaatgagcttaccgctgatgacctgtattgcttccaagaaacgaaccaggacatgggtgaagaatgatcagtctcatagccgaaatagctctatacaatcagctcactcacgtcatcggcagcggtctgaatagcgtcggcaaccttctcatcgagacctgaccgtgagatgatggatcatcagtgtttcatgctcaatgacagttttgctgtgacttgtcaaagagcttggacttaccgtaaagaacgttgacacgagcggcggctttcttgaggactccgaaagccttgataagaggaggaggcatcttttcggttggtcctccaatatcgaagttcaaaagagatcgttgggtctgagctccccagtatcggtcagagggaacctcaaggggaccaaatgtgtcggcttcggttcggtgagaaggggcggactagacggtcgaattggcatagcaggaaagaggaaaaaaaaacatcagacccgacttctacagaccgagaaaatccgaaaggacaagctcaccatggcgagggaagatgagatctgtcgggaagcaaggaaaggaacagagctggcgatggaggacttaggaagctgatgagatggtgatggcgatggcggtgaagatggtgtgagatgaaagaacggaaaagaaaaaaaaggtgtgaagcaaggcgagcgtgatggacagtcagctgattggaaagcggatggacgatgaagaaaagacgagagatctctcgttctaaaacgatccgatgctctcttggaaaagaagaattgtaaaaaaacaaatacttacccgtctagcagaagagatcaaagcgcgggtgaacataagagaacagaaagaagcgaacgacaaagagaaggagaacgagcaagtgaacaagagagcagaagaaaaaaaaaaagggggagaggatagaaggacgccgagcggagccgggaaagagagagtgatggttacgattttggctgctcgcacgtggttttgggtcacgtgattgacacagctccgtccgatggttacgctcaaagatcttgaaggattccaacttgatcattctccagttgaaataaatccttgatccttgcccatccactttagctctctagtctgcattggttgtgtttgagatcaggtgcgttgatcaatagacgcgttctagtcagctcctggtatgtatcgaacttcaggctgaccgttctttgtatgtgcatgtgcagtcgtggtcgctttcatttcttatagaaccggggaaagattttccccatacccgggaccatccttgccgttccacctttctcgtttctgtgagaccatatagacattttaaaagtcgctgttgtcagttctttcaacgctggttatcgtttgatatgcctgctgctagtagcatactccatactatcgagctgctgatattggttttgcccttgtctcacgcttacagaccaataccttatttcaggtttctttcgtcaaattcagccgatccaaccttattgctcgcttttctttcaacttaatggagagaatagaatcacctcgtgagattaatttctaccttcacattctttccatatgggacaacatatgcaaccgatgatctgattcgcatctcccatgggaatcgcagataaacgtcgtcgactctccccctcggcctcccccgcaatttcttctcctaaatcttttacatctagagaaccttctgcacccagctcgactgtcgtcaaacatgaagacttagcgggtgcgcacgtggagcccgtagagacctcttctggagtgagaataatggatgaagatgagatcgtcaagctgcctgctggaacgttgccttcagacgtcgcctctccactgcccatttcgagctcgaccgtcaatctaaaatctggtgattcgaaaatcaacaaggctgattctatagaatctcccacagatgatgtaagacatctctcttccattcttccgttagaacgatataagactcaatgcggacatccacgttcacacgactcacatatttggattggccttacttatttcttggcgcgcattcttctttataggacgaccccttggccgaaattgatttttctcttttatcccatactccaaacgttgacactcagaccaatcttgcgctgtttgatccttcctcaatggttctcgatttctcatcgcttggccagtcctttttgtttgatcttccaaccgagctcgaatctgcgcttgccgctgcaaacggaaatggacaatcaggtgaggctgaagttggaggggaagctccaggtgtcgctgatggagttgggctcgataatttccttggtctaggacatggtgccaccggatttctaggcggaatggctagtgtgggcgcaaccccgttgggaagtccagacttgaaagcgttagcagagagcttagtacaagattcccctgcggtctcacctaaaccgcttgcgctcggaaaaccaggcttgacctcgaattcgaaagactcgaatacgagaccgattgtccagtcgaaggccgaaccgactgtttccatcatatcctccccagcaatcccttctccaactccgaaagataccccggcagtaattcctctgacggttgaactctcccctccaatatcttctcctcctgtgatctcaccatctggcgctacctcgagtcgggcgtcgacacctgttgcagccgtggtgactgttcgcccaaatctatcatcgagtcccaagccaaaatccttttcttcctcgccatcgctgtctgttccttcagcatcttccacctctacgagtatcgtttcatctagtacatctatacaacctcaacttagtctacctctcaaacagtctcctgcacctcgacctatgcttcctgcaaccattacaaagccgattctggcagtacccaaagcggtgcctgtagtcaaaaaatctgtcatagctaaatctaatccgacgccgacgccgacgcctcctattgcacgtcccccaacacatccccctgtgccggatgtttcaacaacaaagtccaagccaggtccaatagtcgctttggacgatatatctctggatccaaacgctttgcccccggaactcatgtcgttcgacttcgcggcgttggaagcttccgttctggcaggaatggcacctagtgaatcttcctctggtccaaccgtgacttcaactaacactgatgctaccgctgctaaaacggggacagccacaactgctgcccctccgcctctagtcaacacacaatctcttcctactcttcctactcttgcatctacctcttccggtgcacaaaatcatcccacaactacatccggtccgacacacagctctttcactgcgccaggtccagtccacatctctagaccaatcacatcccaagctttaaagacaaaccaacccgttggaacaagatcacaaaccgctccggtccctaccttacgtacgatgaaccctgccgcttacggtcgaccgccagcacagaccgtaaatttgaacacggtgttaacaggaataaactctttactagcgtcaccttctatcggccaggcctctgcattctcgaccgtgaatccagatatgtctactcctggatcaatgtggtcggtagaggacagaaaacactatctatcgctcctgccttcttcatcgttggtgcagatcatcttgaaactaacggagactcatccaggactcatggcttatccaagagcattgagtgatgtggtacttcaattggaagttcaggcgctcaaacccaagtcagttcctcaaggtggtgtcggtgttggacacagggttggtgtggctcaatcatcagtgggcgtagtgggtggacagcaacagaggtatgccgtcaggccaggtggtcaacctgctcatcaaactggtaatgttcagggtaggccggcattgtatcatcctccgggagttagaccagtcggggtaagaccgggcgtcagacctgttgtaggtggtcccaaaccgactttggcttccaacggcggcggtggtgtaactgtgagggtaagtttctttttcctttgtctggtaatttcacaggcttttcgaaggaattgccagttgatccttctttcgatctcactctttatcagccttcggcttcaccaatgactccgaccgcccgacctcgagcgatcaacccactagcgaacagctcgatgggtcggagttccaatccaaatgcctcgttaacacagaatcataatccatcgattcgaccatccggtgtacctcacacaatccctaaattggcagcattacatacatcttcgcctccttctgctgctggtggtacgaattctgttcgtccgaaaggagcgggcgtaggtagtccgctcagcaggccacctagtttcaatcaagcccaagcccaagggccaggacagggacatggggcggcggctttgcaagcagcacaggcccaggcgggaatggctgcgttgatgagtcaactcttaccctcgaggactcctagtcctgcgaccggtcctactactaacggcggaagaacggtcgacggaaacgggacggtaccaaaggggcctacttagttgatggtcttgattgtctgtcaatcatcatagcattcttccgttcgatttatggagggaaagtcacataaactcatctgtatttcttatccgagtcaaacttgaatcagcaacagcgagtaaagacggaagagatgtcacgcaaaagatcagacaaaagagaaaagcccaatttgagaggatgatatgtgacaattattggtcaagaaaagcatcaaatctcgaagacaccactctagttctaatcaaacttgatactgtgactttccatctaaaagtgttcgtacgatagaacaataaggtatacattgagtcagatagggcgaatgaccagaaagagagatacgaaaagagaagaacgaacggtgatctctccacctctgtagcttcctctcttctttttgtttttctcttttcggaaaccggctcctcgggtaacgatgagatctctagacgcacgctctccgtaatcgttcgtggttccaccctaagaagagataacacgtgcgcgagatgattagcacattgccttttcggttccaagcaagaaacaacaagcaaaccaggcaaaggaaaaacttaccttggtgtcaaacgcgttgctcttcaacctttcatcatggaaactgacgtcggcctctttgatcctctggaatcgttgaccttgaactttaccacccttctttccgtttcctgtaggtgagctgtatccactgtttgaatccgaagcggccaagtcggcttgcttgaaccgtttcattcgctcgtcgaagtgctcctgtggggtcattccggatgcggtgacgggcggaggagtaggggacgaggcttttcgcttcagtgtggtggcggcaggagtgatcaaggtggtggaagtggtggtctgggtgataaccgaagcgggcgctgtgaacgggtcggctccataaaaatgtcagcttgaaagagtttgatatcaagagaagcaaagggagaaaagaaactcgtaccatcatcttcatcttcatcatcagacgaagagctagatgagtcggaggatgacgaggagctggaagactcagagtcagagtcggacgagctggaagaatcctcagagtcagacttttcttttttggcggccacaatgacagtgggagccttaggggtgactggcgcggccttggagacctttttctcatcctcactctcagagtcctcgtcatcactgctgctgctgtcgctgctactactgctgctactactactgctgctttcatcatcttcgtcactcgaactatcactcgagctttcggccatcttggtatctttcggcacgatgatctgaaccttcttctctgcctttggagtgtcagccttagaggcagcgatgatcttggcagcaggcttctcgtcctccgaatcggaagagtcagaggaggaagacgaagatgaagaggaggaactatcggagtcatcggaatcagaactggaatcgtccgaactagactcatcgtccgaggcaaaactttatcaagatcaaacgaaattttcaaacatcagatggaaagacgcgttcaaggcatagagggcatagcaaagtaaatgaggtaggctcacgcgagagcagcagcagcaactagctcaaccaaagactttcctcctgccggaggagctgccactttctgatcaagatcaatcaagctcttgacttccttcttgagggctgcagcagactttgtgtgctccctagaggtaagaaaagcgtagacgagcctgtaggcatctgaatgtgaggaaccagaagggagcagattgcagattgcagaggacagtcagcccggaagaccagatgatgaaaaatcacgagaacacataccgagaagactttctttagactctgacattgtgttctgtgcagtttggattgtggttgaataagttggactcttcaaatgaggagttaggcaaagtaaagagtacaagtatggggagaaagaggagaaaaatcaagtgaaattctgaatgaatgaacctatgcagcgatcacgtgtttgtcacgtgaaaaatcacgtgccgtactcgccactcggagatcgagccgtccgcaatttccttcggccgcttgggcccctccaataagatttctttatctgtgcgggcgaatgagaaaaggacagagcttgataatttttctttacctggcgcacaagtcatgaagacagtaaggatggcagaaaaaaatgtcaagaaccagacaagactcctcatgagatatacatgctttgatgtgaagagtgagagagagagagagagatcaatagaaggagagaatgaggatatacctacactaaatatacgtgctgcgtggtcactttccggtgacgtaagctttgatgattggccagtcaatccggtaacgaaagacaaagccgcctccttttttatcccctcgtttgattttaacttctgtccaccatcgaaggtatcagcaacgacaacgagcagaggctagagacaaaagacagtacagtcagagtcctttttcgttcatcatctctcaccatgctcgcctcgaggttacctagtagattgggagctgcccagttgagagccatccatgcacactcgtctcggatgaccactcattcgtttggagctgctttcagaactgttcactcctcgcctccatcgatcgagcctgcgtccaacaagtctcttcctgcggcaacatctgcgactactcctactcctgctagctcatcgaccactttgcctcctcctcctcctcctcctcctcctccttcgacgatagccccgaatgcctccactggtggcgacgggtttgaccccagaaacaatgcctttaccagatctatcatcgttcggatcctagccagactggtcttttcgtctgtactcggtatctgtgtcgtcactggtgtcattcttggtcacgacgctctcacctatggtacgactcacgtggaaaaagtcccagttcatccgttggccttgaagccggagaccggagggccgaggaatctcccgattctcgccagggatatcagtgacatggagaaggacagatctcgacacaatgtagactcaatgggagtcgagaccgaaaagcccaggctagttatcgtcggtggtggttggggagtcagtatcagttcattttgtgtgctgtcttgcatacttagttacgatgtgtgcatagctcatcttcttttttctctttctttttttccctcgattcccccacatttatcaccatttacgcagtccgtcggccttctgaagactatccgacctggagactacaacgtcacggtcatcgctccggacaactattctctctttgcgagtctcttttcctatatttgtgttcttgttttttcccccttccagcaagctaacgattttttcctgtattcctttctcttaaatcaagaccccgctcctgccatctgctacggtcgggacggtcgagactcgatctttggtcgagccattacgacgaacactggtacatattggtttcagaagacttcaatcacgttcagtctctgagttcaagcctgcctgacgttttattatcttactgtctcttacactcttacccctccaggctcgagtcagaggtcacttcatccaggcaaaggcggtcgacctggagatggccgagcagctaatcgagatcgagacctctgctggccagcgagtttatgtgccttgtacgtcttcatctttctgactacaatctctccatgttatcggtatcgccattatctcagtttttatgtctctcactaccctttgggtacgttaagacgacaagcttgtcatcgcttgtgggtcgtcttccaacacccatggagtcaacggattggaacattgcttccagctcaaaactattccagacgcgcagagcattcgaagacgaatccttggtatgtttattcagcctcgttacatcctcccttcaaccatggccttaccttatacgatttcaatccatagataacttggagaaggcttcgctccccaccacctccgagaaggagaggaaaaagctgctttcattgtgagcccttttgtttgctcttcgatgagtcttttcttatggaaaactagactggaaccagactgacattctattgtcacactcccagtgttatctgcggaggtggaccgactggagtcgagttcgctagtgagctaatcgacatgatgaacgaagatgcattgacctatgtgagtcggtcttttgtccgctcaggattctgcattctttcttcgatgtctattctcatatcggattttgttcgtcgcaatcaacagttcccaaagcttttgagaaatgagctctcggtttccattgttcaatccagggatcatatcctaaacacttattccgagaagatctcccagtatgccgaggtgaggcttatcccttgctcctcttccctcaaaacacttctgattactctttgcgctttcataaacaggctcgattcgcacgaaatgaaattgacgttatcaccagtacgtctgtttcgcatgccacttgttcactttcacaaacccatgctaactccttgactccctttccgtgttgccttttttagatgctcgagttcagagggtatttgatgactcggttgttatttctgtcaaggatccaaagaaccctgactcgaagccagttgagaaaactcttcctagtggtttcaccttatggtcgaccggtattgct

SEQ ID NO: 1141 - DNA, 10051 bp, Xanthophyllomyces dendrorhous
acagattcacaaagactctggtacaaaagttgcctaaccagttccattccaaagctgtcgaggtgtaagtcactatcctttacctatgtgtttgccttatcgagaaagagacttccagctaaacaagcatttttcttcgtcgcagtgacaatcacttgagggtgaccggtgcgccgaaaggaaccgtgtatgctatcggagatgctgctactgtgagctcctttctgagctcttatgttgaagtgtatgtcactcatgctgataacttcatgtgtgccacagatcgagaccaagctagtgaatcacttgttggagctctttgacgagtgtgatgtcaacaaggatggcaagattaactaccaagaatgggagaagatggctgatatcatccgaaagaaacacccgttggcggagaaacagttcatcaagatcaaagaaatctttgatcaatacgataccgacaaggacgggaaccttggattgaatgaggttgccgagatgtttatccgaatctccaacaagatcaccacccttccgcccaccgcccaggtagccaaccagcagggagtctaccttggccagaaattcctaaagcttgcgaaggaagtcaagaaggaccccggttcttctatccttgccaatgatgatctataccatcctcatttccagtacaaacatttgggatcccttgcatcgcttggttcggcaggagctgcgttcgatctggatggcgtaggaagttttgctggtgggctcgtggccatgtacgcctggcgatcgatttactggagtgaacagactagtatgaggactagggcaatgttgatgatcgattggtgcaaacgaggcttgttcggtcgagatatctctcgagttcgttctgttccttttttcttcttgaccctcttagctcgctttattaaaagttgtggagatctgactatgcctttgttttcccttccacagttctaattaatcttttttcttagccattcctgtgagcgattgcctatgatcagatcttacactcattcgatacaatacacaaaatagtcctctttcgactctgctcgatcgatacatgatactccgcgtttcctctttctgtcatctgttctacctcatgctcttttttccatgtcctgccctttttcaaaccctttttctttgtttcttcaggaaaagagcgtgtatatccatcttctcttcttctcatcataagtttatctcataccgtttcaatcacacatagaatcctttctctttccttttgctccttcgttagtatgctctcgatcattctgttctgttctgtctttccttctcttgatcgaatctagtcattcacgcgcacctcccgaacaataggaagaacaaataaaaagaaagttacgatgtgctgctcctggttgccttgaaaaatgtatcgatagaataagagctcgcggttctgtcctgcgcccctactgctatcgttgcgactgatgacgatagatgccgataccgaaatataagtctggtaaacataactcggccggtggacatactcatatgatctccttcacatttaacatgcctcttgttgtctcaaaccgattgaaatatgatagtacagcacggtaaaaaaattataataaaaaaagagatgacaggtgtgctgatttttttgatttgatttgatgagtatgcattgattatggtatgtggtatataatgtatatggtgttcaggatatacaagaaggtagaggaaagtgggtatcaggttgaagcgaataaggtcaactggtataagtcgaactgagtcaaaccaagagttgaagggattatggatacaaagggattatagtgcagagaggaaaaccctttagtagaaaagggtgtttatgaatagaaactagacaggcaccgagaaacaaagggaaagaaggagatacgtgcggtgaacagaggagaaagaaaaagagaaaggaaggaactcgtgaagaatgggaacaaaaagacaaacaggcatcttaactacttccgaaccaaccacccacccatgacttcctacctgctcctgctccttcacctacatccccaccggtacctgcgcccagattcctaagtctgatgagcgcttctgatgattccccttgtatgttctctcggtttcctggttgaactgctcgaagcgaaagcgagattccaaccgtgtcattagactccactggaaggtgtcgacttgtgctcacaccggacctctgcgcttcggatgggctgttcgaatgggtcgtcgagaagacgatggaagatgatgatggtgagggttgttgttcaggaggaaaggagagcgagtacttcatctggttcgatcgtacgctcatcatcgacgttggaccattcaatttaaaatccggtgatgtttctctgctctgcactcggccgggggtgtccttcgtcgaagcgatatcttgtgtaccgtcttcaccccatgatctgaccttcaagtggtcatccttttcctctagacacacctcgtccgtccctttcgttagcctgactcgtgctggaacaggtccattcgtcaagggtgaagagccgttcgcgcttagttgaactcttttggaatattgagttggagaggcgtcagagacgtcaacaacaggggaggaccgaacccttatgaacgatggggcgcggttggttgttgtcgaaggggaccatccttttgccgtcgtggtcgacgtcatcgacgacggagacagggatggagacgatacgggaagattcgaagattggaaagaggaagacatgcctaccgttggtgatgaattgattcttcctaccgacgacaagccgataggatctttttgttttgcagatctggccatagttgcctgcggggacagagactcattctgatcggattcaactctcgagatgtcagagatttctatcgactttctaccgtgttccgatgcggattttagccctgaggagagaaaagtcgtactcgatggctgattgcttggtcgaccgcccagaatgcatagtgtctcggctgtcagcgaggtcagggtagcgttatgatcgtcgtctcgtttcgatcgacattctacggatgaggcaaagtgatgagcgtgctttcttgtctcgctgattatcacaagtccttggcaaagcaagaaggagaagatcggaaggacttacgagtctcgacccaaatccgacccagtgcgccatcaccctcggcctccctctcgttccagtcgtacagagcgcctctcacacccaatgcgccagaaagcaagacttgtgctgtagctagtgccgacgttgatttggtcaacatccggtccaaccaaattgagaaatcttcatatgggtatgtttcttcatccaatctggtgaaacctagctgctcctcatgctctgacctttcagtcaatgatgacgatagcgacactgacgaggttgacaacgataaagacgaggatgaatactctcgaatttgaaggacgctgttgctctgaggtgtttggcatattgatggatctgaagggtctgatgaacggaacagtttctctcttgagataccgctcttcaatgaaggaaccttcgtatcacccgtcatacaagaaggaacagattgatcgaaagataagatctccttatctttttcgagcgtatccgctcttccttttatcgaacggttcgatatggatgctctcttccattctggctgcgactcaactctgggttcaaggggcgtcgaagattgtttgccaagaacatttgtcgtgaacgacttggtcagtgccggtataggagacgaagtgaagatatcggcatatgctggaagactcgatacggaggaacccggaccgacgtcaaaagattttcttcttcgatgacgatgggaggagagaggggaagaaggtgaaggtagggtataaggaatttcatcgggagagtgtcgcttggatgatggctgagtgggtgtttgcaatcgaggaaaggaccgggcttggccgagagtccgttgacttgtcatagggctttgtctcactctggaggagcgaactagaatcgaggaggtgaagataacgagaagagaaggctcagatgagagcggccaggtgtcttctcatcgatcgttccctccgaagagcgagagcaggtggtgaaaggagagtgtatcaagagaaaacattgaagaatggggatttttccatgcggggttcgccgtcacgtgctaaaactgaaatattggaaagtatgcattctctcaacttctacatatcaaccatctacaaatatatgccttcaaccgtctgattatgacatgaagttgggaactggaaaatatggtaaagcaagatttattccgaatatgaaaatcgccttgagtctagatgaccaaatgctagatctcgtcgcccatgcagaaccctcggttgacttcgtgatggtataccatagcggaatatatgcatctacggaatatcaaaagatttagacgacgccaggacaaagacgtagataaaaaaacatgagcatcagatggagtcattctcgaacatgaagacgatgtatgtcaactcacttctatttacgaacaaatcgagagaaacatttagagaaaaatcagaagcatcagataagaaaggccatgccgagagagtgagtgaagaaatagtatggacacaaacatagtgaagccaagcagcagctatcacgcatacgtctgtactcatttagggaaatcagttgtacatcagatcagagtttggtctcatcgccttccatcggaagagggtagatgtaacgcacggaaaatctggtgggaacttcccacaatatcaaacgttttgagccactttctttctgggaaccgaagagcataattgagtgccccgacaacatatctgcgcgcacgtataagatttgaaaaatatcagagaaagaatgatatggttcatgatcgatcgattgatcaatcggtgacacctctggtaaaggcgaggaggacaggacctacaacgctccactgcctaagagatacttgagacccatctccctttgagctctttctaaaccatacgcgtagagattatgtgacactggaaggatagctgataggccaagagaaagaaacaccatggttcgagcccatcgataggccccggtggtgaacgtcggattgagcacagtgtatacagcaactgggaccacagaaccattacgtacgtcagttttcccattccctgtactgaaaaagagcatagtattaataaatagacttacgagatccaaggacggtgatcaacgctaaaaagttgatcgcatcagaaaaacacaaaaatagcagttagtgctgaaaaatcgcggataagcaggtgtgttggtcgtacagatatagacccattggaataatagatcgcagtagaagccataatagatcgcaggaaagtttgaaccgacgattaggaggacgatcccgatctttgaaaccagcgacagaactagagttagccttcgatcttttcctatgagacctactgacgacatacataatcaaattggttccatcgtttagagatcttgcgggaatggcacgacaaggtatgataggtagccgaaaacccgagacaagtggccgcagaaataagaaagatggtgaagtgaaatttgtcggtccaacgaagagtgggatgtctaaattcgtggagaagaagatgatcgaaaagatacggcagtacggtcacagcgcctagctgtgaagatggaagaaaaggcatcaacaggaatttcagaatttgtcccgaatgaacatgcgatgagaccaagaggttaaggtcaaggtcaagggcaacggagacgacaaacaagatgagtatgtatgttgattgtctcattatgaatatctagaggcgaaagaagagaggaacgaaaaagcctgccaacgtgagtttggcatccacatccttgtatgaatacatcaaacctaggtacatacagccaacgatggaccatgcgcatcctgaataagagttttgttctgcccggtagcctgtgagaatatactcgctctcaaattctttcatccatggctccagctcgtcccactcgagcagtctgtctggatttttttccggtggggtaaccgaacccgactgtggatctgatgttgccaaggatgaggaagaggtggtcgatagcgatgcagcagaagaagatgtagatagcggagagggcaccaaaggaccattcgtccgacgacgaagatcatccttatcccctgcgacgtgttgctttgatttcgacatctgttgtaagtgagctggcaaacaagttctcagccaagctggcagatcagtcgacgctgggtttgaattaaacgacgatggaacttggcgagaaaagtcgggggccgggccgatcagatttggttacggtcggcacgtgacttcgtcttacatgtgcctgtgtccccaacaccagaagcttctacgccgcttaggatttcgtctagtccggatcctagccatcaaccaacttcaatcgacaaatcgatcatgtctgttgccaaatcagaaacagctcaagcactagctcttgcagaacaggatctccttcctggaactcttcagaatattcttgatcaaaagagtctcaaggtttgtttatctttttgttcgaggaggcttgtttgtgttatcatttatagacatctaaactgacacgtaggtcgccttcacatcttggctatgtacagtggatcttttgtggttgagtatcctctgttcttcctactcaaagattgaagctgtgcccaattggtctcggacaccagtctcatttttgtctttgcttttattttcttcgttctttgcttcatctcaggtggaaagggaggagtaggtacgtatcgtttcccctaagcgtctttttgcaaagtcttctgtgtatactcatactagcatcttctactggccaacagggaagactaccacctcatgttccctcgctactcagttggcttcttgccgagaatctgttcttttgatcgtaagttctccgatctgatcatatcgctgccttgggacgtgtatgagacttcacttctgatcatgatatcctgttatcgcttttccgttagtccaccgatcctgcgcataatctttccgatgcgttcggtcagaagttcaacaaggtacacatcactttttcttttctttatagtcacatccgatctgatggtttgctgaggtcgcatcactctttctctcttgcatcaggacgctaccaaagtcaatggatttgacaatctctttgcaatggagatcgacccaacgggatcgatgcaagagatgatcgacaacggtgagctgattcgttctttgtgtattatgatctcgtcaatctgagtttcactagacttacagtcgctccttctttctcttatcagctgacgcttctggaggaggagccatgtcgggccttatgcaggatctagcgtttgctatcccgggagttgacgaggctatggggtttgctgaggtaatgaagtaggttgcacgctcttgtacttccgacttttctcttgtgcgcatccgctcagccattgcctttgtttgttggggattttttttaataagacatgtcaaatctatggagtttgaggtcatcgtgttcgatactgcgcctactggacatactctccgattcctctcattcccttcggtgctggagaaggcgcttggaaagctctcacagctaggaggtcgatttggcccaatgattcagcaggttcgttcgtctggtcttcctttttctctcgtccttcatctcgaaacgtctcaccattccatcactccttactttagatgacgagcatgatgggaggtaatgcgcctcaagaggatatgtttgcaaagttagaatccatgcgagccgttatcaatgaggtcaatacacaattcaccgatccggtcagtcttttcactttgctagcttttgtcaagaagaggtcacacccatcctctttgctgaacaaacttatctcatcatatcaatacaggacaagacgacttttgtttgcgtggcaatctccgagttcctctcgttgtacgagacagaacgactggttcaggagcttacgaactatgagatcgatacccacaacattgtcatcaaccaactcctctacccgaaagatagttcgttcttgtcttcaaactataaaatctcacagaacgatccaataacctgatagaccgatgactctgcaattttagattctaattgcgagcactgcaacgttcgccaagcgatgcagcaaaagtatctcctcgaagcttacgacctttacggagctgatttccatattgtcaagctccctctcaagacggaggaagtcaggggcgcagaaaagattaaagagttcagcaaggttggtagttctgaccttttcctttgttcacatctgtatagagtggctatctgactcttctgcatcgttttccttgtttccttatgtcccagatgctcattgagccgtatgttcctggaaactagaaagaaccccgatttagagaataccaaatacacaaaacatgtttaggcggagagagaggacggacgaaagactcgtcattctatcagggttgtaatcataatcattgtccacgtcaattctcttttccttccctaaatttgatcagtaggatgattctggacacacttttgagtgaaagagatcgttagggttgaacggacttgaccggtcatttttcgagctgtcacatctgatcctcgtcatcgactctcagcttgacgttgactgttcaacgactcaagttcccttaacacatcgatatgtccgaatcaatcgaccaggatccgttggacttgtttgagagctcccttccaccactattcgagcaaccgatcatcgcccactcatcctcgttctctaacatatacgtccatgaacatcctttacttccgtttcctatcaaattaggctttccaaaccctccagctcggttgaacaacctacaagctcaatatctatggccgtcagggatatatctgtctcatctgatcttgacgggagtggtcgatctaggacgggaaggtcaagggaaaggaagagtattggagctgggtgccggaatgggtctgccgggaatcatggctttggtttccatggctctagaccttgagcaaaccgaggagaaagttgaacttgaaagcggaacatcatgcttaggaaaaacaccgacgataccgacaaaagatgacatggtagaatcgcaagaagaactgggaactgtggtagctactgattttggagattctggtatctgcgacattcttcgcgaaaactatcttctcgtactcgataccttgacctcgtatatccgttctcagtcccaacctcaatctcaatctcgagccaaggtaaaacaaaaccccggatgggaggtcttagggtatgaatggggaaccgatcccgcctctcttctcgtcgccccttctggtcaaatcccaaggaaatacagtaccctccttctatccgacacgttgttccatacttcttcgcatctctcacttcttcaatcgatttattccttgctcgagccgatacacggtaaagcgtatatcaccgctggcttccacggtggatccagaggtacggttgaccggtttcttgaacttgcgagaaccgggggatgtctggtcagagaactgaacgtcgtaaagtgggatccgagaacggaaagttgggcagacgtcgagaacaaggtagaaggagagtatggagaaggcgtggtttggtcgggtctattgacattgaacgataaatcttagttcatgtttgaccagtaatcacagagatgtcattcgatggagtccacatgagaataagggaacggaaaagaagaggatcttgatctctcggaagaacatgggaattttttttaaagttattttgaggacaagtggtttggtgaaacatatagacgtatagacatatacacatataaatacatgtctaa

SEQ ID NO: 1142 - DNA, 14529 bp, Xanthophyllomyces dendrorhous
catataaatacatgtctaatctaatcataatttctattctaatcttcgccatcgttcttgaggctcagacgtgaatgataggatgagagggaaaatgaaaaggaaggagaggcagtataaaatatatgatctgttcgattataaaaaaaaattaccaagaaaaagaaagagagaaaaagacaaaaataataacaaaattaacattaagacggggaacaagtggagaaaacgagaaggaaaagggaggagaagctatcaaagaaggaggaagtaagacaaggtctgcaagagtccaaaaaggtgttagaaaagaaaatcgaaaacattgtgtacagatacagaggggaatgaagaaggaaagcacaaagcgaagaaaagcaaagaatgtgtctttggatacgaagaaacaaagaagatatgaaaagaggcaagcaacagaaacaacagtgcgcattcacaagtccgtagaggaagcaactaaggtaattgagggcaagccagcacgaaaggagtgacagaagagaaaaataagaaagaggaaggaggaaaaagattctcccagactagacctgtccttcatcaagggcgtatttacttgacgtactactagagttagtgcccagcatggtcggcatgatcaagttcacaggtcgattgacatgaggtgccccgctcttagatccgaagctacctcgctgaccagttgatccgcctggtaggccaaaggacgacatcgaagaaactgatcggttaggtcgtctgtcccttgatgtaacagtgttgattcgaagctgatgaggtgttccctgggatcgagatccagtaccagacggaacgagtggcacatgagtggccgagttagaggccaagtttgatagtgagtgagggggcgaatcggatgatcgagaggagaatgagccggggcgtgagggtaggccaccagatggggcaggataaggttccgtagcggacggggggactgaagagtcggcgttgaattctgcctcgaacgggtcggaagatggctgagagtactttgagtatgtcgggccgtatgcgttatagttcgaaagagaatgttgggtcgggaacgagctaccgcgcatactactgttgtacgagggttgcatcactgagttcacaaatggaaaaagtcggtcagtcaggaaacaagagacacgtgatgacgatacttggatgaaatgtatacataagacatgaaggagaaaccaagactcacaactattgtacgatgacgcacgccgagcggccgacagcgtcacaggctcgctagatccagacgtctgcatccgccttggaggtcttttgaggttggttatgcggttggtagccaacacgtatggaatttagtcttggacgttcttcggtgatctcaaaggatttgacaaaaagaaaaagaaaaagaagaggttactgacggcggcggcagcttctcaatcgattttctattcttggtgaatttccacaaccaaaaaagaagacccagtataaccaatccaccagcaactccccctacgattcctccgatagctccactggagagacccttgttaccagagctgatgttagaagaatttggaatagccgtcgttgccgtatttgatccagccgcagtagaagatgactttgaagctgatgttgaggcagccgaagctgtgctagatactgaggctaggtatgaagacgaagaggacagagcagaggtcgaggacgaggacgcggacaccgatgctaaacttgatgttgctgtggatgaggtcgaagagacagtcacgctcgtggaagatgaggatgaagatactgaggtcgttgacatattgagctgctttcgattacagatttgaaagatgaaagaggagggcagagagttgaatcagtttttcaactatgtatggtgaaatgagaagcattctgtcattgtcagatcagtccatccatacagattggaatctgcgatttgtgggactgaaccgtataatggaatcgaaagcgagagagaaagagcgaacgagcgctctacgaagaaaagagaaaacgacaacataccttctcttaaggcaataaaagacagaggacaaaaccggattgattctacagagaacagaaaggcgagctggaagaaaggatctggctagctctctccgaacgccaaaagagaagatgataggaaactcaaacgagcaaaggaggatggtgagagtaagaggtttaaagaaggacaagttaaatggaatagcggtcagtttcgggttaggtaacattcatatatatctacttaagtaatggaattacgtcagtccacctgcatacatttcatgacgcgtcgagacgcgttgatcatttaacaatttatctttcgttcgttcttcatcatcatctacctacttctactctcacgttttacgttcccatggcgccgtatgttgagtccttctcaaaccgaccgtcgccagctcagatcgtaccgattgatcggattccagccgtgtttgcagcttccgatatcgtcaatccgaagctcagattagccggccagtgagtcgttttttttttgttcaatcaaatttcttacttagacatcttaccttttgaccctcttctgctgatgtcaactagccttttgacatatcatccacccaccaggcttgccctgctcagtagtgtcgatcggtcgacagccgtctggatcgacccgaagctctgcttcgatcatccttctgacgattccctctatcctcggccctcggacgatctggaggccgctagagcgtttggcacaagtggtcatgcggggaaaggatcctactgggtcgctgttggcgatctcgaacgcgtacttgtttgtgtcaatcgatttggattctctcacatgttgcatcgttatggaaacgtgttcatctgaaataaaattcgcccatgtttctctttccccgtgttctgacctgatactttttggacagccctcagagttacctacgttggacaccgtcaaccttccgacttggtcgacacatacaatccagatcccccattggattcttcgcgcgattctacttcgaccaagtcccgaattagatctccgactatgggagcaagccgctcggacaagactcggtgtttcttaggcatacatcgttcattaaattcgcatgcatacacgattgagccatcgccttccttattcaaacattaaaagactctgcttcaaaggatatacccccgacctcggtcctcactgctctgcctagctcgcctactgatctctcgacctgacggaccaaaccacttggaccacaagcccttacagatactcccgatacgggtgcatgctcgtccatcagagtcctcaacgtcgctcctaggtctggtttgatgaaatgaagcgtcgtgtacggcctgacggtaggagcgtcttcattggccgtcggcggcggcgactgcgtaagataaacggagagtcttactcgggaggagagtaagggagatagcaaagcttcgagcgacgtgtacattgcttgtacatattcgaagcggtagtaagagatagtatacgtcttgagcagagcccggatgccatcataaaccagcacaggagacaaacttacccaaagtccggacgacccaaatcaactcgataactttaacgcccgatcttgccctacttccaatcgcagcccattctgctctagcttcctcggctaaagcgatcaagaaactgactccacttccaccggctatgcagatcaccacctctgccttttcctcactcaagccatgagccccgaaggacccgtacggtccatccagcatcacactgacagctacacccggcgtgtcggttttctctgaatcctccgacgtgacggctttggtacaactggattgaccggtccgagctaatgagtgaatggaccgagtccaatttccagagcatcctgccaataagatcaatccatcccctctttcgactgctgaactgtcggtctgggatgggcgacgaggaggagaaaggatggtgaacgggtgtgcgggttcgagggctgaccaattggacgtgaagattcgaagatagacgtgttgacctggaagccagccatgtgttgcatgtgggatgtgtatctatgcgttcgtgtacgagacggcaagaaagcgagaactagatcagcgaacgatcgatcaaagcgttgacgttgaaagaggtcacaacccaccaaagtcattccttccaaaggaattaattccgcatccttaaaacgaagtttgacaagtctcgcacacaggtcaaacgcgtatagtgcgatcggtggatagatccatggctgagcgaaaggcgtgtgatatgctatggtcgcaaagaacccgatgatggacatcatactttgtcataaaaggaaaagaaagaaagacgtcatggtcaacaacgataaaaattctgttcaaagtgatgggtgtagagaacgcactgggcaatccagaacagagtataacacttcgatctgattggtttgatgctcgtcaatgcgctctacaggtattttatagacaaggaagatacattggtaagcatggaaggcggttctttggatacttgggcattgaagggatgtcagaatccgacataagggacgaacgaggcagagaaacgaatagactgctagaccccaacgtgtcttctggttagagagcgtatactgtcttccgtgtttatatgcccacatagcgctaatgattaaacatgtttggagagagaatgccaatcgacggatatgaagttagccgtatgtcgaatgcaaacgttgtgtaggggggccacaagaaggatatggcgatggatgtaatcttacccatgacaagtggccgtgagccaaacagtccgaccgagccatcgatgagcccagttaattttctcgtaaccagtggaaaggatgaaggccaagggattgttcttcgttgatagaagaaagagaggtgtaagctgggcaagtgtcaaaaagcctagagagaatgggggacagggcggagaccgatatggatatataaagtaacagagcgtgtcagatgtgagtaagccaacagagaggctattgaacttcttaaggaacagcccataccgaaccggttgggatttgacgagagttgggcgtcctttagcacgcatagcagcacgatccctaggtagacgatcccactaatcatccggtacacgacttctggccctcctcctcccaaagtagttggaaccagccgaccggccgaagccaagccatcattgacaatcgcctgattcgcactcaatactcttttgtttgagcctcgtcgtttggcagttttatctgatcgggatgagtcgccgtcttcggcctttaacagcgcctgatggagtgtttggtcgagagatggaagtttacgcctgggagacagatcctcatcgatgaaccatccacaaaagaatcggccggaacggaaggatcggatgagtaccaggaaagagcctgagaagagaagagcaagggcgagagagccaagccatccataagtaaagtaccgagagtactttggatcgatggtgtacgagctgacttgtcagaaacatgtaccggatggtcagggacggtcaatacttgagcaaccaggaggaagcagagagtaagaaaagcggaaaaccgttgtaactttcaacctactcgtagactttgaattgatctggaacagagggaaggccggctgcagacattgaaagagaaggatgagaaggatgaacgtatcaagaaaggatcaaatgaatgaaatagctctataaaaggacagcatacgaccgagtcaaccgaatgttagcaaattgagagatttcagatgacattcagcacattccgtagcatcagcgcgcagggagagctatgagcagaagattattagggagcacggatgaaagagcagaatgagtgtatgtatagctgtgagctgtttctctctgagcggttttggccgaaggtagagtagagtctcacggagacgccacgtctcactagggagacctcgctagattgttcctcatcgggtttgtggtcgatcagctattgagcagccatcaatcatctgttctactttcaaaatccgtggtcatgaaggaagagaaagacagagatgcgcaagaagagatatttaactcgtctgtttgtaatatctaacaggatttgtagaaagagtagtcgaaagcgggtattagataagggccagttgaatcgacttggccgttcgtcttctttctatttttctctaaacgttcctcggttgccgttctttccaaggaaacagaacattcaggtagtgatagttgtcccatcgctggtcattcacataggtagttcttcttggaaacaacgatgtcgttctcgattccccgagtccaatccactctcagggcctctttgccttgttcgagaagaacctactcggtgttgagctatgttcctcatcaggtaagtgtcctttttttcttacccggtaatcttgatctaccctagggtcgcctggtttctactcggaattgtccacaggtcgtctctgtctgctatcgtctactaacagaagtgtctactctacctctctttccattcatggcgttctctttctctccttctcttgtttctttgcctttctttctgtccatccttaggctactcaagatatcgatccaatcacccctcgaacgaaaccccctccgttcttctacaccggaaagccgaactattttgcaactataaacaagcttcagtccgaactgtttgcggttcgaaaccggctcagacaagctagagtattccccatcaagaagggaatgcccgagcagccaaagaacacttggaagtggaaggataaggaggagtttgtcgccatgctttctgtcaccacgtttgtcctagtcttgtctcttcttccacgatttatctatgattcggccttcgagtcagatagtgctatcgcgagcaacacctcgctcatcagttcgtctttgtcgtttgcttattcggccctggcatcaatcccattccagactcaagaagacggaatacgagatgatcattagaaatctggagcggctgactagagctcgccacgttgccagctgcgtgtccgacctcaagtctgttgcccgaatcacccagcttatcacaccttacttcaagatcaaagccggaggtgtccttcctacctcggctgactttacagtagtccaggatgcgtccgatgagaagagctctgctcgacggacctcggaaaccaggcctgtgagcctggatgagtttggccgatcgcacactaagggaaccaggaaaggagctaaggcagaggtctggatgatcccaacaaaggcgttcgccgagcagttcaactcaatcgctgagagaaagcgacaggatgagttccttgaccagctcaaggaacttattaagcagtccgcagccacagaggaaaaggctgttgcttcggcggccaagaacctggctcccgtctgggcccgtcgggacgagatcgaggacgctatctgggagagggagagcaaacggttgactgatcttggcttgccagttcctcccagaacagtcgtcaagagtcacgcgtcatctacagtggacagcaagatcgacataaagccttacgtcaacgtattgaggcagctcgagatggccaaatctcgagacaacaaggcctcctccactggatctggatctaacgcctcagatgtggccttgaagtctgccgacactgtcgatgcctcgacagtaaatgcttcttccatccctaccgctagtcctgctgttcccactctttccaccccgtctgctatcaagtcctcttcgtcgtccaccacgtctacttcatcattacctgtagcaggcgtacccccgatcgagacggcttcaaacaatccagattcgggtgctgttagccgagacggcacgatctcgatcaccaacccagctcgacctcctttgagtttgaacagcgatccagagttgggttccattctaatcaacaatgtgccgatccatcgatatttcaactcgcccaaggatagagaggccatccttcgaccgttcaagttggccagacttgtcggggcgttcaatgtgtttgcgcttgccaagcagggtgggtcgacaggacaggcagaggctattgctttggctgttgccagaggattgggtgtccaccagccgatggcgaagactgttttgcagcagggtacgttttgtgtatcttcctgtctttctccttctcttcttgagtgtatcctcaaccggctgacctggttgtctctccttctttctcttgaaaaattacagctggtttgttgggtgtggatcacagacaggttgagaggaagaagaccggacgaccaaaggcgaggaaatcgaaccagtgggtcaagcgttaggggaatccgaagcgaaggaaaagacaatttgtacatggatggcaagaccagtctttttgttgtgtatcacatgcaaaacttgcgcaacatctcgaaacgtcagcaaggagagaacgtttctctacagactacatgagtatagatggcaacaaaggatatacggagaagcagaagaagaaaactgctgctagccgctttgaaatacttaccttgatattgcaggtgccacgcttctactaaccgatccaagaaggaaaagaatgaactttcgtctgtgtatcttgatggattcagccagtcgctatgttttcttggttacgcttttctgcccgaaagaaactgaagcacgcgagtaggttgatagggtgttgtccccgtaatctattttgccagacagccttccaaaaaagtttccaacccagagcatacatcgatcagatgcttcgaccgatcggcctggagaaccaaagtataagaacagacaacgaaggctagccagaaaaatcaatatcggagaaattgaattctggattctcgtacattgtttccaggatttttccctctttaaaatgagtaaccggttacagttgaaattatatctaggctgttagatcccaacatacgtcgcgataatgatgtaatccttgctcggccgtccgtcgggcgtttatgttcccgacaaaccgagctgttatcttttacctccctctgaataccatctaacctgttcagatctatttttttccatttctttcttttgacatcagtccatgatgtttgctcttcgtaaaaagatcggatacgccgcccagcgcgcttcgacacacgcttattccactatggcagcccatacggccgggccggttgatggctttgtcggcgctgttgggcaagtatttttttttctttcttttctctttctccttttcctttctcttaccagtcgtattccaagatgcataaaagttgaccagaactcgtcatgatgtgtttctctgacgactggaacgatggattgagtaggaacactcctttggttagtccgacctccaaaagacagagtcgtcatcgttctcctctcagagctcaccctatctttcacgtttgtatatttttcttttatcgtgtctctaaagattcgacttcgacacttatccgagcgaacaggatgcaacatcttgggtaaagctgagttccaaaaccctggaggaagcgtcaaagacagagcggccttgtgggtcgtgaaggatgctgaagccaaaggtttgtcatcctcctccagtcgaaaccgatccaaaggaagggagactgatcttgcgcaatatcttccttctctattcatcccaatataggtctcatcaagcctggaggaactgtcgtggagggaacggctggaaacaccgggattggactcgcccatgtctgtcgatccaagggctacaaatgtgtgatctacatgcctgataaccaggtgggtttaatctttctttacttctttcttctctcatgatcagtaactgaaggaaagctcatcgtgaaaacgcacatcagagtcaggaaaagattgatttgctcaaaatgttaggagcagacgtgcgccctgtgccaggtaagtatcaatgtattcttcagcagtacgcagtctcttcaactgaaacccatttggatcgttactcttctttgttctgttcgtatcctccaacaaaagccgtgccgtttgacaacccacaaaactacaatcaccaagccgctcgacacgcggcttcgctcgagaacgcggtatggaccaaccagtttgacaacgtcgcaaacaggcaggctcatatcgactcgaccggtcccgagatctgggcccagacgagggagaccggtctggacgctttcacctgcgcgactggaacgggtggtacgttggccggcacggccagatacttgaaggacgtgagcggaggggctgtcaagtgtttcttggcagatccaccgggcagcgtgttgttccagtatttggaaggtggtgagaggaaactggagcggactggaactgggtcgattactgagggtgagctggtctttttttttttcaaattaatatatgcatacccgatactgcgagctgttactaatgttgacaaggctcgttacaggaattggacagggccgggtgacggaaaacttgaagccagacatcgagattctcgacggcgcagtccatattccagatgctgagacaatcgaaatggtataccgactattggatgaggaaggaatttatattggtgccagctctgcacttaatgtcgttgctgccgtcaaggtggctgaaaaacttggcaagggtccgtttgtcgcattcaaagctatctttcagagttttccttttcaatctgggcgcgatttggttcccttagattcttgagctgacttgaaatgctgcctctttttttcctcttcgatctctctttggcaggttcaacggtggctaccatcttgtgcgatggggcataccggtaagatgaccttatttcttattccaatacttccgctacgttcatttcatgtgtgctgaaaagaaactactggatgatccatttcatgcagataccaaaccagattgttctctagaaagtggcttgagtctaaaggattggacgtagctattccagaggaactcaggaagtatgctgtgttggagtaagagaacgtaggagaaaaaccagaggaacaattcttctttagttccgataaaatgaaatgtcttggttgtctttcttccccttttctcaatcgtaaaaataaaacaaaagataaaaagaagaagaagaaggagagtaggagaagagcggatagttcatgtgagatggcatggatcagaatgtttcaggaagcagtttgtgatgaagtacactgccaaggtgtacatgttggggtaacagtgagaacccagaatagtccttcgttggtcgtcgaagaacgttcaggcggatatacacaaatagacaggagataacctatccgtcagcgatgttttaggatacggagaattgcatttttgtggcgtcaagtcgtgcatccatcgaaaccgggtcaaattcatgcaaaaccatgaagagaggaagaaagcattcaaacgatcttccaagagaacaagccgagtactcgttgagcagccaactgagggtagagtcgccttgcttagccgagcctttcgaatatacgcgcatgcacgtgctaacgatggtccctcttccaaaatgcaacagaagctaatcgggggatcagctaataactcacacctttttctttgtctgaacaagatttgagtgtaagagacagtcaggcccgcatgggcagtgaaatactttattgttcgtttttgtttgacgcccaatcttccttgaatcaacaagtgccatctgacaactccacctacagacgtttgagcaagaagcacagtcagaccctggaagatcgatcaggctgatagatgtacacacacaggctccggacctctgatcgtttcaagccgaaacaatgcccagttttgatgaaattctttgttttacaactgatcagcttcggcccccgtttgaatgcctcaagtactatttaatattcaatcagccaaacactcggaggaacgaccaatcatgatgactttgctggtcatattcatgacgtctaaaacgacgatctattttctccgaggttttccgtttcttttgactcgattaaacattgtagccagcatgggtttcgtgtctctttccggacatgcgttgtaaggcacaacagatctaggaatcgaagaaaagaacaagacctgactgctgcatagaaaacctaaccattcatggcttcacggctactaatgacgtacagaaggctgaccaagagcagagagcgactgaagctatgccatgccatgccatgacatgaaattctgaatgcatggatcatgctcggcagaaggatagcgaacatggtcggtgtattgactgatcttcgactgcaggtgtaaacatcttggaagaactaaaaaacatccaggataaacagctccaaggatcagtccagttcggtcatttcgggaactatatgttcttctttatctctactttctattcctcttctgctctttcgagttttgaatatcggcggtcgaaccaaccgatcgttcattccatctgtttgctctatctttagagggtggaacaaatctgacctttctggcccgtcgtagccgttcgttgtcaggacgggatccggttccggctcttatgtttcttgcgctcctcctattgtcttcgttttgtctgttctgtcttcatgtggctgaacgaatttggaaaaccaacaagtcgatcagtttgggtgctcgccatgcatgttatatagccacaaacatggtctatgtttcttctccttctccttctccttctccttcttcccctttgctttagctggtttatctttcccatttctccctttcatttggctgaatcggtcatcctattccactcagtacttcttctcgggtatcttctccgcttgagggtttcctgcccactcttgggtttcctgcccactcttcttgttctcatctctcctctgatcttacatgttggatccttcccacctgtgtatgcgtttgctccaaccacgctccccagactactcctacactcaagatatgctcattcccatctctccatattctgagtgtccaaaacgaatcacctaccttcccacccttttatactccactgatcgcctccatgtactgggtcaaagagctgaagtggatatcaacctccatcaatcattgccgtcgccgttatcggatcgtttgactatgacgaagacgttttccgaagggcggatggtagaaacagactttgagcgatccaactctcaaaactctggatctggtcgaaccacaccggatcctccgttcggcgcgcttcctctgtgtctcaacaatacggcacagatgtacaaactcatggaatttagaactacgccacggtattgtagtgagtggaatgcttccttttgatctcatcaccaatgcttccattcatctctgcctgaattggtcagggtgatgcgcgcgaaaaaggctgcagcctataacgaaggtctgaccatctgttatttgatactggtttgctcttctgttctgaattcgctatcttcttgattgggaaaaaacccccagaattaacggtggagacaatccaagggttaattagtcgcaacgaggtcatttcgccgaagaagaagaagctggagagagatgttctggttgagtacctgttttattggacgtcaatgacattgcacccagtgagtacttgatttccatcttctcatctttgttattttttccttctgtccagttgcttctgatgtcgttaacttggtgataaatacattgatgctgacccgatttctttttatcagttcatcatcttgatatgtaccgttcaatacgttgagcttctcaagtatatgcaccctagcatcagttttactgggagtgagtctcctccttccccttccttcacttccttcggccctctcttcatccaaaaactctcgactcacgtctccttctgcgccgtctcttccctccttcaagaggtgcaagatgcaatacttcgtgttatgttttccgcctttctcatcgctaccaagatggtcagcgacgtctgctatgccaatgccgcgttcatccgtcataccccttggacgctcgaagagatcaatagtatggaggcagaactattggtgcacattcaatatcgatcgttcatctctcctgtctggtgagctcagcctttcaacgaagctgtctatatttctgagcatcaagtatgtacacagtgctcacatccctctttgttcgacgctatattctctcgtggggggtgtagcctgctccgtcgagccaaagacttctgggcgcagccccatgaagacacccactcacccggagacgaagacgatgacgatgatgatgacgataacgacgagactccgttcggtccgacactgtcgtcttatga

SEQ ID NO: 1143 - DNA, 15818 bp, Xanthophyllomyces dendrorhous
atgatatattgagtggctgaaatctgactcttgtctcctcttctgtctttgtattctattctattttattttatttccattatcatgatagtcagcactgatcggccagccgatcaaacttcaatctttctcctttccgttcatatcctgcttttgttttgataacctatttgatctctctatcaactcgtaacatctccacaaaggctttcaagtatcgttttctacacgtgcggaaatgaagggcgcttttatgactatctgcgcttgagagctatcgcgtccaaagtcttccaacaataacatgactcttacgtttttttttcctttgctgctgatctctctgttcatgtacatcgcttattccttattgttaacgtaatttcgttatcggtccatgtttatcttgttatatagatgttattgaccggtcaatatttgtccgagaacggcagaatctcaggataatgggagccaggatagcatgttcttcattcaaattctggactagtctcgtatccatcggaggaacaccgaagtagttgcatagatatgtcataggtctatccgatctatctcttccgtcaagacgttgatgtgtctagcatgacgtgtcgaagcgcttctttggtagactccgtcgagaatcgagagttcgagaatctatttgtgccttgcaatcgaatcactttgattccaagagcctgccatgacatgttccaattcagatttatagagttaaagctagccacctgcgagatgaagaagcttcgacaatatccactcacctcgatcacatcagtctctatgtcaacctttccactttcgagataaatcaaatgagatatcagctggctaggtttgatccggaagcttaataggttattctttcgcgcatcgagcgttgttggtgtgctcgcattcccacctccaccaaccgaggacgacaaaaacgtggagctcaataacgacgggcgtcttgaatgagtttggcgtaccggagaatcatgtctgatagattggccaaagcaccaagtacaagacatcagaaatctagagtctgaccaggagggagaaagatctaggaggaaccgaccgattgagtgtccgaacgatggcttctatgtacgtcaatgcggtgtatccaatagtctctctatcgttcgacgagtttactgtagacagctcgaagaacagatcgtcaagaggagacttcttcgagacacgtccaactctgagggaaagagcggtgctcacatagaaagatcttggccttcaggctagtactggttgcgatggccgagcctacgccttctagagctaagcacggcatgatgctacagttgatcaacccgtcacccatacagattatcgaactgagttttgatctctgatctttgaaaccacaaaggaagagatacaaaagacgcagacgagatatccgtacctggtccaaagagacccgcacgaatacacaaaaagctctctcgtggctagtgaagaaaggaattctggattcggtgtcggaaagatttctctacaacgagataagccaggcacagcaaggagtcaacatggccagcacattaactagcttaagtcaagagtttgaaaaatgcgagatctggaaacatactggccataaacgttgatgtacaatatctatcaccgcaccgatggaaccatgtgaacattcaattcagctgcacagaaccattgtctcaaaaactcccagcggtttcacgtatcgggaacgaaaagagatgacaaactcttttaatccggcttgttaaaccctgagtagcgtccaaactattctcatcttcagcttctccagtccgtttgaataccagattgcttccgcctggcgtgtttatagctttcttgctgctctgagagacccctcctctacccaatgaatatatgccatcttcaagtccgacttttcccagtcgaacttggaccggtaaaggggaagaatacgatctatttgtagcagattctactgttgaatctgacaaagcaggttcagtgaccgccgggtgagatatattacactggcccacaatagtctctccattttcctttgaagagcgcagaacaaggaagatgacaagaggttcggagttggtcgtcggcctcggaagaataaaacagtgcaggatgaagcttactagttcggccgcaatcgtagcagtgtggtttgtaagaattgcaggaatgacgctgcattgactttgaatctcggtgatcgaggcaaagagaaagatggctgcaggaagggaaagaaaaaaccgttgggccgacgacaaaaaaacgtttcctagcgagcagtttctttttcattcaataagaacgagctctgttgacccttaatatgtattctgctaagaggcatcaggacgaaaagaacgagaacatacctgaaagagaaccccttgtgtgctctctgcaagactgtgagaaaatgataagcttccgcgaagtatgatttttcttagagcccacgagcgatactgaactcaacatactttcagactcgaagtgtacgaaaaatcctaagggtgtcaagccggacgtcggtcggctagtgctctcaaatgatgacgtggcatatagtgcagaggagatgaattctcacgatgtaaaatctccttgcgatcttcggccaccccgtcccagagctcggatgtgccttctacaatctctctccataaggactttacttcctgctcgctagcttcggcaggtagtcggtagctgagtagacggataatcgccccgagtgagcttgaagaggcatatgctggagctaaacggatcaacctagatcggatgtctccaatggatggaccccctgtaaaacgtgatgaagaggattggcagtcagctcgacgattcacggaataaggatcaaccctagagagaagcatacccaagcatctgaggatctcagaggaggatccgccatcgtcactgatcggaagaatgaacgtagttcttctaccgaaagctgagcatattgcgtttccacctgttcctccggagatgcaacagatagagacatcggttaaatctaggcgaacatagtagcagacgataaatttctcgattagtcttacaccaggggaaacgagaaggagcctcaaactaaacgaacctggtgagagatgtttccgatcagtagatccagttgaagaatgatcaggcgtgttcgtccgactagatgtttcagcaggttgaaaggcagatccctcgatagggtgagatgtaaccggtgtatcgaacacagaggaggacacccgacggagggaagggtatggctcttgatctgtgcatagaattgttaaatctgctggactcattagaagtaagcttgctggataatttgggcgagcaagcgattagatcgatctgagaacaaccaaatcggacgtatcaagcggtaggatctaatcaacgcttaaccctaaccgagacttttctcacgtggcgctgaattatgtaatgcatctacaaaacagatgatgtaatctttcgtgcctgaaaatagcttttgtgactagccagtctaagcccatactgcgcgtgtgctcttagccgagagtcagtatcaagccgatttaactttcaacgcttcgctcaatctcatttccctttccttggagtagctcgttccgtgggatcagtcagttatcagtcagcaagatgccgaagtttatagacaagatggagtccttgagcgataagtgagtccgaagagtcctttcggtggaatttccattgctcatcaagatctctttccttgtcttcaatcgtctggttgttctcggtcttggcattgcaggctcaagagcaaagcgaaggtacgagatacgcatttgtctgcattgttttaagtgagccgctctgaaggtatacctatcgatactctgtttggttgtctccttcatagatcttggactccgatcatatcagggggttcaagcaacaacttcgaacaacatggaaccccaatcatcgacatgatgaggagcacgagaaggtttgcaatctctcatcatccatctcttctgcaactatccttacggctcagtgattgaacaaagcatatatatacgcgtacaaaaggaaatcgatcgacaactgcaagccatcagagattctcatcgattcaatagtttcgcgccagagaccagtggaagtatcgttcgaagtcacgtcgatggggttcgttcaactttcgaaatcaggttacaagcctattctcgttatgcttatagccatcattgagagagcttatcgtcgttccttattctatttcagcacgacttcttctgggccgtttccattatggtcagtcttatgatactcaaggcctcatattagtgtttaactcagtgcgaatattacaactcgttatcagctcgaggaagcaaaggagtcgatcatggtaagccgctcgtatcacgattcatcgacttttgttggagcctccacacatacgctttttgtctaagccaatctcttctttttcttaaatcgatactatgactcacgcttcttatttcaatccaaacagatcttagattggtgagttgtatcgttatatatgctgatgagacgttgggatagctaatttgctcgttattctatctcgatttctgaacataggtgtatgccatttgtccttgttcacagttcacgaatatatacctgcgctgatttcttttctcattctgtcgtccttgtttctctcacaagggttgacgcctgagctttagtacgccgatttcgtctatctaaggggtttttttaaacgatcatcatctgatagctcatttcttatacattgcttgatctggcattcaagcttacgaaggcctcccgctcagcatccagaataccgtcttgataaattgcttcaccgaaaggccaaagagggcgtcaagatctagtacgttctggccagatttatcaagattcgtgacgacacaagtgtttgactttcggattatgttcaaatttcttggcgggattctagtatcatcgtttacaaaggtaccgagcccttctttcgattgaatctggtcatcacttttcctcattcacttcctttgttggttattattgtgtgcgcgaaaactagaggtcactcaaacgatgagcatgagttcgtcgcacacgaagcatgctttggaagagttgcacgagaacatcaaggtcatgcgacatcctgatcatctaaatggagagattgtgttgttctggtcgtaagtgtttcagatccatgcctcaaaaagattggcacttctgtatgaatcaagggaacataggtagatctcgggttgttgactatgtacaacatttatctttatctttcggtcagtcaccatgaaaagatgactattgtcgattccacccgagcgacaatcggtggacttgatttgtgctttggtcgatgggatcttcatgatcatcccttgagtgatgttcatgtcaccaaatttgcagatactctattccctggacgtaagtctaagataaatctcactacttcggagacccctcgagtcctatctcatgttgtataacaccacctgatgtcaaaccttcatcttggcaatgctgcttatcatcaatccaaacagaggattacaacaacggtctgtaggcaaccattctcaataaggtctgattgacgtgctgatagttctacgttccggcaacacacgcaaaagcccgagtgctcgacttccaagccgtagacgagtgagtctccttggtattctacgcctatatcacaagcctgaacaaatcttggtctttaaattggtgtggaaaactctagctatgcatcaaatgcagtcgatatgacttcagttgcacgaatgccctggcacgatacatctatgacaattatgggaccagcagtaattgatctttgtcagcatttcgcggagagatggaatttcgtaaagcatgtaagttcttccttctacgggtccgattactgaatgttactcgtgtccatagtgtctgatggctaccttcatcatgtatagctcaaatacaagcacaaagatggatatgactggcttgctcttccctctcgtatgtctttcttcattgatagaaacttcagtcttatcaactgacagtgatagacctttattcatcttgatgtcaacaattccagcatacgaagctgatatcgacgcttgcgataagacgcttgaagagcgtcgaagcgatcctgaagctggcctagatgaggctcgccgtagcgagcgacgtagggagcaccctcatctggccgaatggatggatcgtggtcgacagttctatcacccataccatttccatccgtccactgagcctagagccgaagagcaaatccccagaggaagctgtcgagttcaggtcgttaggagtgcgggtgattggtctcatggtgttttagtggaagatagtattcaaagagcatatgcccaattaatcatggaggccaaccatttcatctagtgcgtttcaaaatcgttctttccgcaccttgagggattcagtatctacggttgattttatactgaattttcttttacttggatttacggtatcagtatcgagaaccagtttttcagtccgtccgcttctcaatcttacttctaggttcttgactaacggatttcactcttcttacgatattttcttagttaccgagacgtccgctggtcaaacaccagtagtcaacagtatgtcttacctctgtcatgatgacctcaagcgcaggtactcagatcctctcccttttcatttcattttggatacttcagccgttgggcaggctctagtggatcgaattgtatctgctgcccgatcaggcaccaaattcaagggtcagtactctagtttgtggtttaatcggtcggtcttagagtaagaggccaaattcttactctgttcttggttctttgattcacatgcgagaacagtaatcatcatgatcccagagatgccagctttccccggtgatctgagtgcccagggtggattgaaagctatcatgggaggttcgcgcgtcctttatcgtctcttgcttgatgtcactcccgtattgatttcttgatgaatttgccgtgcgcatgatgctggaccgttgtaaatgtctaccgtcgtagcacaatatcggtccatcaaccgaggaggacactccatcattgaaatgattgagaaggaaggaattgatccgactgagtacatccgatggtacaacctccgatgctagtgagctttctcttattcatcttggcattaaatgtagtccatgtttgtaatgacaaaaactgagttacccttagcgatcgtatcaacgcacctaaatcttaccttgaaaagatggagaaagacgtgagttctgcgagaggctatatcctttgaatccttcgagatgtcgatcgttgaacagtcgtgcattttcttcttctccttcttgggctcggtgatagtctggggtcagctactttgaagcacagagtaggtccttgcttcgtcaatgctccttaggtatcttttacaagttgctaacattctcgctgtcttccacatttagtcgctttggccaagatctgggttggttcggacgatattggggataagcaaagtatgccattgctatcatttgtagttttcgaaacattgcctgacccagtcgaatctttaccgtctatcggggcaacaatcgatagccgatgaggtcaacatcaagattcctatggacgagagtggggaagttgatcagctcgaatcggccgatacaggaaagaccgttcagggtgttaaggtaaagtttcatttatcttaagaattctttacatcctctaaatttaagtcggtattgattcgttctcgagtcgacagatgcccaaaacagtcgaagaagcccaggccgtcattgacaggtaagcccactagtgatcttcggcgaactcagagcgtttatctcttattcacagttctttctcggttcatctttcaggttcgagaaagcagctccttacaacgatgatcaggtatgtgtactttcttcatctcttgtttggtctgtcattatgctgataagagagctgggttgacttgggcaggtcgaggacaacgttggtcaacacgcgctcaactccaaggatgggttgctcagcacttcgtaagttgagacgaagtggcaatggtcgatgcagcttcaaatctgttgcacttgattgatcagaccgaattgatattttgtttgaccgatagctggaccgggacgcaggaagaggagctcgaggcgtacatcaccgagctatgctgtaattcttctcttctgctctttgatacattgataaactgtattaaacctggctgagcgattgctttgtttgcgcttggctactgggtagacatccatagcaaaatcatgatcgtggatgatcgacgagtcatttgtggttcggccagtgagtaaagcaaacatagaattttcagtgtgtgcgtatgcgcttcttgcagcaatctctattttctgacacgcgtttgatccctcaatgttcgctagacttgaacgatcgatcgatgtgtaagttggtctcagagtgaatctaaacatcactgatgtctgcacaagctaaaaaagagcaagaggtttcggctgattttattacaggtggagatcgggattcagaaattgccttggtcgttgaagatatggataccgttgagatgaccagttcgtgaccgtccttttgtgcttcacaagaggtctgtgctttcatagctaatagtttctcaatgaacgtgacagtggatggcaagaaatatgaaggagcgaggtgagtaacctggttgatgttgatagagtacaacgccgactgaatatcactgaacgtgtttttggtcatcttgtatcgtatagatttgccaaacagtggagacatcagctcatgaaggaacatcttggtttaatcgtgtaagtcatgggcctcaagggaatgtgtctgtgtgtcttgacttgtctaagatattttcttcttcttttcgatttcttagccctcaaggtcatcacacagaaggagaaaagcctacgcgagaaatgatgcccgcgccccaccctcatactgactttttaggtacggatgaagaccagttgatccaggatccactgagcgacgacttcctcaaggtttgtttctccacggttcctcgtcggatgctcagaggaagaaagtgagtatgttaatctcgacgttcgtttttttgggactttcatggcagctctggaccgggacggcaaagaagaacagagagatctttaccaaggtggtgagtgtatctgagtaatttgcttgagtgaagaggtcgacaaattaataatgaaggtttcaccgtttcacagttccggacgcttccccatgatgaggtcaagaactgggaccaatacaacaagtatgcgcctagtggcaaggtatgtagggttactttgtggaaacgaacatgttgtaaagacgactttaattgagcacacgtgtgcgaaatacagactggacatctatcagaccccaacatgccgattgaagaggtcaagcagaggttgtccgaggtgaagggacatctagtcgaaatgccaattggattccttattgaggagaagcagctcgtcactctttccaatttgggcgaagtcaactcaatcacgcttgtgagtttgatggtctctcacttttcctatggttagacccgaatctgtcggttttgtgagactgagaatatgctatctgccttttcacagcccatatacctctgaaataccatgttatttgcttccgaaactctccgtacacttatccaacttgatcgtcttcttttgtcgctttaaaccgattggcttgctccttctatcgtcttatcttggcgtgagatgtgagatttgagggatgagatgtgatgataatttcgtttataaccgtcggcatgaatcggttgtcgggtttgtctcgtggctggttacccgggtggctaagagtgagagcgagaccgtgttcttccgatgagtaggcgtaaaagtggatctactgggagtagactagaaaaccgagtgaaaaacactatcggtctttttcctagatcgagcgaatttctcggcattttcgggccgcccaccggaagaaagttgaaccgggttcttacgcgagatcaagactgagatgggctagcctagacggatgcttggtatggttgcactctttgcttcttgttccgacaacttccttggtagatgtgggcatgttcatgcgtcgaatctgtttatttaattgtatatacttagatgtgcacattagaagagagaaactttgtatatgaaggggacgaacggcaagagaagagtgtgaaacaagcagcaatgtgcacaaccatctgatcatcggatgggcaccaaggaatagaaaggagaggaaaatccttttcaaacgtcagctgggcgaacgatggaccgaggcagacacagacacaggcagacaacaatgccgagaagaatgggataccatccatcccgaacttttccttctttctttctcactttctggtcagaccgtctttgtctgtctgtgctttccccggagccatagcatgaggcggtgtgtataggtctactcgttcaatctttaggttagatctcccttccggaggctatataaactcatgaatctaccttgaatcgattactcctctctttccatctttctttctccttccatctcacttccacactcgcacattcccaacttacacatagtcccattgaatatcacgaaaaatgtccaaaacgttcactaaaaagtttgaccacaccgccttcaagggtgaagtcactatcaacaccggtcttttcatcaacggagagtttgtcgaccctgtagagggaaagacaatcgagtgagtccttggtcttgtcggttggtcgattgatcagagaggaagccctgcgttttctcaggagtcgtttgtacggaatcgctaatcatggattgactgtctgtttcttcctattcttccgttctctcttccacttgtctcctctcttcctggtaatgtgacctcgcctttgtgtccgtcttgcacgcgctgcttccacctccaactccgccttccacccacgcccacaggacgatcgaccctacgaccggagaagttatcactgccgtcagtgcaggaactgctaaaggtatgtttcagcacccgcttcttgtccttctctttcacactccgactagatgcaaggagccggccactgatcaatcttctcattcgcagatgtcgagatcgcagtcaacgttgctgagaaggcgttcgaagaggtctggggagagaaggtgcctggacacgaacgaggaaagatcctcatgaaattggccgacttggtcgaggccaacgctgacgagcttgcggcgattgagtctcttgataacggaaaggccttctcgattgccagatcgtttgatgtccccgaggctgctgcctgcctcaggtattacggtggatgggctggtgagtaggattcaaaggtccttctccacgttagccaaatctcatcaaccccccctcttttttgttcccattcagacaaggacggaggaaaggttatcgaggtcgaccagagcaagatggcctacaccagacacgagccgattggagtcgttggacagattatcccttggaacttcccgattcttatgtacgtatcaaagcgttgtgacgttctacatctttgactcttagattgctaatcttcatgctcgtgctgtccttccgtttaggtttgcgtggaaggtcggacctggtaagcaccctctcttatcatcccctcttttgctctgactctgatcacctgctcatcattcgattcactctcttagctctcgcttgtggaaacaccgtcgtcatgaagccctccgagatgactcctctgaccgctcttcgaatggttgccttgatgaacgaggctggtgtgcccaagggtgtgttcaagtgagtggttttcgtttttttttgtcatccagccacgtttttaataaccgacaggcgctgattttaacccacgctttctcgtccctcgctctctagcctgatcaacggacttggtatcactgtcggagccgccattgcctcccaccctagaattctcaaggtcgccttcaccggatcaactttggtcggacgaaacatcatgaaggccgcatcggagaccaatttgaagaacatcacgctcgagcttggtggaaagtccccgaacatcgtgttcgaggacgccgatctcgatcaggccgcatcctggtcgtgctttggaatcttcttcaaccacggccaggcctgctgtgccggttcaaggatctacgtccaggagtccatcaaagagaagttcatggagaagtttatggcaaaggtcaaggcgctcaaggtcggaaaccccttcgatgatgccaccttccagggtccccaggtgtcccaggctcagtacgaccgaatcatgtcctacatacagtccggcaaggacgagggtgcgacattgcttgccggaggaaagcgacatggtgacaagggatacttcatcgagcctacggtgttcgccgatgtcaagcagaacatgaagatctccaaggaagagatcttcggacccgtcgtcgccatcgccaccttcaaggacgaggccgatgtcattcagatggccaacaagtcggagtacggtttggcttccgcagtgttctcccgagatgtctccagagcgatcaccgtggccaacaggattcaggccggaactgtttgggtcaactgttacaaccagctcaacagtcaggttccattcggaggattcaaggccagtggaatcggtcgagagcttggcgagtacgcgctccacaactacacgagcatcaagtcggtgcacatcaacttgtccggaggtaaccctctctaagcggggtgattgttgtttcttctttctgttttctccttctatctcttcttccgggtctacatgtgatacttgtactcttcccctctttctctctcatgtcagtgctgtgactatgaaatccttcctaggcttggttgtagtgatcgttgtctttgtatttataccattatgtgtcgccttgatccatgtctgttcttggtgtctcttttgtgactcgtgagaaagcggttaaaaggtcatctttatttctatcctgagatcaagtgcgaagctcgcgccaaattctggacgattgtcggagcaacgccgatagtaactctttcaacatacccgaactccatcttctacatacacacacttacagtcacgctttcagaccgaccacaggaatagagacagatgaacgtctatccgctagcatttggacttgcatcctatttggccaacagtggacggaagaaaggctcgttgtcaacctctggaggtgggtatcgttcatcttctcgtgtgttgaattcatcaccgagtcgggagcggcctcggatgaatggtcacaagcattattcgtaccactctcaaactcactcgttcttgggatgaaaaaatgacaaccaaaagcgctcggagcatgggtcgtgggatattttaccatggcgaacgacctacatgtaaggattatgctccttaccgtcatatgggcttgcgatggacatatcgcaggtcgaccgagctggattgaaactgacggattgagggttcgaatctcctggaccaaagctttttggagcattgatgatagtcagtccagtcttttggtttctcttcccaggcaaagtcatgtagacacagtgctgagttgcgtacgtgcgagagaatcgttcaggtgttttacctccttgggtcgaaaggcacgtttctcttcctttgctattacgtttctgcttttcaaccggtctgacatcgatttttcctgattaccatgtgcgcgcttggttctttactacttcttttggttcttccttcctgctgacccagctacgaaatacaaatccctcgtcaaggcgcaacttgagtctggccatccgtcatcctcgacaccatctgcaggccatcgaacgttcttccaggtcgtgtcgaattcgttcagtggcacgatcgttgctatcttttggaggatcttctatgggactgatggtgttcgtcacggtggggacgtgagtttctctttgcttgtatcagatcttgaacgtggggcgtggctgacccggttgtttgctctgatattctttctgcttttcttcgtttttgtttgattatctgtctgtctgtccgtccgaaaaaaaaaccccccacaaaaagtttctcgacttgaagaatagttgtccggtagtttccacttctgagctagacaggtggagtaaggtcttcgtttacgccgccatcgggtccgtgcttgctttctctcttcttcgttcacttggcttggctgggcgtgtctgatgttccaagaagatcaaactgatgtttctgtcgcgggtcatcctgatcttttgagagggaagtaggcatttcgcttgttgtctaggtgatacactcgcatcagaggttagctttttttgtgactcaatcgacacttggggaaggtgagagggttcgaagggaagaaagtgaaggcagttgtgaacactgcaatcagctaaacgactggagaaagaaaagacagatcgtgattaacatttttctttcttttctttcttttacttccctacccctgtttcggtgaccgcgctagcttgggattctgtctgtaagtatggttgtcgtgagcgacacatgtataagcctgtatcgttcgactttatgtctcctgtccggttcctttgactaaatttctgattacttcgcgggtttgtagaaatctcgcccgagacttgtgacgacgttccgaccggtccgttcgctctctcccctatccctcccacaaaaaagaaaaaaggaaaaactttcttcacttgggtgatattgcttagtccttgactgatcgtctctgttgattcatgtcttgctcggcgtcatgcgtcggaacgaacgaaccccatgcgcgctctaccgaatccgcacacacatacaggtcccccctggaacgaacggcggggtcagtctgtttggcctgacggtctccctcctcggcggcctgatcatctcgtcgacgtccgtgctcgttctgctcgcggagagtccggcatgcaggggcgagcctggtatggccgactgggtgcgtgaggtgatgaccgccgggatggccgccggtctagggggcagcctgctggactctctcctgggcgcgaccgtccagcggacggtgtactcggcaaaagaccgtaaggtcctcaccaccgagccggctcaagccgattgggaggaccaagcgttggtggtggtcgctggttggaacttgttgacgaacagccaggtatgtgtcaactcttttttctttttctttttctattttaaatctttctcccttcgccccctttttccattgattcgtgagaaaagaaagaagaaagaaacaaaaccataactgatcttctctctcgatgcgaccgggtttgttacgaaaaaaacaaaacaaaacaatcaagatcaacttgcttacaagcatggtatgcgcgcttgcgtgtggttatgtcgcctatcttagttgatcgtacatgtgccttgccggagtcataaatatgtgtgtgtgtgtacggccgagagctgcgcgtcaagtgagaagggatgcttgacgttgtcaacccccccccccctt

SEQ ID NO: 1144 - DNA, 3839 bp, Xanthophyllomyces dendrorhous
ccccccccccttctttatttagtctacgtactcatggcattttgtcctttgtctttctcttcctctttttgagccaagtttgcaacctagacaaggaatggttcgagccgagagccgtgttatcagagtcgaacccagacaacggaaagcacagagcgcacgacgacgagtgaccgtaaatagaaatcatcaagagacaagggcgtaaaggagaaacgtcaagagtagacattgaaaagatgttcggacaaagagatcgatgaggaaacgttggcaaagaaaagaaaagaaaagggaaggataattgatggacgatatagagtacatatgacacaacgtggtcttcgtggttcgttctccgttttgttttcgaatgggtttcttttttctgttcttttatgtcttccctttgagcgaaaactagatcaagctgagaccaaagaataagaaaaagagggatagattggaaaaaaagatgcaaggaaaagatcataatgaaggggaagggaaaaggaaatcatggatatgaacaggccaaattgaatttggagatcagacgctctgctcggatgagccgacggtaagggcacctttggataagagaagagaaagtcctaaagtcagctcttcctgcctttgatccgcaaaacaaaacaaaagaacacatgatgatcgaatcaaaaaaagaagagctttggatgccgacttacttccgctcatcggacggaactctttgcgctcgaccatctccctggcccaatccttcataatgatccctccagaatttccggcctgaccacttggtgggttgttcacctgtgtgtacggatactgtgagtttgcgttggggccggtaccggacttgccaaaagacgcggtgggcgatcgctcgaacggcttcaagctcagactcgcctgtgcgcgtgtgcagaaacgggtaggtcggccggtttcagcaattcgatcactctcgacgaaacaatcataaagagggagccaaagagaaggaaacagagaacagaaaaaaaaggaacccttaggaaggaagaactcacaaagctcgtaggaaacaacgggtttcctggtccccgttctgaccgagggtcccaagtttcgtcggtctcttcgaactcgttttctgacgattgggtaggagggaagcccgattcgtagtttgcatgctgtgttaaccttccagcttccacgaggcccatgcctcgaggaagggatcctctccaagaaccgacgggcgttgcgtcggccgacgttccagccgacggcctggcgaagtccctggcaagcgaggaggacgagaatgaagaggatgagaaggatgaccgacctcgatgaggaccgccggacaggtcggacgggttggtgaacgaggagcacccaccggtatcgcccggtccaccggacagtccggtctgaatgggcgaggatacaatggagactccgacgtaggaccgtgttctcggccgcgtggaacccgtcgtgggcgaaggctctcgtccgtcattcccatcttgatcaccggatccggtcgcagagttttttcggtctggcttgatggtatcggaccggtcgagggagaacgctctctccggggtgcctcccatgggagtcttgtggccttcggatacgtttagagaggactgcttgagaggtgacgagccgggaagcttccccaccagagaatcgctcttgggcgtcgttgtcgacggggactcgaccggaggcgagccctcctcttcgtcctcaccgatgggttccatgatgtgtgacgacacgctggactcgtacgacgccgtggagggaagggagatgctgtctctatccgggctgaaggaagccccaccgatgatgccatcctcaaggctgtcaaacttgctgctccgccttctggaccgggagtggggcgagcggtcaagtgagtcgagctggtcatccgagtcgtccgcgtactctagcccttggatccagacgtccttttctattctgtctggacgaccgttgtcgatcgggtgagctccagcggagacgctgtcgaaatcaccgtcgtccacaccgaggagtcctttgagcttttcccacaacggctcgctcctgtactcgacggcctgttggaccttgttgacccagatccggtcgggcatcgactggcgctcgacctgagtaagataggtgaccaacgtggggaacgaccacgtcttgggatctgcctctgaagcctgaacgtttgcctcggtggagggaaaggcgagcttgagcaggtggaagagcgccttgtttttgccttcgtccatgagatctttgatctcggctccccgggtctcgaaagggaggaggacctcatcttcgagcgggacaaactcgaccggttcgaactcttcttcctcggcttggtgcctgtcccactgtcgagaagatgagagggctcggccggatggtccgaaggaggaagcagaggaagagctgaaggatctcgcatgaccggacgaggttgatctggccatgtcgacgacctcccggggggtcaactcgagcgcgttctcccgaccgccaagggaaccctgacgactgtgtgagggtctggaagggtcgtcgggaagagacatgtatgagccggattggaagccagaggcgatgtgggatccgattggggaaccaaacgaggaggatgcgaacgatagccgaggggacgacggtccggagaccgacgggggaggggggtggagagatttcaacggagagtggggcatggacattgccggcgaggacgttgcggatcgtctatgggccggtgatggccggttgaaaggaaatggggagatagacaaaggggatgaagggaatgagaaggatgtcagcctatccgttcgtacagataagagcagcaagaacatatgagcaccgacttgttttctttggagccactgggagctcggacgatggtcagcctgctgagcccgcccgggctgtttgtctggtcgggggacatggagatgaccgaggctctcctgcctggtgccatcgggtttgatttggacagggacctttctcgggtgtggtatggttccgaggggagggtgtgagaggccggaggtaggccctggtgatggtgatggtgatggtgagggtgcaggtccaggtgcgaatgcgatgatgaggatgagaacacgcatatatgaaagagaaaaaagaaaaggacataacgggatgaacaaacgtgaaggtcgtctagaatctctcaaagaaaggcgaacgaaacaaacgggaagacgtacctcgatagaactctcgctccaggtgtcgagcgcgctatcgtccgtcactttggattctggcctagggatgatctttagcttgctcaacaagtttggcagcgttttctgatggacacgtcagcgtacgggtggtagaacaagcgggagtgggagtgagcatccaagttccaacgacagacagagtacaccaaagatgggaagcctagagagattgaatatgaaagcgaggcggggaagaaaggcaaagaacagacctggtgttgaggggcgtgagttgctcgccaagactcgatgctctggtgagacatgtgtgtgagtgtgggtgtgggtgctgatgtgagagtactgatgtgagagtaagggagtgagtgtggacgaatgaacgggtcgagggttcgaaagaaagacgagtggtggtggtgaggaagcaagatgtggatcagggcggagatggggttggacgtcgttcaggcctcgtcaggaacgcttcccccacgcagaacagatcttggcctgccctggaacgacgggaaggcaccggaaggcaggggg

SEQ ID NO: 1145 - DNA, 1195 bp, Xanthophyllomyces dendrorhous
agggcagggagggcgaggcaagtttgatcggggctaggctcgaggcgccacgcgtaggggcacggacactagacgatgctccaggcgccctggaggcggacggcaagatcacaaggccggacccgacagcaatcgaccggctggcttgacgtcatctccaaaagtctggaccttgaggttgagaagggggggggggagatcaaggcgaactttgtgggttgctgcgtatgacacggtccatatgagtaaaccttgtagcagcacgggagagaaggcacgttcgtttgaagggacggaaggaagagagtgactaaccgatgtgatttaatgggctgtgagtaagggggtaagctgggtaagctggtaagatcgtgagagtgagtgatgggtaaccactgtcgaggtcataagaaatcactatttgtcagcccagtgccgggggggaagactcggaagagaactcaagactcggcatgatcacgaatgggtgactactcgatgtgatttgttggcgataatggtacgatgtgggtgtgggtgagtgtgagataaggggggtgttccaaggggagttagtgagcgattaccatggggggttacacgagagacccaagacgagagagggacaaaactacgaaggacgtgcaaacgcaatacaaaggaggtatgaaggaataacaaaatggttacacagcggatggatagtaaacagctcaatcactcccaacggaacaggcacgagagcggaagagtggagagataaaggcgtctgaaggaaggcggtggaagacgggaagataggaagaggaggaaatagaaaataaaaacgaaaataaaataaaaataaaatagagaggcggtgtttttgtctattctattgctttgctttccccttgtgcttccgaacgattgaagaaacgtacgattattttcttttcttttctttttctctagccttgtgggtttgtggcgtgtctgagtgcggtgcggtgccgtgctgtgttgtgcttttctttgtcagctcctctctctcttgccgttccacactctctctgccctgttcgccctagtcctggccctgattatctgttccgctcgagtgtcctgtcaatctttttctcttgcctttctgtcactctctgtctgttagctcgccccttgtgcctgtctttgtgcctgtgtcctgtgccctgtg

SEQ ID NO: 1146 - DNA, 1497 bp, Xanthophyllomyces dendrorhous
cccgttcaccttccgcccctgatcgtcttggctcgttcttccagtccgtccatcgaccgagcacattcatcctcattcacatcctcacccagcacatccatacactcatcctcatacttgggtgcttcgatagacatagacacatccatacccatagataagcacacccacacccacacacacacacaatggaagacctgttcgaagaaaaagatccattccggttcgatctctactctgagcaaaccacgatgctgagccctcagccagaccttctcccacacccccacgaccaggactccttttcgttctcagacatctcttccttctcctcctctggatcctcctctgccggctctgtgccgtcgccaggccaacaggcagatctgtccttccagtctacgtcctgcgatctcgacggcttgccctcggaagacgagctgttcgaattgatgtgcggtgctcacaccgccccctcgtcctcgttcgatacgaccgcagccatgaccgcaacgacgacgaccacgacgaccaccacagctcatccttccgccttgccttctgatggtatcgagctcacaccgggactctacccagatgatgtctttcaatcgtttcccatagaatccttagcctcgttctggaacggagtagacctcggaccctccgtgccgtctcagtctgtcaatcaggctgtctccttttcgtcctccacctcttcttcctcgtcctcccccgccttcggtttcgcctctgtcccaacctcatcaccgccaacgcctccgtcgtcgacaacgagcgaactgttcaactcgatcttctcaaccaccaggctggatcataccacgcttcctccaccaccatccccacagacactcgctcagctacagccagcgtccgtgtttttcgaacccccggtgcctcagccgcaagaagttccctcgttcattctgtcctatctctctcatccccaggaacagcccgtccagttcggtcgtcccgacccagtcgtcgaccattcttctcactcgaccggcacggctcataaacgcaaggctcctccctctcctccggcctcacactcttctatctctgactcgagcccttccgttcaaaatcccgtctctgcctcggttcctgcccctgctcccctcccgacgagttcacctccgagatcagttccgtcactcactctaccccaaccagatcaagacgggcccaacgatggattggcagcatccaaaccgccgaccgaccacaacgcgatcgaacgaaagtacagagacaacatcaacgatggtttcaccagactccgagactctgtccctgttcttcgagcgctcttgttagtatcatttctcttctttctttctttcctctgtcgcattcttgttctcttccacctcctccttctctcctctacttctccgcccaagcacttaccaaatctcattggtcctctatcattccgttttttcatcacactccttcttcctt

SEQ ID NO: 1147 - DNA, 2162 bp, Xanthophyllomyces dendrorhous
acacacacacacacgcgcagtaaaacgtccaccccaatcaccctcccgctcgatacaccctccattcggaccggtctgatcgacggaatgcctcccgagaccaaacagggcaaggctaccgtacttggcgccgccagagagtacatcctcgaacttcaaagggagcgcgcccgactcaagcgctactctcagtttctcgagaaacgtcttggctcgtccccttgggaggtttgttcttggtttcatcctttttcttatctttacatccatttatagttctttgaactgacatcatgctcaaaccctctccgtttcctctttcttccctccccctccctcaggactttctcgccgccgactcccacgcgatccttgatccttatcttcaatcgatcactacgcccacccgcccatcggcagctccgtcggttcggtcccaaccgatttcttcttcggccctcactcgatccttgccccctccaccgccaccaccccctcggaagaaggcccgagtgacggccaccgtcaccaccactaccgctgccaccgcggctacggccggtgccgtcggtggaggaaccgtcatgctcgtcctcggactgggcgtcggcctgttcaacccgttcgatccgttgtactctgttgacaagaacccgggcgcagcggtcgtcaaaggaaaagtcattctcggcacacaggccactccctcatcctccctacacgctacccccccgcccttgagtttcgccgctccgacctgtttgtgcatctcgattgtcgtcctgtcgcttatgctcctcgcggtctcccgctcggccagacggaggttccaacgaggcgtctccaggtggactaagcttgtcgtccgtgggtctgggtccggcttcccgggtgaagacgaagagtctgagggcaaacaagatcgactcccggtcggttgggtcgaactcgaaggtggccaagtcagtggctgggttggttggggttggaaagcgggcgagagagaaaatcacgaatggatcagctgtggagatcgggagctcatctttgttcgtgtttcgtttgttttttattaatctttttcttgtgttttcttggtgcatatctttctttcttgccttgacggtgattgatgagacttgccttggtttttgttcttgtttttttcttcctttttcttctcttcgcccttgtcaatgtctctttctctgtgcagccgaaacccatcatctcatccgcccgagtacattgtcacacttcaaaacatgtcccgacgcaacctcatgcccttacccacccaaatatcaatcaactctacccggctagacccttgccgatgccattgcccgaccctcggatatcgtccacacctacctcgcctttggatcgaccgttctcatccctgacctcggttgcgataaccgggcttataccgggtcatgaggagcgtcgcctgttggttcggcctttagaatcaggcccatcaaaacgctgatctgatctagtttccttttatttttctcttcctttttgtctttccttctctcttcttccggtttttctttgccctgtgttgcttcctttcgtgtgtccctttttctgtctctctctgtctcgtcaatctcttcctatttgctcctctatttcttgttatccttcttccgcagcagagagaaggcaggccttcttgtttggatcctcgttgtatctttagtcaaccgcctctttcttcacccaataccctttcctctccttcgtcggcttcgtcctttcgtctgtctatatttatactgtctcgatctgctttcatcttttcatgcttccgtctgcccatcccgtcgtccgtctgccttgccagccctttttctttttctcttttctctctctgtctctcctttccttttgctatcctttctgccggcgaccaggacccgtcagagagccttgactaataaatcaatctatcatatgtaaacctttcgatcagcgcttggatctcgttgtgtctcctgttcttggtctcgtctgtcacaacaatcgtgcggagagccgaacgaaccagaaaggcacaatcaatcatccatctagaagagcgtcccggtgggggggaggagagagaaaaaatgattcaagagggatagcgagagagagagagagagaga

SEQ ID NO: 1148 - DNA, 57381 bp, Xanthophyllomyces dendrorhous
agagagagagagagagagagtgtgtgtgtgtgtgtgtgtgtgtgtttgtttgacatcaaaaaaaagaaaaatttgaacaaaggacgacccggccgcttgggtttagacctgcttggctccccactgttctctgtaagccttcatgccctccaactcggtctcgagcccaggctgcgagctcgcccaatcgatcaggtcgttcagcgtgcagatcgggacgacagggatgttgtactccttggagagctcctgcacggtcgacaggctcgacgacgagagttctccaggcccgacctcctgtcggtccaccaggacgaccactcctgttagcgttgcgctcgacgggagaagggctatggcttccctgactgctttctgtgatttgcaagagagagagaaagagagaaaagaaaggaagaaagtgttagcgttgcttgacggatccttcacgaaagctggttgtttcaaccatggatgtgaacgatttaaaaggagaaagagaaaagaaacaaaaaatcaacccaccccactggtaaggacatcatcgatgatgaccacccgtttaccttccatcgacgcaccgaccagctggccgccctctccatggtccttcttctccttccggttgtagcaatactccttccggaccccgtgcttctcttccagagccatacaggtgatcgccgctagcggaatacccttgtaggccgggccgaacaggatgtcaaactcggtcgagaaggcggatgagacgatggccgaggcgtacgactgtgccgtcgtggagaggatcgagccattgtatagcaggccggcgttgaaaaagtacggggattgtctttgaggccgagagcaagcgagcgagcaaggtagcccagcaagaccgagaaggaaaaaaaaagaagaaaaaaaaaaggtttctttctttttaacaagtctacctcggaagaccaggatgttctggaaggcttcaaagacaatgtccataccggccactcttaagagtaaactccccgaacaggagagctttcgactcgagggagccctcgataaagtcgctcttgagctttgagatctgcttgctgtctgccatgctgtctgtatggatgcttgatggttgatgtgagccaggcttttttcccggggggaaattctctggcgggtaagcgcaagaaaaagaaggccgcttacgtaagcgtaaagtcttgtgggctccttccttgttgatcgctcgaccgaccgagagaacccaaaaaccatcgtctcccccatcaacagaagcaagcgagatatagcccacacacacatatggatcgcccgccctcgtcgacacctaggaggactcacctcaagacgctctcgctcgcacaggtcccgtcggtcaacactgccgcccgctcgttctccggtccaccggcgtccgcgtcatgtacgcctccgaacatgaaaacaacactggccgagacgttctccggtgacccacccggcacgccttcgtccagacagaccgctctcgcctcagctgactctttgcctggtacaccagccacacctggcacgccttccggtcgggtcctcgccagttcgctctcccgggcaggctcggtaggacgaaatccgatgaggaggaagccgtcgatcagctactcacctagctttcgagagaacctctcgacagattctcttgaaggtgccgtgcccaagggaagagcgtcgcccatgctaggtacccctagaagcacctccatgtttggcttggggatcagtgaggaagaacccttggatggggctgctcagtctggtgagcaggtcgggttgaccgagggcgttcggtcgataagtatcggaaggtctcctcggaggacgagacgttcgatggaagacatgaccgctcctgcgaccagtccagcaccggctgctcaagcgatgacacttgctgaaaagtaagatcctctttcttcttttttcttttttttcttcttacctctctttcttttaccgcttttgtttctcttttctctttgtcttgtcttgtttcgttctagtttgctctgttgtgatcttttctgaatcgagttaggctgaaaaatttcaccatatgctccccaaaaagacatgccgaccttctctcctttatcgcccaaaaagaatcaagatgtctagagcttagagagcaactcgctcagaacgaagccgagttggcgaacctcaagaaaaaatggacgaccgtggtatctcgagcgtcagctcgttcggccaacgaattaaatcctccgttctctgccaatcagaacaggacaaacaatgccggcaacggccaaggctctggtggcaacttgtcttccgtcgcaagcctaggcgctcatccggagggattgctcagctcggaaacgatccagagtggcaagagacttttgaacctcgttctaggcgtcgacctggacgagccgtcttcggtgtcaccttcttcggaatcgacgcctttgccgacgcccccgccttctgcttcccttgcttcagtgccgaactcttcatcgacatcatcatcttcctcctcatcctctccctctcccttctcttctcttacttcttcttcttcttcttcgtctacttccaactcggcgcccgttcgacacaagtacactagctcgtccctatcttcttcgagcctagaaaaagtctcggaggcaccagaagatccactctcagcttctctcctcaccaaacccgagtccaacgggtctcctatgtccaaccctcgacctgtccctccgtccaggccagcctcccattcgactcgccggctgtctctattgtctcaatcatctggttcctcaattgactcaaccgttcagaccttttcccagagctctgttgatctcatgatgggcaacagctgggacccagacttagtcttgagtgaggaaggagaggaagaagccggtcggagagaacggggtagcgcgagaggtctcatggaaggattggcagcttcgtccggagtgtccaccagtgggtggggcaaaaaattcggagagctcgcccagggtctcagcgggaacgagcactttttacaatcgaaacgagccaccttgagcttcacctctagtctttcctccgcgttttccttcagcccgctcggtggagggccgagcggcccgaacccctcgtcacagtcgtctgatccggatctgtcgacgtccccgacgccggtctcttcgctttcgaaaccgagcccgttgacgctttctcgttcaaccttctcgtccagtccttcgtcaaagctcaaggcgaccaagatgcgaccactctcaagatcgaacggattggctcaatctccagggtttggtagggccttgacgtctccgacgggcgtgcccagggattcgtccgactcgatagatggcgccgactttttcggaccggatgcgtcggtagagtcaaactcgttgcagaccccgttggagcctgtaggaagggtcgtcagtcgtggagacgagaaccgatcagcagagggagagacccggacagagaaccctctgatggagagtgagggggattggaattggtagtcgagtcatgagcacagactctctctttgcttttccatttttttctgttttcctttcttgtttctttctcttttgaagtaatctctttctttttctctatttttctttctttttcttatttctcaccttctttcctgaaattctctatttcattctctctctttcatccgcttagatgtcgtaacgatctagacgtatctgcaacgatttccccgtttcctcctctttttcatcttcctcttctttctttttctccttcatttcaactgtcctcttccttctcctcccccttacttcccctctcgtcttgcaaaagaggtctcgtcctcagatcataccgtaatctcacgatcctcctttgcctatccgtctctcctcgttctgtcttcttccatcctttcttgtccccttcccgattcccgtgttaaacgatacaaacgacatatgcgctcatgacccttctcttggttcacgtcttcggacccctctttctactctctctctctttctcgttctcgtttcatcctctttcttggtttgctcccgtgggacgatgcgagagagagattcggaaaagatgcaagtccgttgaaatcgaaggcagcggaaggtatatggtagaataaatcaaaacaggcacagacgaactagacgagaacagtggtgagaatgagtgaaaaggagtattatcaaaattgtaagcatgaaccaatttgaaggaagaaaaaaacacacagagttacgagacgaaatgccagggaaggaggaagaagaaagaatgaagcaggggaaaccccctatatagaaagaagcgaataaacatttttttaaaagcacaagagagccaaaagattacacgtcgatcacctcgatgtcgtcgaccaatctccttctggcttcctcggccgatttcaagaatcctccgatcatctctccgtttcccttcttttccaactctgctttcatccgatcaaactctcttctgatccaagcctcgaccgtcaacttgctctcttcttcggtcaacaccagaccagaactcaaagttgtgtttattgaccctgacggctgatcggtgacggcggacgggacgacggcaggttccgatatgtgcgcagccggaaaactacccattggttctgaagtcgtagcagagagaacggctttcgacactggctcaagaagagacgaagacggctgagaaaccggaggagcgttgaaaagttgatccagctttgaagccacccttcgcgcagataacgcgccgtccagaatgactttgtctctcggcgaacgaagctcccgtggcgtcaacggtttactaggtgatatccgcgccggaagatgaacggcatgaggcgaccttttcagctccaaacttggaccaggcgagagaagcgggatccgagagggtgtgaacgaagatgatggtggtttggccgttgttatcggagatgtaggaatcgccggcagggatttcaaagagctcggtttcgacgcgacggtcgtacgtgaaaacggagtggttttggaagatgatgaaggtggtctcgatgatgaagtggtagtggtcgtggcggtggttgcggatgatgatgatttcgtgcgggtatgattcgattgcagagcgatctttgatttagacgccgatttaggtggaggctgaaattccgacaggttattcagatcagttccagaacatcttctatagaacagagagaaaaatcactgaccgaaggcgctttcggtggtctgactatcagatgttccagtaacagctcatcttcatcttctgacagcgctttccttcttgctgttttcgctgatggacagaccttttcaatctcctctgtctccatttcatcggcctcatccgcctctatgacctctttgaccttcttcttggccgagacctttgtcttggttgcgcgtagctttgttgctgtagatgcggcgagatctgtcgaaggtgtcgatcgggtagccgaggaaagagcgcgtgaacgtgaggcacgcaaaacggaagtagtcgttgacgctgtcgaagctaccgtggaaggagcgttctatttgaaacaaatagaatgaaaaccgattaccatcgcgtgatgttgattatcagaaggctgctatctaacaaggattaaatttccgtcgatcagtactctatgacttacacgcaacgttcctcttcggcttttcacagcgggcgttgtgacgttattctctggggcttccaccatttcgtaatcctcgtcgttctcgtccactggcacaatatcttcgacttcggcctgagtctttcgactatttgtcactctgggcactcttggttttgtcgcccgagaagctctggaagatgttgttgattgagaagcagacagctgagagggtggggcagctgggaaagctttatgaccgaagaaagcgcatttgggatttctatcaaagtgctcgttgctattgatttccagtcattgaaccaaggtttgagtatattgagtttagactctcaccagaaacatagagcatctaaaatagcatggacttactagggaacatccgttggctcccagcctgctaaagacaagtgacaatagatacaagtcgctctgtctgtatcttctggagtaggtgagtatatgaatcctcctttggcaagctatgtttccgaacgggagaaaatcgaacaatgaagaaaggaaaaacaacacgaccagcgggtagaaacatcatgagcttacttaaatcaagatcctcctcaacaactgaatgtaaagcaagaacttaccagtttggaagtcggtagccaagccttcttcttgtcatgcggccaccattttccgaacgtggctaaccttgccgcctcaagtgacttgtccgacggaagctcctccttctcttccgttgtcaacttgaccgcgtccttcggcccctgacccatctccttctttctcacttccacccaacatttggttctcgcccatccacacttgttcagcccgtcatgtcctagatgttcaacaaacggatcatcttgctcttcccaaccacccaattccttggcgcagagaaaacatttgacgaggtccggctcagctttcgttggtcgaaagtaccaaccggcttgagctagattatcaggcgtaagcttgggatgagttgctggttttagtggccaagctggatgggcaggcagaccgtgtttctttgtccgagaggcggcgaatgttgataaacgggtctcgtagacttccatcttgatgtatgctggtcgaagtgcgggtttacgtgttgggttgccgttgacgttgacgaagtagaaagccaaatcaagaaaacaaacgcgtgagcgggagggtcgtgtaaccattatgtgtaaccataacgcactgctgaacaccatcgtcctcatcgcggtaagaagaaagaatgaagatagaaagatcatttttatatcttggctggaacgatagaaaagagagaaaggtatactcagcgcttgaagttaaaatacaaagtaggaggtctagattaaacagaatgcttctggtgaacaggtacagaaagatagagctagacgttaaacaaccatgctacacaagtttgatacacgatcgaaagtgtgactatgaagatgaagagatttcgtatatattgcatgaaagaacataaaagatataagcataggagaaaagaaatgaggctgggtttgtgaaatcgaacaagcacgatgtaaggagcgttcaggctactctctgtgtttgcttagctgacatagggctttggttctgtgtaggggacaagctcgactattgaagtaaacaatcacaaatcatgagtcggcctcagtcggaaagcatattgaggtgaccaaaggaagaagcagagactgacccgacttcgagtgggagatgacaacttttctgctatctgctcaagctcgccgttcgtctcgctttgatcggcgagcgtctcgttgatcatctgcattgtcatatcaagtgaccgacgacgagtcgaaggtgaggttgtcgttgtgcctaaagaagctcgacgaccatgcccagctgaaaatttgatcgttgccgaaatgcaaaaaatcagtttcgaatgccatcgaacacacgctcattatcttatgggcaggagatcgcttacgcttccaaggtacctggtccatcgaagacgaaggagtgattggagatgacgagatggaatctgaaggactgtccgagcgaggactagctgaggacacaaagtcggcctgtcgaaagaaaaagcaaggttagatacccctggtaaaatgatgcaaaatgtataatgacgggcttacatctacgagatccggaggaaggcgctcattttcaatgtcgctgacacgactgcatcgaggaaggtagaaaaggaagacagattcgagcataaacttccgggcatcattttgactttccttcatggaaggagcacttacgcatctttgaagccatgaaccgaatctcgaacctcctcggcaccatccgccagatgctcagatatattatctgatgagcctggtcgtttcaactccgagttactctccgtgtcctctcttaccgaaggtggaaccaaacaattctccaataaacaccacgcgctgaatttacatcgaaggtcgttaaaaactcacctcatgagcgcgaaaactcgtgacattcgaccgatagctaatatctttttcttgacaagttttctattctctgttgaatccttggtaggaatctcaatctcaagcgatgtatcgccatcttcctcggattcatcaagctcttcctgggtacagcaatttaggattgaaatcaacatgtcggtgactaaattcatgaacatgacacatgctgctcgttagcatttcgatcttaattgccaaacagataaaaattagaaaaaatccaacacacttttttcaccgacgaaaggcaaactccaagtgaaaacgtccataaaatttggaagaaagtaaggatgaggagttgcgttaaacctgttcgaatcaacgacaaagagaaaagttaaaactcggaagtccgaatcattagatctacaaaagacaaggcaaagcattctcactgtcgtatatttaatacattttgctcgtgtttaagcacagcggccttattgccataaacatcgactgtcgaacgtagtttatacccgtagcattcagtcttgatgcgcattccctacaacttgtagacgttacaattggaataggcactcacgctataaatcagattgatgtaaaatatggatgctaattggtcagaacaatggctgatagcaatactaagtccacggtaccaggtctacatatacttacataatttggcgcagagaatatcgtcaaaacggcaggctgatgatcgaaaatgccagcaaatcaatcaagttagcactgagaagctattatatgaagcggaggaactgacaaagccccatttattcttcttgtacatccgaaacccctatatgatacaattgaagagatccaatcgcagtttagtctgtcaatacggtttagattattaaaaaacttgagctgttgacttacttggtcttgggcttcgtgcgctctaattacactcaagagtttgtttctctctaaaaagtcacacacagctttgaacctgataattatgtttggagttgatttgttcattgtcagacaaattccaagcactttttgaagacgcgatgattgacgacacatacgaataaaagtagctgcatccccgaacagcgttatgggtatagccattcccatgtgtccccttatccgaatcaaaatcctcgagaggatcagaccaaagcatgtcacaaaagacacctacatgcacagcgtagtgagggttggtcagtagtgatttggatggaaattggtctttataatatgaacctaccggatgtaggagggctggtaaaccataaagtcagttttgatcggtggtatatattgtcaagaacaaaaaggcgaagtgagcttactctctgaatcgatcaacctgttacgagtatcatacattggttcatgatcagtgcctggaccgcatttgataattcatgaatgatactaacatctcgaatgtcatccaaagtcatgatacctgggctcaaacctccatggacacataagaactgcttgttcatgactgccgctagcggtagacagcagaacgcttccatgcaagcctcatagacagtctccgagtacttgtatttgcctagatgacgtcatcaacataatggtaagatttagcgcggatcatctaggctatatgatgaaggtacgtacactctagtttgaaggtgaagtagtcggttagatgccggcactcatggtttcctcttagtaagaagaacgtgtccggataatgaattttcaaagcccaaaggtagagaacacactgttggaatcacccacatgaccgaaagcagcaagatgagcttatccgcgcttgccttgatggcaagacaacaggtcaacatacctcgatcgagaaataacctcggtcaacatagtctcctaggaaaagataacgcgtgttctctggattaccaccgatctcaaatagcttcatcaggtcgtactacattcgcgtttgtgaggagcatcagtaatgttacaatcactaatcggtatgatagaacactagaagatcgcacatattggccatgaatgtctccacacactaaatcgtggaatttacgaaggttcaagttatcgttatggaatacgtgtcgacaggagttgcagtcaaatctacttacctgtaaccggtgactctacatccaataggttgggttccttcctcagcaactctgcgcccctagaaacggataacaaagatcgcttgacatgtcaacaggtggaatttttagaccttgatctgagaggaagtagtggaaaaaagcgccaacttctgtagaatgaatagggcctggtcctcagtcaatctaccctcccgatatagatggtccttcaggaacgcgatgtttggctttgtaggatccgactctgcatagaattgactgtctgttgggaggaaggtcgctggtgcttgaaccttatcatcatgttaagagaaggaaacagaaacacgatcaagaatgtcaaaaatgaatccattcaggatgcacccttgatcgggccatttgagatagcatatagtccactcctcgtacctctttgacaaatctaaagtcgagatcaatggctcaatatcgtcaacgacaacaagcagcagattgtccgagaacccctgagagagctcaagggcgagatcgggatgctaacctctctgtcgtactcgctatctctccagtttcaagctcatgcttagtgaagtcgatgataggcttgttgaaatcgaaccccaagattaccagaaaagtgtgataacatcaaaccaaaccgaccatgattaagtgatagatgagaatcagcgacagctaatctttcagctcacaagtctttccaactctcaagagtctgacgaccggtaaatattttcatattcattcttggaaaaacaatggaaaaagggggcaagacccaccaaagcgttcttattggtgattgcagacaccgccgctctcaaatgctcactcttaggcgccattctgactttcttcgattgagaagactatttaagaggggtgtggtttggttatctctatctatagtgctgttatggtggaggcgatggcgggtgatattgatgttagaggacaaaggccagggcgtgtcctgccaggttataatcgagcgcaacgaaggacagccgagtagtgataaagacgaggtagcagatcccgtcatcgactgcgctcactcaaggggcaggtcacgtttcatttcgagcgtttaaatcaatcgactccccaaggtatgagagccacaacggggataagaagcattgtacaacaaatcatttcctacgcgcaatattacaacaaaaagaacttgaagagagaggagagacagtcaagtagcaaagtgaaatatgaaatatgatacagaactgaaaagccacacgcttgaaacagctgagagcacatcacttggccgacatgttctcgcgaaagaactaacaccgatcattgggatagcatcttcagctcgctatctttcgaaacacaagagtaataagaatcaagaacgtacctgtgggaggaatcgaccagagtccttgacagttctctccatcgtctcaaagtcaacgtaaacgcacccaaaacgagtttttatcccggaagcccactggtaaagaccaggatgtcagttatatatgcaaaatttcagaaaacacgagggatatagaagttcatcatacttcaaagttgtccgagaatgaccagccaaaataagatcggacatccactccatcttcgaggatagcctgcttgacggcatcaagatgtcccttgaagtaatttgttcgatcggtatcgtctagatacattaaagcaaggcaatcaagatatttcaactatagaattcgccgagattttcgcggccatataacaaggacttacggattctgcatgcaagacatagccgtaacagtatattcagaattaatttcgatgacaacaattagaatgatatgcaaactcatccgtcttaactcacgcttgttccttctccattttgtgttctcccttgacagcaaatccctgcaaacgatgatataaagattagtcagttgatcagctcatcgatcacagaaaaatattagatcaggtgctacgggtttgaaatcacgtacattctcagtcataaagattggtagcttatatcttttgtaaagatagttcagtagcgcccttaaaccccaagggacgtcttgcagccaatctgcctcgctctgaactccaagttctctgcccgaaccgtctggtcgctggaaagacagaatagcattgccatcaaactcgtcacacccgccggcgacgatcgtgttggttgtgctgttgatggtaagattcagtgtcaaacatgtgtttgtaattgatagaacgcagggaacttactatgtattacatccataaaactacaaaagatgatcgccaaaatgtgttcagcatcgactcagtcagatgtgatgatattgaaatacatacatcggaagaaccatgaaccaatttgatctcgtcttctgtaaatttaggcaatcgatccccaagtctcttgaccaaggatggaggctataatttggattcacagacacattcgttatttcgggtcagatgacggtagacacttggttgatgttgagaagcgtagagtcatggacgctctgtcggcttcagcaaagattcctctggaacttacatagtggcctaagtaaatcggatcagcaaaccatccgatagccacgtccatcttgtcctgggtcgctttgatggctaaaacaagacagaagtgaaagaaacggaagtcaatattcggcatgcattgttgtcaaacatatttctcgaacagttcgactgactctcgggcctgttgtcgagaggtatagcccaatccccattcagtgtgattccgatggtaccctgtatgacaagacaagatgagtaagcatagattcagccttgactcagttgatgcttttgtttcctatctttaacattttagaatgcaaccatataagctattaccttttgagcggacttgtatttggtcctgtataacctggtgactttggcatgagctagaatgcagtggtgtccaacgctagtttttgttatttgagtttttgtttaccatggtcagacttgctctcaactagattcaattgttgaaaaacgacgcacatccacggttcaacattagaaacatgtcctggcgcaaacgccccacgtccatggcctagaacggccacacacctgtaatatttgaggtaaatataggccagagttagtgttctgtcttgagatacggaaccactgcttatgatatggcgcaccatggctcgttcaatgtgagccagtgtttcactctatcgccaaatcgcgagaaacatagatcggcctgttttgccgcaaataccaacaccagtcagcactcgaagacaaaaaatagctgagggaaatagaagggattgtacatatcgctcgaaatcggagaaaatatccctagatagccaaccaccataccgttcgtagagcgcaagaggtaaatcccaactaagatgattgacaaacaatcaagaacgataagcagataaatgagcgtatttgacaatgttcaccggtataactgactggtacaaagtctagttgtgtcgattgacgaatgaatgtgatgagcacttaggaccgctttcaatgcttaatgcataatacaaacgtaccgcgaaaggagtgatcccgttttctaggagctcatcaactgtgcataccaaatatacaagcatgagtcggataatcatcattaaattaaaatgagcatcgaggacgcacttaggtcgctgtagaactgaatcccttcctctgaaactggatcatctttacctccctttgggatgatcctagaccaagagaatgagaacctgtaagagttgactcctaaggacttcattactgtaatagcccatgaagatacgaatttaagaccaatgtgagtatgacttgtatgaacacaagaagcttagacagatgtgatgaacgtacgggcaatgtcctctttgaagagccgtacatggtcacacgtccgagctacagatgtgccatcttgaatcttgcccggttgggtacagaatttgtcccaaatctatgtgcgatgacagttcatggaagattgtaaaataatggtcccagtcaaattttgatatctgaggtgaatggagtgaatctaagagaaaccccatactgaaggtcctctctctccttcctatgaagatggtacaaaaaaattagttttgtgctactacgaagatatcagaaacagagacggacttacctcggctgcagattcaatctgggctgaggccgaggcaaacccaaacaggaaggaatcaggcaggagaccagctggatcagctgggccattactgttggaggaactatgaccgtggccatgaccattgctatgaccattagacgtgtggttttcagcgttgttgccgttgagcccgtttccattgactaaaagtacagaggtaggtacggtcatgattctgcaaaaggcgtaaagacgaaagtgttacgggaacggtggacgagagagaaacagtcaagagaatgtcgatgaatgatctctggatgagtgcaaactccggtctgaatatgcttctcaagaaccagaagcagaggagtgatgaatgtttaaatggttgtccggtcaaatgaaaggactaacttccgaaatcgaatcagggtttatccgagaaaactccctgtgttgaaaaccatgcttcatgaaatgctcgggcaattaagcggcataagattgtgtctcttctctttgcattgtctgttcatctatacctctatgtaaatttaaatgagtattggcacgcactaacccatgatagagctcatgtatgtgtgtccgactttagatgagaaagtatcatcattttgggagtccttgatcagagtcggtaattgaccggtccggagcccgattcctggaactctgttagggttaccttctattttctccttctgttcatttgagatatttgacgcgtttccgacgcgacgcgtttctctacgcagccggtctttcaacgatttgtgagctttcactttcgatctcatagccatcttagtgcctcacacatactacgtattccttcttcatctgtttagagaagcaagatgagtctcatgtatggaaaggagccagccggggagaagacatctcttgatatgggtaggttctgtgttttctcgagtgttctctcaacaacaagctgacccaatgcgtcatatagataatgccgccgaggtcaactttatccgacaatttgagaatcttcccaaggttagttggtctggctactttttgatgatggagaaaaggtctcggcatttgtcgaccggttcttacaatccgataacacaatagaaattagatggaacgattcgcctattcgaccgcgtcgtaagtgtctatcgtgtctttaatgctcaggagtgccagatcaccggagttcatcgtctgttcaatgtctttacagaattactattcctgccacggagaagacgcaattcttatagcgagcatcgtctacaacaccagtaatgctataaagttcatcggttctaaaaccaagaagtggccgttgggcttgccgagtgtgactctcaatcagaacgccgctaaggggtttctcagagatgctctcaccgccagacagatgaagatcgaggtcagtcaatctgtcaagatgaaatgctctccaaatagcgtctgactgttcttttttatttttatttttttacccttgtcatgacagatttatagtcaagagggaacaggaaggccaaatcagccttggcttcttactcgtcaagttagtctaaatatgactactaatcaacgatgtcgcccgaactcaatagcggttgacctaatcattgatataacacataggcttctccgggaaacatatcgcaacttgaagatcttcttttcaccaatcacgatctgctgacttctcccgtaaggctgtctttctgatcgactgctctggttcttcatacttcaactgatatctgtgtgcactaaaccttctgaaattcagattgtcatggctatcaaggtgatgactaaggacggggttcgcacagtcggggcagcctttgctgatgtatcaagtagagaacttggagtagcagaatttgccgataacgatctgttctccaatacagaggtctgtacgctttcctgttatacgatcaatatctcgtgtatcgagcaaaacctgatggtcttttctaattaaaaatatcgtatgtctactacataacgacctattcagagcttgttaattcagctgagcgtcaaagaatgcatcatccaggcggacgataaacgaacagactatgatcttgcaaagatcagaacgatgctcgagcgatgtggggtaatcgctaccgaaacccgcgccagtgagttgtttaccatctctgtgccaagttgaacgtctgctgatacttagatcgtaaacaggtgaatttaatccaaagaatgtagaacaagacctgaacagattactcaacccaaaacacgccgctcagtctcttcgtgagcgatcctgctaattttgctctgttcattgaccatcgactaaaattctcttaatatgttcacgatatctcgttcctctttagctcaactcaacctcaagaccgcgctctactctgtctcagccctcatttcccatctctcactactgaccgatgctactacacacggaagcttctcattaagaacccatgatttatctcaacacatgaaattagacgcttctgctttatctgcgctcaacttgttaccaaccccaggtgacattggaggaaaaaacagtagtctgtatggtttgctaaacaggtgtaaaacacctcaaggtcagcggcttttaagggtttggctgaagcagcctttggtcaacaagcatgagattggtgggtttcatatctgtcttctcagcaaagaacggataagaagagagcaagactgaatgaaaagactttgtctctctgtgccttgtatctctctttggcgctaaaagagagacggcagagcttggtcgaaactttcgttgaagatgcagaagcaaggcgcacgcttcaggtaagtctacttgtttttcccttcatccttatgatcgaacttatctgacgacgtcttctggtgaccctctttgtcaacaccactaacttgaattcaatccattagtctgtgtatctcaaagtgatgcctgatttctctcgcctaagcaaacgacttcagcgtagaatggcctctctggaagacgtagtcagaatctatcaggctgtactcagagtaagccagcacaatttcatctttgaacacatacttatgatcgtatcaccagagatagactaagctttctgttattcagttgccggagctcattgatacactggaaggtattcagcttgataaagaagactgcaagataattatcaacgaagtgtttgtcaatcaacttaaggttagaatttcgtgtctccacctcatctcttccctactcgcattttatttaccaaaccttctctcgtattgtcaatcttcattacggcttccttcaggaatattcgaccgctcttgagggttatattgagctggttgaatctaccatcgatttgaacgagctaggatctcacaactacgttatcaagtctgacttcgatgacactctacaatcaatcaaggatcaactgattcaagctagggatggactggactccgaacatgaacgagtcggtagagaattagggctagatatcgagaaaaaattacatttggaaaatcaacaggtttatggatactgtctaagagttaccaaggcggtcagtatgaatccatctttcccttcttttgaccggtgtcaaatcgttgataccaaactttgcgttcatctggatttaaaatctcttaggaagcttctgtcattcgaaacaagagagggtatattgagcttggtactcagaaatctgggacatacttcacaacttcagcgctgaaggagttcgcgtcatcgtaccaggatttgtcccggtcatatagtaaggcgcaagacagcttggttaaagaggttgttgaaatcgctagtcagtactccagtcttgcttctttcgagcgttgtttcacaaaacagaacatcaacagaaacctatcagtagctgatcaagagttgtaattgggtttctcaggcacgtacatccccgtgtttgaaacgttagacactgttattgctaatctggacgtgattgtcaggtaagtcagatcttccagtgatgccctcgttgacgcttaagatcaaatcacgttcctaacctaatcttgttttttctgtagttttgcggatatatccattagcgctcctataccttacgtaaagcctataatcaaggagatgggtcagtcttcgatgctacctctgtattttcattctcatgtacattcgaatgcggtcgtaactgagttctatcgatcaaacttcctttccactgttttcaggcagtggcaactgcatcatcaaagagggtcgacacccatgtctcgaagtccaagacgaagtcacttttattcccaatgacgttgaattcttgagaggtgcgcttcagcgttcttttatcgcaaataaggcggtcccattagacttgcaggataattgatatcgagaacccgttctgataatcgtgatgacagataccgccgaattccagattgtttctgggccaaacatgggaggaaaatccacatatcttcgacaagtgtgtcttctatctctgttgcgaatctcttccattctttcttgattctttatatttacgcttcgatctgctcactcttcaggtcggcgtcatcgcgttaatgtcgcaaatcggctgtttcgtccctgcgacggaagcagagatgccaatcttcgactgtgtattggcccgagttggagctggagacagtcagttgaagggaatctcgaccttcatggcggaaagtcagttgactcatctcttcattcagtattgtccgttcaaggactagtacgagattgtacttactctaatctcacttaatcaacctctcagtgttggagacggcgaccattcttcgtgtacgtgtcaaggctatcattgtcgtatcatgtgattggccttattcataaacttgccctattccgatatagactgccacgagctcctcgttactgctgattgatgagttgggtcgtggaaccagtacatatgatggatttggcctggtaagtcactcagcaaattattcgcttctccgtcgatctaacaagtcctttctccttcacgctacacacaggcctgggctatcagcgagtgagctttgtttcatttcatttcatcatactatgtcgtttggcgctcctgatcacgaacctcaaatctattctctacagatatattgttacgaagattaaagcattctcgctcttcgctacacatttccatgaacttaccactttggcacaccaaaacccaacggtccgcaatctgcaggtcaaagcgaggatccaagataaagatattaccttcctctataccgtggagcctggtacgtaacctcgaattattcttgttacttgcgcgaatcatcgtctttgactatcatgatctgactaatctcttcatctttgtataggtgtaagcggacaaagttatggtatccatgtaagtagatgaacaatttgtcaatgaatggtcatcatatccgactgaccggtctctatcatggtgctcaggttgctgagctagccaaatttccagaaagcgttgtcaaggtttgtcaacatcgatcgattaattggccgatattaccacttgtctgagtctcttgatgtgtcatttgggaatgtagatggcaaagcgaaaagcagatgaactggaagacttcggaggtatgttggcgtgaaccctttgtacccggggttactctatttcgttttgctgatctgtcgaaaccccatatttgtgatttctcgatttgcagacgatgcggaagttactccagacgattcaaacccgttcaccaagtattctcgagaggaaacggaagaaggaacgaaaatcgtcaaacagttcctcaacgcttggtcttccagagtaccttcgtcatccaaagactcaggggttgatgagaagagccaggcaacgttagaggaggaattggcgattctacgcgagatagcggcagaatacagagatcagatcgaggccaacccttacactaggtcactccttgatagcttctaagtttcttattcatatcttcatacttggccctaatcctgagggagttttggtccttcttcgcgctcttttccttgctctataagtgtctattcgtttcttcattttatctttctgtccagactctgtgtacaatatccatacatgttcatcatctattcgtccgcagctttgacagctacaacggcctcctcctggttcagagctgccgcttcgtcagagacggattctgaagcaggctcggaaacaggttctgatccctgtaacccagatcggggtcgttgaggaggtctctccaacacaacttctttacccctgtttaaatgatgcgcaccaaatacgaaggtcaatatagaacggagaagtacaagaaagacacagttatgatcagtgcgagacgtaccagattcggttggaaagggccctgttgattgtacaattttgtgaaaagcaaaaggttggtattgattacaagctctgcacaagtcttcgaagaaatggcgtaacgtactgcttatcattcttggccaacatcaatgacatcgagtttttggccttccagagaggcataatcagatcatgcttcaagctatcaatagatcaggaaaccaatttagtatatctactaagtattaataaaacgaacagagaggaagatacacggaccttcctccatctaattctccggccttgatgacgaaaatcatcgatccaacaggcttctcagcaaagatagactttgagggctcttcaaagttctcaatctattacgacccaatcaagcatgcgggttgttcatatcaagtcaggtcattacacattgtaacaaacgagttgaaaatctgatgactggaatttaccaatgggtagtacgtctccattaaccgtctcaaatccttgattgatccaacgacaaatttactctttccaacataaggcaaaaggacctgaagaccctcctggcatgctcgccacttgcactgcatagtctctcccggcgtatcttgtcgagcaaagagcttgcaaccggctgagacaagcctgactcgagtgtattcattgttctcaatgatagcctgatgggtcaagaatttgatgagtcatttaagatgtaatgtgaaacgcctcttaaatgaaaaaacaaaccttgcccatttcacaagtatgatagacggatcggacggcgtcaccattgatgtttcgaacatagagagtggatgttgggaactccgagctgagttcaaagaagttgctgtgaatcgacgtgtattaaataaagggtgaacagcaaagtcagcttgacatgaataggaaggtaacttgtgaggcaaactctaccaacacagctgctttgacttcgtccgaatcagcgttaaggaaatagtagggatgctcctgtgagatgaagacatcaatctgatcagtttacaacctgtatgagtttatagacaatgcgtttcagtaggtacaaactttgaatgtaggatccggctttctactgaggttgatctccggcactccatttacactgagtttgagtgccatagcttcctgcctcgcttttttggggactggctggcttgtctttgaagaagattccagcgacggagaagctccgcgcttgataccagcctcgacagcttgcccagtgaccctgtttgtcaatacaagtgaagtcaggtgacagatatgaagagatgagaagtgctgttcgcgatgatgatacttactccaatggttcttccgaaggagctccagtagatcctggctcagtcttggcgatcgaatcaacgacagctatagttctggaaacaaacatcgaccattgagaaggaacaaattatcgtcttgagcattcagcatgtcttcagccaatatatcggatattatggacagatgtcatgctcgcttacgtgggctcctcgagaatcacttgatctttctcatcattcattgcctgcttctcctgaacgtcggctccgcttgggggcgaaggtgcagcagattcagatttctccaaaacgacgacgaagaatcctccggtatcctgatgatgagggtagagtctcatgctatttcgattccaattttagaagaacaatatgtagaaagatcaacatccaagatgacaacctcatgcaagccagaacgtaaaaaacgaaccatctctccaagccaagctccttctcgttaccgaccggccagtacgttttatgaatcttctccttgagctcatccgatgtctcgggatcatcaaggaactcttggtatgtatcgtagatcgacatcgtatccttaccgactccggctttccaagtggttaatccagggaatctcttcaaaagaggatatcgatcagagacatctacaatcttgaaagctgtcaaaaaaatggggacatgatatcaacacacacatacacacaatggcataggttacgtgattgttagcttagtccaaagaacaaaacacaaaccagaattgttgtttagggcagcagaaatgacggcctcattctccaccggattgaaggaacacgtcgagtaaaccaatcgtcccccaggcttgagaagatccattgctcgaagtaaaattttcaattgaagactacacaacattatgtttatgcgacgcttggttatgttcagctccatctgttcgtgcgccgctgaatggtatgcatgcaagatcagagactgtcaacttacgcatgaagaccattcccatcgatggggctccatttgttccaaatctgtatgttcttccgcattgttccgtctcccgaacatggaacatcgcacagaattcgatcaaactgaagggttttcataccaaacttctccattccatcaggccccaaagagattttgggaaactgaatacaacatataaagatagattcagaatcataaaggtgcaaaaaatccaaggcgcgacgagatggaaagaacaaaccctcgaggcatccaagttcgttatcaacacatttgcactcggtaacctgttgctctggtgaaccaatagatgggatctcttaagatcgctatcgttagccactacgaggcctctcttattgataggcacgttggtctcatccgccgtagacgcatgaagagcttcgaggagctgcgcggtcttggatccgggtgcggcacacatgtctaggacgaggtggtgggggaggacgtcaaggaagagaggcggaatcattgagacagcttcttgtcgggacaagttaccctacaagttacacgttatgagcgcgcgagccgacaaaaagaatttatagagagcagagtgaagggacaagacgcgtagcttagcgacaagcctcaagacagcaatataggatattgataaagatttggacgaacgacctcagtttcgtaaaccaaaaattgttgaagcttcttgtactctggattctttcggatcaacgactttccggcgttgacctgccatcccaaaccatcagggtacctattatgatttgaataggccggtttagtgctccgttgagattaaagagttaaagagtgaacgaaccaaggtatctgaaaggggggaatcgtcttgactccctcatcctcaacatccccaatcctggacacgaagttctccttgaaaagctcattcaggtcctgtgcgtttctgatttagaaacagtttgacacgaatcaaaccgagcaaatttgttaggggaaaacaaatgattatccagaatggaggtggagtgttaacaatcagagtcttaagagaacttgacgaactttttgctaccggtgaatcggaaggtgacgggtaacggctccgtcaatttgtggtagaacgcatcccattcatcctcggggacgaccttctgagcctacaaatcccagagacacaaacagattccgtgcagatgtttaaaaggtcaatataacagaaacacaaaagtctcgcccacttgggcaagaataatattcctctcaaactcgatgtgtgagcgtctcttggatgcattcaagaacggaagaacgaactttataaaacgtcgcgaatttctcgttcgtcatctcgatctccttccaattaagcttgtcctgctgccattttgccttctgagcatcaccctctgcaccagtcggtttgacggatccagtcgagttcttgttcttgttcttgcctccctttcgctacagcaagaatatagaaggaagacaagagggcagaagaaactaaatcagtctagaccgttctcgaccgctgttcctatttttccttacactgatacgtaacaccttaccttgttgtttcgaggcattgcttggaatagtttggcagaaggaatataagaaggaagaagtcgtctagtgtagtagacgagttgtgtgttcatcgtccatccgtttactcttaatgggaaagaaaagatcaaacagacaccaaattcatgttcacgtgatggctaaagctatgcttcgccacatcaaagatacctttgctctgtcttaaatgtcttcatgtctcggaatataggctgatagaaccatcagtgaaggctgctggaggagaaatgatagcgaaacaatgtgtataatgccagcaatacatggtagaacaaatgcctaggtaaagagtttgccaacggaagtctgagtgccctcggcgttcttcttgagaacctctgtcgattccaacagataagtagccaaaatattaacgtatgaacaccagggtaacacatggaatagcaattgtggacaaacttactagcaatagccatctcaaaatcttcaccgcctacatgaacacgcctctctcgaagagcgtacatacctatacaaattgtataagaggacatcaaagtcaatattcgaggctgggaaaaagtcaaaggcataagtaacttaccagcctcggtacatatacccctaacttcagcaccagaacagttgcccatcttctccgctaatgctcggaaattgattcctcgttgcagagacatctacaaggagaagaaaaatttcaataagtacacgcatatctaccaaatcaattcgggcgcttgcagtcaaggcgtacctttctggaatgaattcgcaagatagacactcgggcttcaggtcccgggggggggaactcaatctttcggtcgattcgtcccggacggagcagggcagaatcgagaatatctatcgaatatgcaaaacacagtcttaaaagacgatataaaatcgaatagattgaggaagctctactttactcaccaattcggtttgtagccatgattacctgatcgatgcaaaatcaagtggtgagccgtaagcacgttgaagcgtttaccaaaagctaaaatcacgtaccttgatgttctttgacggctcgaatccatcgagctggtttaacaactctaacatcgttcgctgaacttcagagtctcctcctcctccacccctcgaacttccaatcgaatcaatctcatccatgaagatgatactaggcgcgtgctccctagccatcacaaacaactctctcaccatcctggaaccttctccaatgtacttttgcaccaattcacttccagaaactcggatgaaccgacaatcggtatggtgagcgactgctcgagccagtaaagtctttcctgttcctggaggaccatatagcagaactcccttgggctgggcgataccaagagagtcaaacaactcagggtgtttgatgggaagctcgataacctccttgacttcttttatttgtttgtctaatcctccgaccatctcgtatgttgaatccgggactttttcgaccatcatgagcgagacaagggggtcgatcttgttgggcaatattcggtgaagtttatatgaatccgaccggagggccactcggagatttggggtaagagagttgatgtcgatgtcaggagtaagatcgaccactgaacgtgatgatgaatcgtaagaaatacatggtcagaatctatacctcaactgacgaatctctgcgagatgtgtatgggaagggagtactgaccgtatttgccttcaggctgaaccttgacaagcactttagtcttgcccatcaccttgattacctctccgacatagcttccaggctcttgtaagagctgaagctcttctctcagtaaacgaactgacgaatcaaatgtcgtatttcatttgtcagtaacgatattcatagtttctgagagagcattgagctcaaataaaactcaaatatcagtttatgatgcttacctcgagcgttcagggcattcctttgagcctccaaccgacgaaggttctgagtcttcttgttgatcgatagctctgctgcagagattttcgaagtataatatgaagtgatatccccggttgtcggttttgattttgttactgtaggagacatttctcaagcgatgatgatgaatgggatggaatgggtgattggcagaagagatgtggtctaggatggagatgagcgttgagcggtgcgtgggcgcgtggaagtggcaactctaggctcggctcgattgacttcaacaatttctttattctgttctcatcttacgttgatatcactttcttctccatctccactttatctatctctatctttaagaatgacttcccacttggcctcctgtatcttttgcaagatcatcaaaagtggtaagtgaaactttatgacatctcaaagcatcttttgagatcatatatcagaataaagaaacaaacacgaaaacttgttaatacgttatttattgcggcttctccttgaaagaaatcccatcactcaagctagccgagaccgagctctcgtgagtatcatttggttatcatcgtacaaccttgctccttgattgattgcctttcttgcttgtagctatgcttttcttgacattggacctctgtccaaaggacactgcttggtaaatctcttgatgttgctccttgcctctcgcttctaaaatcattgatcagaatgattgtatttgatggtatgatcaggtgattcccaaataccatgccgcaaagcttcacgagcttcccgacaaccacctcgcagatatcttgcctgtaaggaatccccgatcaattcaagaccagctggaaaatatcaaatcgactgacttgtctgctactttattctcatgcttgtttcactctgcgcttcaaaaaaaaatcagctggccaagaaactcgccatcgccactggagcggtcgactataatatcctccagaataatggtcgaaatgctcatcaggtcgtcgatcacgtccatttccatgttcgtcctatattctctctttatcatcatatgaatttccttcagactccatcaagttcttgagagcgtgttcaccggtttcgaatgctaaaacgtatttctgtgcgcacatctacaaacaaatctaggtcatccccaaaccctcggagagtgatgaaagtggattgggaatcaagtggcctagtaagtggctcacgccaggttgtcattatttgcttgtgaatcgtctgttggactcataaactcaatttcttattcgctactcatagctacttctccagtacgttcaactttcgatctcgtccaccttcatgagccttgaattgaattatatctgacctttttactctttcataataacttctgcttctatctcctttgcttgctccgatattcagtccaaagacgagctcaatgttgtatttgaggagatgaaagccaagctttcgaaactctaaaagcttgtgcagtcgtttcatcatcatctgttgtgagtttgaggtgagtgagtgagtgagcaagtggatgcattgtgagtgaatgagtgagtagacgtatgtcggagattgatgtatcgttatcaagctactttttcggtcttcgttctaacttttgaaaaaccacgggagaaaagccattggccaatctaatcgatacaacttaattctacaaatatccacggttgaaaggaaggcaagggatgagaagcacagacaaagacaaacttcactcaaaactcaatgaagctagagcgacaagaaggttgaaaatgacgatgaggaaaaagagctgaatgagaagagaaagagggagatggaagaatcacaagaaagcttctagactaactacaaaactaataccatacgaatgatcgtcaggtaagactcaagtagatggccaaatcattctacaatgtcttctatagttggcaccccttccttatcgtgctgcgaatgatatgtatcgttggcttcttcaggatatctaggtctcgtccgttcgatgctttatgccggcgagaattgagaagatagctactttattatttatcgcgcaaaaacagagaaaaagaacgatgcagaactcactcctcgactatgtcatggtaacaccattctaccgcctctgccgcccagtagaaatcacagtgctcgctcagatcaatcttcttgattctgattacttgaacatctggctctttttcctctaatcttttcaacagaggctccgtcagaaccagaaggtccctccctccctatacggaccccgaccaaagatgcagagcgatcaaaaagattagcagaacgcccgaggaaacaagggcaaaattaggggaagagaacgaacatgatagatggacaaaggagggaatcgatggtcaaaccatcgatccaacgaggtatcgaacaaacacttccgagtagcgaaccctcctttaccagcccaccagaagatcgaggccgaactgtatacatggatgatcgattgagcacgtggtgcgataagtgggaatctgaaaattcattgttgtgtatggactaacctgacaggagatggcgtaaaccgaaacatttttcctttccgtctagccagcctgtgttccgacagaaggaacatgcaaacgagttgtcaaaaaaccaggtagatgagtttggtatcatcacgaatcatactaaccagttggcatccgtccagtcaaacaagaaggaaaacatggtgtatccaagaaaagcctgcgataaaagacgcgaattgtaagcatcttgaagaggatttggtcgcttgcgagaaactcacaaagaccgactgaggtgcgtaatcatacgcccatgtcatgattggaataaagtctaaaacgccaaagaatcgtctccaagatttccaatccattctacctaacgtagtgaatggaaacccatgtgtcaacggccccgcaaatacagccggggcaagcgcgatgaaaactgagagcttgggtccaagttctggacatattccaagggaaagtgaagtgaaggctgtcccgttgccttgggagtggccaatgaaagcgatctgataatgaacagatagatttgaagcgaaatgagatgtatttatcagatgattgtcatgctggtctaagggagagacagcgatgtaatcctgaacttacctgatcatacccagtgagttttcggacctcttcgaccagcgcaggaaggtcgtacaaagcaagttctctgatagtccagtctgtttagacaatttggtacataatcctgatcagatcttgagactctaatatacaagtactcttcggattcgtcaaggattaaatgaccaaccccaaaatcgtgcctctcctctactgtaagttttgtgacccattccaaagactcctcgagtgtttcctaaaaagacttgatagcctctgttcaacccgacaagtcaaatataaggtggtatgtttagcggacgatcgtggacgagttggtgaatatcactgactgttttgccagccaaaaagccaaacttcgctcctcactagtgatgaagcttcctgaactctggaacagaccatgcatgagaagaattggatatccacctctgccatccgatctcgcaattgggttgggagggacgactcgttgaagtctaagggcaacccgtaaggttagtcataggtcttacgccgtggatggtgcatttgttacagatagcgaaagatgcatacctcaacaagaacccgtcttccgtttctaccacgagattttctaagtcgaaccccacctgcctggcatagtaggctggatcgttcgtgatgacctcatccttccatcgcgtcgcctcgtcccattcaaagcttggcggcgtctttttccagaaccagcttggcaaagttttcttaaagaaagcagccgtcaaggcatatgtaaccactccagccagaaaaattgatgagagaatgagactgcctgtttggagggcgaataggtcaaggcgcgatcgaagggcgctcagaaaggctaatggccctttggacacagtcacaggtggtggtggcgtgtatggtctctgaaagatagaagacgacgagatctgaggagtcgttctaggaattgtacaacaacaacaacaaggaacacttagaaacgttcgacaggcaaacgagaagcatatacttacggccgctcgatcaagattcccagctccccctcatcacctctattccatccatcatcgacattgggtctgattctatctcttggccttgttatcagcggctctgtatcctctccatgatctccggcgtcttcggcgacatagctttcgccatttgatccagaccagggcaacacgttgtcccacctggtacgccctttgtctttactgatcgtacctctacggcccccaccagggatgcctggtccatcggccacgctgaccactttgagagatgactgatcaggtgttactgaactgattgccgtatcatgtggcctttgtttgagaagagaagatgtctgagcaggactcaaccttggcaatagtgtatgagaagaagccaacgaggacgaagaggggaacgttgaagacactggtaccagctgaatggatgctcccgctcgatgagggatggtagtatcacgatccaaggagatacctgatggatatgacggaggagacgctggcataacggccttttcgatcaggactcttgtgttctagatgtctacaatatgactgatgagttcgatgcaagtttgaatgatgggcagtgttggtctactaacgtgtgttgggaactcaagcgcgtttatgctcgagttcatcattacgtaatcgaacgctttccttctgattgtcgttcctgacgttcttgtatatactaagaaacatcaacacgtcaagaaaccaagcagtccatgctgatgatgaagatggttgtgtgtttcgcaaacaagaattcagatcagttggaaggtcaacatagagaggaagccttgatgggagatatcacttgatcaaccctcgagagacagaatcaatgatcaagcatgaaaaagaatctcgatgaggaagactacaattgaatcttgttcaaccaagatcgtctttccagctgaaagtttgtacgctctttcgggaaattttgtgtgtgtccggtcgattgtctgtgatggcgctgatggttgtgtgttctaatcggtgttgaccgtacgaattttgtttaccaaaaacgatttttcttgatagtctttcactctcactttcatattgaggttctgaaccttgcaaagcagagagctatgagaatactttgttcagcccgtgtctggtcaacattagcctgcgctcgttctcggagactgctctctaggaatccagtccaggcttacaatacgcgtgccttccatgacagccttcctgctcttctgagagttgatcctcatcgacgatcgttacaagatcctatatttaaggacacgatctttgctctagcaactcctccaggaaaagcaggcgtagcggtcattcgtatatctggtccagctgttcaagacgtctggcggttgatgatatcgtctcctaacaaagagggtttaacacaaaaccaaagcgagaagctccctcagccgaggcagatggtccttagggatatcaaggtgccatctctcaatggtgatggcgagatcattgaccaaggcttagttgtctactttgctggcaagtcgaattcactatggttgatatgaagaactgttaggatctgacatggctttttacgttgactctctcaaccttcagcccccaagtcattcactaccgagcctcttctcgagatacatacccactcatctacagctgtgatctctaaagtactgtcctcccttgctcaaatcaatggttgtcggccagctgagagaggagaattcaccaagactgcgttcatggcaggcaggatggacctcacagaagttgaaggtctgaaggatttgatcgatgcagagactgaaggtcagagaaaacttgccagaggattggctggggtgagtctcagattatctcttcgtctcaccgagagcctaacatattaaaagcatatttcacgaggcacttcttatagggagatcacagaattcgatatgaagcgttaagaacagatatcattcatgccatggctatcgccgaagctttgattgattttggagaggatgacaatattggagacgaggtattcgaacaaggttcgtcaacatcttcttcccatgtcattccttagttcatttgtgaactttttgtgataaatcaggaatgtgatgctcacattcactcattacttagccagggataaagcaaaagagctgtgtcgggtgatggagggacatctaaatgactcgcgaagaggagaacttatgcgatcgggtgtcaagatcagcatctttggtccaccgaatgctggaaaagtcagtgtttcatttcactcgcttcagatagacagcccgtttgtaacatccatgataaactctcaatcttttacttcaaaagtcatccctcctcaaccatctatcacaacgagatgccgcaatcgtctcacctatagcgggtactacgagggacatcgtttctgtcgccttagatctagatggcatcaaagtgattttaagtgatacagctggattgagggtaacagaagatcagattgaatccaaaggaatcgcaaaggccgaggccgagtaagatattcgtcttttcttccctctttccttgcttcttcaccttgctgatgattgaaacacctcttggatatatagagtggttctgtcggatatcagaatattggtcctctccttaccggtatttgcctacccatggactcagccccaggagtacctccgtccagttatcgacttggttgatcctgaacgaacgatcgttctgttcaatcagtctgatctattaccttcttcgttctctataccggctcgtgttccctctgcttccgaccctgcattgacatctatttcagtatcaacggaaataagctgcacgccaaaagcattagctgagaggattgtacacgaatttctgccaagagggaccaagatttgggtgggcagtttggaggagaaagatgacggcttggaaagattcttaacagatggtttagggaagagcgtaaaaatgatgtgcgtctgtttttcttcacttgcgctcaattcgaggtttatcaattttaacgataagattcaataggttcgaaacaggacaaggaggatcaggagaggaaagtccgttgatcactcatcaacggcatcgacatcatcttcagaagagtttacatcatcttcaatcgttcctgggtttgtcgtttgtctcttgtttcttttatcatatttttatgtttgcttataccttcccctcgtttttatatcatcctgaatctaatgtttttcgactaacctcacaaaacagctgaaccaccaagcaatatcattttagcaaccgaatacctccgcctagcagctcgtgagattggaaaggtctctggacgagaaattggattggaagacgtattagatcgcttgtttggcgaattctgtatcggtttgtctcatcctctcaccgacttgcttgtttgcttttcgatcaacatctttggcgaacaatcgtaaagagctgacttttctacggtttcatgtctaggcaaataaatgatatgaagagcatgttgttccttcttttaagtctgagaaaacttgatctttcatattatcctcctcgtcgcattaatcaacctcccctactgcctcccacgacactccttctccaacctccacctccgcctgatccgttcccgttgacacctcctgctgtgcccgctcgtcctgccaaagctgctttctgagcactcatcaccaattctgcaatcatcccgttcgacacaatcgattcgtcttgctgagcatcgcggagttggagaagataagagaggagattggaagcttgggaggaacgggtcgacagttcggtttgaagagactctagtttatctagtgagagcaaggacagagagtctggaattttatggcgaaagagaagtatcaaacgggtcagatttgatgaatcaatccaggacggaacgtcatgttgaaaaccgaatgatcacagtcagaagaactcaccactttccatcaagcagagctcctccatagtctcccatccgacctctggcatatttcctaaaccgtacgttttcgctttccgaccctttgctcccagatcgacatctgatcccggtccgacgacgcctcctgccgtccgataggggctcgttcctccagaccgaactccttgatttgttgatccagctcgtctgggtacgtccaacgacgtcgggctagaatgggaggacgaagcattatgatggggatgaccaatggtgtttgctcgcttcgggccagaatataatttatcacctggtggggtagactgaggtcgcatcggctggtttgaatgttgattgagatgtgcactattggcgagtcgggttttgatcatcagtggcggaagggtaggttgcctcgaggttgctacctgtgaaagacagagaatatacatcagcagatgcgcctgtcgatcttagaaacgacagacagctaaagagtaaagacagacttcgtccaggttcacaggtacaccaagcgatatgagatgttcccttctcactcgactacgcgtccagtccagtggacgtaacggtacaggatcaaccaacgaattgtacagcgctcgactgaagttgcggagaagagaacgaactggacgagttaggtgacgaatgatgattaagacagacagaaagaccggattgaggttaaatgtgaacttgccttttctcatcgactaagacctgactaagaccggcgacgtccctgacatcctccccagtcatgcttacttctggatctatgtttggatatatcgggctaatgatccgttccagagaaaagcgtaaggtctggagatcagggaacggcgcgagtctcagtgatggcttttgagaaatagttgtgtatcaaatagagagagcagaaaagggtatgaggattgtaagttgatgtgcataatttctgcttcgagtttcagagagagcgatacacttacgatactcggcggaggtggaacatgaacaggagcagtctcaacctccttatcaaagtcaccgaacccttcgtcctgtacttgatcaaatcctccatcggccatatcaccaaatcccccgtctgctccttcatcgaaatctccgaaatctccgaaatcatcatcagtgggaaacccgttgttgggattggatccgaccggaactggtgctgattcttcgtcgaacgaatcaaagccatcgtcgtcatcatcgttgaatccgtctgttggaaaggagtttgacggaggaggaatagtgaaactagatgagtctgctggtttcaaaggacttgatgcagagtctcgcgttggttcagtcgttggtgatggttgttggccatcactctctggctgatcgagttgaagtgagacgggagagaagtcaagctgagaaggaaactgctcaagtcgaacagtaggtgaaggtggagaagatggagcgtctgcccaaggtgactccttctcttgttcgggagatgaagtgaggatgtccattagagattgaaacaacccggcgtggtggttgaagagacgaaagttggtgcaggtgacgatgatctttcattaagagaacgaagtatagtattagaaacagtttgtaatcatacatcaggggaaaacgtcctgttctatcattcacatctcatctctctctggcttggaatcttgtctgatcgatgacatcgatctaatgaacaacattgacaaatagatgctatccttctgaccaagacgttcgaattctttcttgtggtgaagagaaggaatgtactatagttgatgattaaggaaatctcttcggtacaattccgaactgttcccgatgtaactttgaaagcttctgctttctttctgtttgacatctctgttcatcttgctctcttctacctctccctctctcctatcaattcagtaagacatcaatcatgtctctctgttcacctcagttgacttcagtattgtccccagtggcttttgtgtttggaggatgtggctcgtaagagtgtccattccttgtctcttactttatcctgatcaccggagctgaccgaatgatgtaaattccatcagcaacgtctttgccttggaatccattctcaaagaaaactccagccttgggttggttctagtctttcggatgtctgctgatgaacctcatactgacttctttgtggttgtcttttcgacctttcctgtatcgtaccacagtcctttcataacgttcatccagttcatctttgtcgcttgtcaatccctaccttcgaacatcaccttcacctatgatcgcaaagtcactcagaaagacggtgaggtcaaacttgagactcactcgagttggataccgcgtttgaagaaacgtaaggtgccgatcacaagatggctcgttcaggtagctctttacttcactgtgagcacattgaacaactgggcattcggtttccatgtatgtctaggttctttacttctgtttctaatatcagactagtcaatgaggatttcacatggaaagaattaacctccccatcatcactcagattcctgtcgctctacatatcatcttccggtcaggaggtaatgttcttactccctaggaacacgtcacatacgtttgtcgtattgaccatcacttgattaaacatgattcacaggtctggcgatttcgatgctcacaaactacatgttcaataacaagcgttacacccccatccaaatcgtctctgtctttcttgtctccattggtatcgtccttgccactttctccgctccccctcgatcgccacgtgcatcatcgccgtcttcgcttggcaaggtcgacagcccaagcgcggcaggcctctcactatcggcagcatggcaagctttcgatccccaatatctccaaggtattggtatcctcactctcgcgctcttcatcggcgcatttttaggtatttggcaggaaaaaacgttcaaattacatggtagagattgctggcaggaaagcttgttttattcggttcgtatctcacgttaatgtcaatcttcttttggtgccattcgacactcttactccaaaccttgtctactcttttccggatataaaacatagcattttctatctcttcctttgtttgctccacttttgccttctctcccggcaacttgtcgagagctcaacgcttcgcctccccttcaactatctctctctccattcgttcctacctctgccatggccttcctcgtcgacacgttcgataaaggcgagaagggcgctctcactttctggtcgcccgatcaaatatttaacatcttgaaatatataggcgtagacctattgatcgagttacctctacccagagtttgggcgtgggtcggtgtgaacgttctgacgcaggcagtctgcgtaggtggtgtcaaccgattgacaagtgtacgtttaggtttcatcacgatgcgctgaaacacactcactgcgataacaatctcttcgttcgattgttttgtttgctatgggggggtcgaaatgtgtagaaagtttcgaatttgacgctgtcattgatcttgacggtccggaaggcgttctctctcctcctctcggtttggtggttccagggatttgagaacttgagttggggtatgatccttggtgggtctttcgtcatgggtacgtgatcttctatttcctacctgtactcgtttctatattcctagcttccgaacttagtcacgagagcgaaattccgttaaccaatttttgtttgggtaccgacgatgatgatgactgtgggatttgggatctatagttggaacaggcttatattccgctgcttgaaacatgtggacacattctcgaatggtcgccttctaagctctctatcgtcaaattctttctaccttttgaatctattcgattattcataaatattttggatctgggtcttcctctagccttcgataccaaagaccttaacaaagttcgacgcaacaaagaaaatgagaaccccaaacaagaaagtgtctgtatgccctccaatagattcatgttcattaaacttcgatccatgatcccatcggtaaaccttcaccccattcttcttcggaaacgaccgaccatcctgcttcactcaacctgttttctaggtttgaatctgtttgcgttttaggatggggaggtgatggagcaaaagacgaagcagttggttgattagaaatacccgatgttgtaggcatgcctggaccttggcgcgtctgatatacccgaagaatcgataattcagggggttagtaatgactccaaaaaaaaggcgtcgactaacgatgactagagatgattagagagagaatagagagaagacagaccaaattccggatttgttcgagccgagcttccatttcgcccaaaagatcatcggaatcttctgtcttatcctcaagcggggcatattgaaccgggacctatttattgggtgtaaagcttaggaatgagaagcgacattctggaggaaagaagagacaagctggaaaacagaaagacgagcgaggatacggacaagttttgattcaagcatatctagtaggctggatacttcaaattcgaaattcggatggctaagcgaaattgcccggaggactttccttgacctatttgttttccaaaaggaaaaggaaaaagttcaatgaacagactttaagaaaaatacaaaagaggaaaggaatcacctctcgctatcccaagcatttctgatcaagtctttaacgacgcccgtcctatcctcatcctcaagtaacctatcgaacacccaaaccaaccagctcgccaatgtatcctccccgtcgtctttatcacgcctactcctcggattctcaagaacagttataattgtgtaagcgagcgtagaagcgaacgagggatatgttgaaggaataagtgtgagaagaggtgtgtagatctcgaggagcaaagaaggaggataaggtgtctcgggagtgaaggaagaccgtttcctgtgttaagttgttttatcgttgaaagcggtcagtctgatggtgcaaggattagttcaagcccgataaactgacttttttgagataggtatcaaaccaccagcctcaattctatcatacagcccttcttgatccgattcgaatcctactaaggcctccgctaacactttcactcccatccccacgcctcccctcatctctgccatttccaaccatctaagaatgtttctctgaagctgcctaaaagaagtttgagaagttgagtggtccttagtgatcgacttcgatagagttttgtattgtttgagaaggctcgggaggagcgctttgtgcgattggaagaatggagagacggtgtgcattgtttcgaacgattgagatgacaggttaagcgtcggcagaaagaacgatacattcaggtagtttaacgcctgttcgataaacaatttttttaagtatttattgttataggcataatttctcctgattaaatcgatgattagaactaacctcttgactaccctccgttaagacctctaaagacggcaaattttcgtgcgttcctgcatgtctcagttcgaccaaccagccaggaataccgagttctgctgagatcatcgctatcggtctagcaaattggccggtctgatacgggtcgacaagggtattgatgaacctgacgagtgaagctgcaagagaaagtcggatcgaatgagggtccggacggggtacggttgtgaggagggaaagtgaagagagaagagagagagcggatgagatggcgattggatgggtagacggatgaagatgaacccatgttttgagctgtgtgataagagtcagcaaatgaaggagctcgattaggcaaggaagaggaaatagacaatggaagcagtgaatgaaggagaggtgaaggaaagaagacagactctattaagcccttgctgtcgggcttgagtatcatgctcattgtcgaatatccatccctgcacctgggcaagctcatcgagcgacctccaagggacttttctaggcataggcatctttgaaagctgacgatgaaacggatgtaggatggcagtcaatgtcgcatatcaacaaattgagcaggtaatatttggatgacccggtttgtcgcgatactaaccagataagtcaacattttgcccagcaccctgtactttcgttcttccttccatcatcaacatcattcacacactctttctcaagacaaatggcaaaccaggcaacttacatctcgctggaagatcagagcgagagtgatatattatggatgaaagaagctctcgtcatggttcgttcgacataggttcatgtatcttctcatagtcagacctgtcttttagttctcgagtaacagttccgtcttgtacaattgacttgatccgtccaggccgaggaagcgcttgaagccaacgaggtccctgtcggatgtgtttttgtgaaagatgggaaagcaatcgcccgggctcgaaatcgaacgaacgaatggcgtaacgtgcgttctcaacttgttgagcctatgtgatatctctcatactccgattgatccttttatttcgctctttcttctctatcttctaccctgtcgaacgagataaataggccactctccatgctgaactagaagcgctcgaccatattctccctctcttccccgctccgttatcagaggttacactatatgtgacggtggaaccatgtattatgtgtgcgagcgcactccgacagattgggataggggctgtctattacggttgcggaaacgatcgttttggaggttgtggaagcgtagtctgtgtgaaccaggagtacgttctatcctctttcttctcttcatgatttagagtaacactgtgatgagttgcagtagccaatgatgcttgtatgagacgttagtccgagtatagactcttttaagccatacccggcctggggtggatactacagagacgaagcaatcatgctcctccgccgtttctatatgtcagaaaattcaaacggtgcgacttttatactacaatactcgtggctttcttgcttgttctcatatcatctgattatcatctgtcctcttttatctctctctcgatttcgatcgccgtgatttacaaatgttctcccttatcgtcaacagcgccaaatccacgaaagaaagcaaccagagtgctcaagtttgagattcctcccactcctacgtcaacatccaacaccagttcctccgttcctagtagatcaaactcagttcctcctccgctgaaaaaagccaagaccgagaccgaatcaaacgcagtatcaagagcagacgacaacagcttatcgatatgagaggaggcttgtgggcagatggaaggggatgaaattttgggttcaaaaaatatctagtcaagattgatactcgatcaatcgcttgaacgatgtgattgttgtgaggctcaagaacgcaaggcattggtatgaacagaatgtgcccgtcgacaaaaattcttccaattgggtgatctatctttacgaaaccgatacaaatcttgactagtctacatcaacacatccttagctcatgtctttatgcatgatttgaaagacagataaaacagctggctcaagccttggtcatatcgacaacacatcggatacagcttccagactagatgagaaattaaagagtgaaaaaaggatgaagcatgagtttgtcgtatctcatcaaatgtatcaggataaatatgaactgacatgcatatcgtcgaatccaccgttgatttccttgaaaggtcgctcatgagagatgaattcatccacccaacttcagatcattcgagcaatttcatccaaagagaaagaagtcaacaaacaatcatatgaaagaaaacagacatccgcttcagatcacggaaagaaagaaacatacagcttgcctgccaggtaatcctcaacgatgcctggaatttccgttcgtcccttcacaccgccgaatgcagatcctttccaagttcggccggtgaccagttggaagggtcgggttgagatctcggcacccgcgggggcaacaccgatcacgttgcatacaccccaacctttgtgacaggcctcaagagctgaccgcattacgtcgacctacagtagatggatatggaaagtaaagtatacaagtacacaccacatcagctatgatcaactagagatccagaaactccctaaatgtacgcggaaaagctcttacgttcccggtggcatcaaaggtgaagtctagtcctccatcggtaatgtcaaccaagtgctgctggatggtctttccctctgggaggtccttcgggttgatgaactcggtagccccgaacttctcagcgacctccttcttctgagggttggtgtcgaccacaatgatccgggcagccttcttggctttagcgccctgaacgagcgccaatccaacacaaccggcgccgaacacagcaacatttgactcgtctattgaagtcaaacaaagaaaattgttcaaaccccggaaaatgatttcccaacatcttcatactattagcaagaacgactcaagaacctaccaattccaggagtcttcgtagcagctccatagctgaagccgtgaaatgtattgagttatgtttgatgagcttaagagcacctatatctataaacagatagaaagaaaatttcacccagtggtgattccgcaacccagcaggcaggccttctctaatggagccttatcgttaattttgacgacagagacttcagcaacaacagtgtactgggagaacgtcgacgttcccatctgttcaccaaaaacaacttatagatcagcctatactcgatcatttgatgtaacttagtgaagtgatatcacgaacgaagtgcttgatgtcctggcccttgcatttaaatcgggaggtaccatcaggcatgacaccctggccttgggtagctcggaccttaccgcagagattggtctttccagacttgcaaaacttgcactcccggcactctgaagagcagaaagagaatcagattgcgatcacgcaatgactttattgataattgaactaaccagcagtgtagagaggaataacatggtctccctttattaaattaaataaataaaaacagtttatcagactagaggggtggatagagttcgaagtacgatgatcgacactcacaacggccacgctagttacaccctctccgactgattcgacctacacaacgcaagatcaagttggtatatggatcgcgcatgtcagcgcaaacgaaatcgcagagaactcacaactcctcctcctgatgtctcaaaagatgtatcacacgtcagctaacaagtcgcgtatatgaatgttgaaaggagaaaacttgccctcgtgtcccaagatacaggggaaagcaccctctggatctcgtccggagagggtgtaagcgtcactggagtaaagtaacatacctcatcagttgatttttacttaaccttcccatgtgcgagaagagttgacttacgtatgacagataccagtgctgcagaacacaaacgtataattcacagtcaatttatcagttgctagatcaatctgttgattatcgccttgatcagcaaagtacaaccgccagactctctcacccgccctttccgatcatctcccaattatccggcggcgcctacgtcatcaggtcggttgagtagaggcaaaaaggatagatttactagagaacctggattcggacttctccagcttgaggaggagcaacctctacatcctcgatagagagaggcttggcggcttcccaagcaatggcagctgttcagatagagaaaggaatgagtctaggctggatttaaaggggaaaacatccagcaaaggagaaagaaaagaaaaaactataaagtacccttgcaagtgatggtctgtgtggatcgataggtttggagccagattagcagacagaaccttgtaaagggagaacttggtcagatctcttacttttccttcggtggacatgctttgtcagtgaacgtctgatcaggtatgtgagtggatggttgttgatgataaagatcaaggcatgagaaaaataaggaaagtggaggtcaaaaggatttgtcatctgttagggttattggccggtgatttaaactgacatctataacgaatgttgaacgttccatcaccttcatcaccactttcatcatcaccatgtcatcccctacagaaatcacatccgtatcccaatggaaccagactctccgcaccggtttgtatcaataaactgctaacaaagtctcgagatttggaccggtatatcagtatcaatatatttgctcatccgtttttgcgattctctctagcaaccgccgagggaaagactgtattcgttgactttcacgccggttcgttctggttagccgagagtttatgtaggtgaacatgtgtctgtggactgacagataaacatctttaaacctctatatgtaatgcacagtctggtgtggaccttgtaaagtaagtgtgctcctcctctatggatctaacttcaaacccgttgatcgagtgtgccgacgacccgtccactcatcttctcaatctactgccactttggaaacgatagacaattgcaccaaaatatgagagtctctcgaaatcgactcctcagtcggtctttgttcgagtagatgtcgatcagcagagagccattgcctccaaatagtcagagcgttcacctacaaaaacccccttgaacgcattcatctacgaccattcaatgctgaccaagctgtactactttctttacagtcaagtctcatctatgccaacatttctagccatcaagtccggcaaagtcgtcgaaacagttcgctctcttttttttgcctttgcaactcattcaactccatgatgtcgattgtccctcatcataaaccctcttaccacattcgatgggaaatgtgagttagattaaaggagcagacccagcaggtcttacacgactcgttaaaacccactccggaccgaaccctccagtagctccattgccgcaagaagcagaagatgccaaaacagcaggtaatgtgagttcaagcgccgaggcacatcactgcatagcattgcgaagccacgttttcgaggtcgtgtcctgatggtcgttgtcaaacttgtacctgaaacagacggccttcaaagaaggacaatgggagaaagcaatcgaacattactctcaagccatcataattgctgtatgttcctttctgtgacctgacttttcaaattcggatcactgattttctcgatctttatgatagcctgaatcggcaaccctccacgcgaacaggtcgttcgcttacttcaagaattctcagtcagacaaagcgctgatagacgcgagaaagtctgtagaacttgatggaaattttgggaagggatatgtaagattgggagatgcgtacgttggagttggtggaaaacaggcggaagctaaggaagcttgtatgtaatcttcttcttcttcttcgtctctgccttttcatgaggtgtctgactgatagaaaaatggtttatttcctgctttcatggatttgaacggttgtagatgaaaaatctcttaccctcctcccagcatctatgcgaaccggtttgtccttcaataatcctctctccagagttatctcctcaacagaacatcttactcacactgtttccgaacgatagacgtccagtcaaaactcgataaactcggcgcataagtcacactctttttaacatgaaacattctcagacacacttgaccgattcatgagaatcatatgacataattggagctatcagatgtttgattcggaagaaaaaagtggcactggtaaaactgaaagaggtgtgtgagagaagaaaggtatatgtgacataaagatatgtatagtgatggtgtgccagagatgggcttgtcaggtcttgacaagaattaatgagaaaagccgacgattcagcaacaaagaacaggttgagcgctgaaagctaccgagacatgtcgcctcttggaccaaaaaggtttgcaagaacgcaagcgaataaacaagaagttcatcacaagtcgtagaatatatgtatttatgcccagttgattattgtggtttcccgagaggaacggacagagcagaacttgacgttctcctaaagaacggatagctcgatgctggagacgaggtgttggacgaagatgaaaaggtgcgcgtcctaaaagacggcgatgaaggcatgagcggtgaaggggcgaggtcatatgtcgagatattcaatctatttcgtagagagatgagcctacgaataggaagcagaaatgagaggagataagctacggacagtcaggttagcccaataagaagacaaaaagctcactcgtctcgataagcctcgttttgacgagtgactcggatgaagccgcgttcggcatcagctctataaaagttttgcatccacgtgcattagctttctgtattgaatgatatcatacacaacaatgtcactgggcgacaaaggaaggagagaaagtgggccacggacagtttacttcgcagactctcattctctcgtttgagagcctcggaaacttgctctgtggaagggttcatcggatcgtttcggcctaggaacgtgttcagtccgggcgagctcggtgaagaggatagagtcagagccgaggtggattctgaaaggggttggagttgcttagaagaggatgggtccgaagacgggtccgactgagcggccagttgggcccgaagtgtttggagttgtctgaagatttgaagaattgatcggttagtgtcgataggttgaactaaggtcatgacctccgggtatgcaaccttgtcgacaagaaaggactgaatatctacctttggagtcggaggaccaacgcctcggcctccccctcgagggcattatgaaggttggccgtgtctgatctcatctgtatccgagcttgcacgaagaagatcagttggtcgttcatgttgtgcgcttggcgcttttccaacaggagggaattaaatactgacggcttccatctgccttccgagcacattcaccaaccgttcctcctcagcctcgtaagcgttgacgatgtgctctctgtcaagaatttcttctcggtcgagtctaagcatgctattggtagatgagcctcgtcgaaacctctgggggaccaatgggtcgttgtcatcatcctgatgactggagattgacagagatcgcctaggctttgaatttgactgtggcgagttggaacagaggaggggaaggcccaagagagatatttgagtaagcccatgacagatacgagacactattgccaacaaggttcttacggttgtatgttccatatccaggaaaaaatctgagacagagagagagaggatatatctatgtttgttgagaagactgaatgggtaagaattgatgggaacacaatatgtcgagtatgtagagcgaagttagcttacacaggcatgtgatgaaaacatttttgaaatcacctgcgtacgaaccttacttgagaggaacgtgggcttaggttaaggatagattggacatgagcgtcgctgcgcttcgtgcctgccgatcgaccgatggcatcgaaacgtacgatcactcgttatgacaaaacgcctgagagttctagaccttttcatcctgcccctggtagtgcccgatggtgcctgatcgtatttatactattccattcggtgcccgacggatgcgatacgtgcatctgtgcgtcattcccctcttttgcgtgcgtgagtgtacccgtaggtggctgatgacgattggcgcgctcgctattaaattagttaaacacccgttcggatttattcttgactggcctttccttctcatgagtcctcatccagcgtctatcattcagaaagattgagggaagatcatgtcgctcctgctagcgtgttgcgcggtgtgtcgcctgcgtgcgcgccgatgacgtcgatctttacccgaggcgataattgctcttcactcgctccacgacattcaacgatgatgtcctcgacaacttgtctttcgacagccagatagccagccacgctctcagtcgtccaagagtacaaatacaatgagaccaaatccagtcttggaaatcctagttcatctcctttctctactcccatcctaatctctatcttgcccatctttgaacagaaaggtacgcaccgatgagcaagccaacgtccaacactgttcttccagttcacaatggggacatcgcaccaccacccatcccacccactaggaggcacagattcgctcagcgtagaaaagaaagacaggctcagccgcaacacctaacgaaacgtacggagtggaagaatcactttgtggccgcggtaggagagtttgttggaaccactttgttcctcttgtttgcctttggtggaacgaatgttgcggttcgttctgtttcatcagttccagagtcctcggtttctttcagttgaactgatcagatcgtgtttcggtcccttgccctctggacggatacgtctacatgcagaatattccctcggtctcaatcactagtgatgtcaacacgtcccagttactctacatctcgctctgcttcggtttctcgtaagtctattcctcttgacggattcaatacctgagtatgaccaagctaatgacttcccttttctgtcccggattgaattcagactcgctgtcaatgcctgggtattgtaagtgttcaattcttttcttctgattctctcttagcgtcaacatccgctcactcatcttcatcctattccacgaacacagcttccgagtttcgggcgggttgttcaatccagctgtctctcttggtctcgccctcgtaggagccatcaccccgatcagagcggctattcttactgtcgctcagatccttggaggtatcactggcgcagctatcattcaggctgtcttgcccggcacgctcaatgttaggacgacgaaagccggaggaatctcgactgcccaggcacttttcctcgagatgttcctcacttccatgctcagttcgtatttgatcgattggacagttgtttcctttcagtctttcctcatttcacctctacgaggtgccatacgctaactgttttgatcgtcttaaatgtaacagtgttgacaattctattgcttgctgccgagaagcacaaggcgacattccttgcaccgatcggtatcggactcgcgctcttcatcgccgagcttgtcggaggttagtctcgcctcttgatttgcacaaagactttgtttattttaacggaagatcactactaatcaaaaccgtgtgcctcttcctattctgaatagtatactagtgagtgaagcctttctggacgtgattcatatccttctcccatatgaaacacatactcatctccctatttgtacctgcatctgttttaatcagtactggagggtaagtccacttcttaatttgctcaaattagctactgcgctctttttaaccgttacctttctctacgcgtcccttcgtatagttctctcaatcccgctcgaagctttggaccggacgttgtccttcatgagtttgcttcctatcattggatctagtgcgtatctcctccatcacatgtatcgttcgaatgtacagtctccaactgactttcaattttttttttcatgtacagctggctgggaccagcattgggagcaatgctcgctgctgggttctacaagttcattaaattcatgcagtatgagacggtacgtatctgatatcaagactttgttctctactatcactgttgtatacctactgatcctcatctccatctatcttgtacgtttactatctcaggtaacacccgaccaggatgcagctgatacttcaacgcctatggttcccactacgtcggataaactcgcgaaaggcgaaaaaccgtctcgtacgttcctttcattttgcctgtttcagttcccctgatttgttctcaacttatgatatgcgattctctttttctattatgtagtgtcgcgaggacagtcttcgacccgacccattcctgctcctgccgctcctatcgtacctgtaaatcaggtaagtttagttctttctgtggttccagtcaactatcgttgatttgtgataatctgaccatcttttattcgtaattctatccctcttaggttggtctcgacggtctctttgctcaggaagaccccgctagtactgcgtttgaccttcggccagatcgacatggagttaccactgagcgactggacgagattgaagacaagcttgatatcatcctcgctcatcttggccacgtctcctctgtagcaggcaaaagcgctcaagcaattgccgagctcgatcggtcggttattcatcctaaaggggagagcagaagaagtagagtaccggcacctagacacgtctctttagatggatcaccaactatgcacaggctgagtcttcaggatgagacggatgaggcgacagagtatgagagggatagtggtgaactcgatgctcctatcgctctaggccgaccgagattctaaataaaatttcctttgcctctcttctttcgttcttcccctgtctcctctctttccttcctctctgaaacttcaacgcgattgtatatcccgctatttattctgctcggaccagtttcatatctacgactaaacttatttgtaatcctcataccttgtgttctatttcgactcgtaccgtcttgttctgatctccaattacctcatggtttttggtatactctgatcgtatagctttgtgttattcttccccttatgtgtatccataatcaaccccttcccatgtacacgttcaccgcaaacaaacagaagtatccctccattagaatcataagaatctatgagagccaaaaagaactaatgattctaaagagacccgatcagtgatgaatataacctgacgacctctttcgttccattttcactctcctctgggctggcagaccatgtcgttgacaagagtacgtcttcgagttcgtcgaacgtcgtgttcaacttcgaatcaggaagagagagggattgaaggatgaggtacaggttttccgcggtagctgctcgaacctatattccgtcccaagatcatttttcccagataaacaccctttggttccttgcgcaagctaaagagaaaaaattcataaagtacatacagttgggaatcggtggtttagtagtataggtagtgtcttgagagcttctgaggcgcatgcaggcacagtcaacatccccgttattctgatctcccaccaaaccaaatccgtaagcgcgatcgtttacgacgaatccgaaaatcaacaagaatcagcgtcaaagaaatgcggatgtacacgatcagacaataaactcacatcttcatggaagcttgtactctctgtatatttctgattcgacccagatctctgcacgctatggagtagattgaacggattctgtttaccacaacgcccgattcaatttccgtttacaaccagatgtttgatgccctccatcagcttccagctgcttaatgagagcgcttaaaccaaacggagagaaaaagatagcgacagagcttacgtgaccttgccggaagcgatgtcagctattcgtgatagatccccatcctcgaatagtaagacgagcgtatctaaaaccgggatgtagaccctgttcaacgtcacgttggatttcgcaatatctaccagtgttctacagatcgagagtaatgacgcaaccgccggtgagggtgatgatggaggaagagtggataagtaggcgaggaaagattgtgatgtatgtttatgctgtttggacggttatgaaatccagaagaacggatgatcagctgcttgcatatttctcaataatatggtaaatgcacagaagagcgtacattgccttctgacaaacttccgatgctcagtgtcaacccttcgaggagaggtcgtcgataagtctgctccgacactaaatggactaatcttgatatcaccgcctgtgaattttgccatcggaccggctcgggtctgaatccacagcaacagaattagccttatccgtttacgaaagaaagatagagagaagaatcgtcgaaccctttgtagagatttcgcagtatcgaggacgcaggcaacacccactccggcttttgtccatctctcaacacgatgtccttcaaacactctcccgcgacttttctgactccatccagtctctctgccgctaacttcagagtcgttcctactactcgatgataaaccgtttgatcgagccattcgccgattgagtcaggatttgaatcaagaagactacaaacgagggaggatgttccccggatacatgtcattcggatccaagaaccaacatcacccctttggtcggtcgtataatcatcaagacctttgaagagagcttcgaatacacggttgatcccagatacggcgactagttctttgtttcaagattcgcgtatacattaaggtttagtaagaatatcagctggtttgcatatagaaaggtgacttaccaggactggatcctctacaagaaggacgggacactatttgacaaatcgcttcgaatgcattccgacgtgcttccacatctgaaacgaagtttttcgactaatcaaacaagtgaaaccaggacggggcgccagaactgtatataagcatcaggcaagatcagaaagaagataacaagccaaactcaccccagactcgaccataccaagcaatcgctcgatcacgctccaagctacaggtgtcagctggaacgacagtttccccagcactcgggctagtgtttgctggagttctcggttgaatgtcttcatcaaactcaggaacgtgatgagaatcagaaaagattagattagccgcaatatagtgtgcaatttagagcagatataccgatggaaaagaagggcatatctttgaatatcttcctcaatgctttgcaattcgctgatccgactccacatgcaacttaacgagtcctgaacgatctcgtttccattcgtcaaacaaagctccgagagatttctccaggtcacacttaactctggatcttgaagagtagatgtcatggcagaacgggctacgataagacagcttgctgaaagttgttgatcagctgagaaggaagtgaacagcgtgggccgtaaccgagtcaatgagatgaagatctaagttcatccaaaaggagaaaagtacaaagaaaagttgagttcgagcaggtaatccaactggtcttgaatcaacagtacggaacatacttttctgagtacctcctctttcttcggagatgaactgcggtcgaatgaaagcgcaagttctcccagggcaagtaagataccatggatccatgtagagtctagcgtgtccagatgagcaatctgagtttatcatacatagtcattgagcacgttagctttcctacctgtcccctaagaagagaaagaggtcaagatacgtcaggggtagggaagacataaacgtaccagcttatcgactaacgccggtcccatctcatccaaatcaatctctacgatcgatttcaatgcagccgctcccagcaccctcatttccttgtcccaatggcgaagcgtgatcgtcgaataatgttctaagaggtacgaacggtatatctcatgtctgctgggccgaaatgtgtaaaaaaatcttcagtttggaacgatgatcgagccaaaagagtgggatcgacaagaatccaaagggtcataacacgcactgtgcaacgagaggagcggctgtcaagaacgccattcggcgaattccgactgagtaaaaatctgtttttgccaaaacatcgataccatgcgcaaacaatccctgcgtgccaaggtccacgcttagggtgagtcaccaggatgattgacattgataagaaaacgaaaacaaaggaaagtattcaccatccttcccacgttctcctggaacgccgcgcttcccgctctcctgattgtcacttctctatcactaaccgcaagcgttatcgaagctctggctagtttgagagcgtaaggctccatatcggtcttagagaatgctcttggaagagaccaaaggatgtaacaggcagcgtctcggacagatgttccagtagaatgtgacgatgtccgcggatcgaagaacaaagcctaatggataattacaatcaagattaaagcttggcttaagaaaacgtcgatcaagaaaagggcgcgaggacaaaccttcaatagccaaggcaagagctcatccaaacgatccttcgaaagaacacctcgtcgtgctaattcggcgatggctaacgaagcaccatgccatgtcggttcttttactcctgaaagatccatcgtctgttgttctttctcctcgccgtctttgacagtaacgatagttgacgaagcaggaccggtaaagatgacatcgtttgcatagagtccaataacggcttctgctatctggtctgcaaacgagctgggcagaagaattgagagacgagatgtatatttggccgcggaccaacggacgatcgtgtccttttcgaagaagacacaaacaatgattgtaacaaataaattgatgatatcggtcaggcatgtttggggtgcaagaatatgaggcgaaacaacagccaaagcgcaagatatcacgttcacaaagtttatacgagaaaacaaaagagaacagaatagacatgcatatagagcaatgtatgcagcaagcagataggtgaaattacttactttgtcttgcaacccgaccattaaatcttccacgacatcctccacttcttgcggcacctcgatatcctgctcctcatgctcctctcgcgcttcggtatctgcgtctcgtccttctctaccgagagccaatcgacctttcctaaggcttttcccctttccaagtcccgcgcgtcccagatcaccctgggcaagccttcccagtaccttcaccctaagctttctacacaacccgcttttctcaatgtctgcttctgaggagacattcaaatgtacccactttctgatgagcgcgctctgctcaaccgatgctgaaggcgccaagtttgccatacagcggagaacggtcgcttttagaaagggatcagaggacgggcgcgtgggcgtaggttgtatacgagtgtcgcattcggccaggaaccggtctaagagaggataacagtctgatctggagaaaagtcgaccgagcagacccgcagctccgtcaccttcttttcctctgccactccaaacggcgcgtgtacctatagtgaacaattttcctatcgtaccctcccctccaacggaatctagtgagaaagggatcattgacacgagtgagagccagatgagaaggatatatcgaagttgccatgaggacggtggaaggagctgaggatcaggcacaggatgataaagtttcaaaagcaaggggagcgatggaagtgtcggtggaaagaaggatactgtttcttagaatttaagtttatcaagatgagacgaggatcgagcttagaaagatgtttcaagagctttaggccaagtgataacaagaagagagttggactgacagcatgctttccaacctcggactttaagcacccaccaaacgacagttcctaagctagccaaacggttgggtctccaatcaaggccatcttgttccaggttacaggaagaagaagatgggccttctagttgtagagatactgtttcaattgagggacctatgtgccctggaatttgctcagtaccttccagtagccgttgaatagccccaatcagaggtggaaggatgagaccgaggtgtgggtcaatcaagggtggtgcaggcaagtatatatcaagctatgattgcatggaaccaagatagaatcaacagtatcaggaaaaggctatatgcttgatagtacagaaacagcaagaggagtgacaaacgatagatcccaaatcttggacaagtctggcttcttcctgggctggccgagtgggacgatgatcgagaaactcgccgaggagtctgaaaaaagcgtccttgtgggtgaaggaggtgaacagttggtcttcctcctctactggttccatatgtgagatagtggttgaatgtatctataccaatcaggattgatgtagatgaagacggcagtgatgaaggaggtgctggtcgagtgtgtggtaaaatagttaaaagaacggattagagaagtttgtaataagctattggaagagattcaagatagataatac

SEQ ID NO: 1149 - DNA, 11209 bp, Xanthophyllomyces dendrorhous
acaagtattttataataagatactacagaaaagttgtaatcaactttcgtcccgttaattagcattgacttgtcttccatctcttctgtgacctcgtccatcgtccacgatatccatcactcggtctctactcctttccatctttctctctttttcactctttgactttcattaggctcgaaagccagcaccagatctcctctattccttccgtttctgaacaccatgtcttttctagggtacgtcggtcaatctgcccctttatatctcacctctcaatgttctatcctgcacttcctgttttcgtatatcccgctcgccccctccgaaagctaactctgtttatttggtctatctttccctatgttcgtctctttcagtcgtcttcgagcacccaaacgatctcctgcaggcgagcagccgcctcctcaaaatcaacagtactcacttcccttgccagcttcaaacactctgccaccccgacctcaacagccacagagctcgcctgagcccttgccgctctacttaagccagccgtttgtgaggagtacgatcatcactggtaatttcaagacactcgttacccttcccaagtatgtcgatccaaacgagtgggtcggtgtcaatagtgggtcactttcaagtcttttcaatgccgactttctggaaatgctccttacaccaccactatcctttccttcctcttctttcaatacacagtcttcgattttttcaacaacctcaactacttctacggtgttgttagtgattatgacacccccgaaacttgtccgacaatgatgtgtggacctgggtatgcttgaatctatatgcgtcgcttctctttttggtcgtcttacctgacactattcatctttccccccccccttgaatgcttcactttcagcgttgagttcacatgggtagataacaacaagcgctctgtgcggctaccagcgccaacatacatcgattacgtcttcacgtgggtccaaggcttgcttgatgacgaaaacacgttccctacgaagactggtgagtttcggttgctttgcaagtcttgctcttgttaacaaacatccgtcaagtctagaggatctgacctctcaatcactcacaactcaggccgagaatatcctcccaactttgcctcgactgcaaaacatatctatcgacagctcctcagggtgtttgctcacatttatcacgcccagtttccggtaattcttcatctctcccttgaagctcactggaacgcactgtttgcccactttctggcttttggaaaagaatacgatcttctagatctgagagatctaagaaatcctcaagggttcgttcaatgtggacttgtcctctctttccatagttttgaagttatcaaatccttgtcaagctgactggtcatggtcatttttcacaatatagaagtcttcaaggtggagtagccgaattagccgagagatggcgagagatgcgaattcttgacgtctaaacgatccttatcttattctccatttctttctagtgattggtttctatcttacgcgttcgcattgtcttgcatcacttcccttcgcattcgtacttcactcacttcctatcgttttatgtcttcctccctcagcaggcgcaggcgcaggcgcaagcgtaaattctccgttctttctatatcttctctttgttctacttcacgtcttatgagcgttcccgaattactctttcatccgatctctcgattttctctacggcatttctttttctcgcctaaccctttcacagtacacttggttatgctgcctagtctttataagtcaaatccttgttatatcaagaagattatttaggggagaagatgaaaatcacagaagagacagagagaagaactatgattatttgaatgttgaatgaaaattacacattggagagtttaatgagcaacttctttctctgaaagatttcctccacgttcaagatcctcatcgtgcttgtccatagacgatcattcattcctccgtttctcctcacagcagccttggcattcaatcctccgctggctgttcggatccatcagtgccttcgagacgttctcgatctgtccgggcttgcactgtttttagaaaaagccttcctcgctgtggaggttgcctgcattctttcccatcaaatcgtacattgatatacgcatacacactctctcgatattctttgcattagactatccaaaccatgtcaaaaccatcaccaacactcgcagaggtcaaagatatcctggcgtggtgtaaagcgagagagcagccgggttgtacagccgatcggttggttgctatgcagtcattccttttgaaccatacctcaaatagagaaggggaggagtggcattggttctgtcggtaagtccatcgttctattgtccaatttttttttggctcgtgtctgtaaacacgttctttgctgatacgacatcttttgattcgatgttcttctcaagacttacggcgcatccatctgatgattcgatatcaatatcaccattgtcttcagcagtcgatgccgccgctcaaagaaatttctcgactattacagaagtagcaacctatctgctcaccttgcatacttataaatccaatgcatctatccagacgtttaaagaccatctgagtgggctactagggagatgtacgggctgcgtcgaaggctatctgaaagcgaaacgagttctggaagaagagtaagtgattaatattcctaggcttcatctcttatacagatcgaactgtttatcaagaactgacgctgtgttgttgtgaaatctggtcaacagttatctctcgtacacttcagctgcgtcgcttgagaacttcttcacatcgatagctcgttgggaattatcgtttatcatacctcctttgtctccaactattcttgaccacgattcgactccaacgaagacgaggtttcctcatttagtcgacattcctccgtctcttgtgcacctcattcttcagagtcctacatacttccaagaaccttccgttcgtgaattttttgaacaggaggccgcaaacctagcacaggatgaagataagtacagcgtagaactttcaggtgttctggaccattcgtcattccctttcattggcgaaggtcaccttgagttgctcatgtactcttggacggacgcctcggaagagggggagatggaagaggcaagagaattgagagagaagaagtcagagcgtctcagacgcctgggttccctgctccttccaccaaaaaagtcactgccaatcgaccggtttccagagacactaccgaccatcgaacgaattttatctagtctgttctctcctgccgcttcaagagaaccagcgcagataacgacccgcaaatgggtcgccttccaaatgatcctcgatcgtctaaccgaccgaacaattcgagaagccatagttctgaaacttctacaacctgacgatccaaccggtctgtttttcaaagtcgaccgaggcgaccggtgggctgaaaagtactgtcgtggaaaaacaggccgatcgaacttgattgtcactttggtttgctcgagattaggggttcaagaccaatcgttttatcctatcttccagtgttttcatctgttgttcaacccgacgggtagattgttttggataaatgcaaaactttcaatgagtggtgtatcatcaaatgcgcctgcaccgccaaacccactggatatctttcggacgatcaaagataatcctgcatttctcgataagctgtcgttgagctccgacgaatttggagactggcttgactgggtgacgacttttgtcacgagctttttacctgtgccaattgaggagacgagagagaatccgttcgatctgacgttttcagcaaagggaaaagggaaggacgtgctggccaaaggggagattgactggttttcagaaggactgaaggaggccatctattttctgatggagagcgcacagcatctcaggtttgggccgactgtccgagtttctgctatggaaaaggctttcaaagtgagttctaattgattgataggctttaacgtgggtggtgaatcgaccgatctgatttcctgatctctcgccggaacagattctaacgatgtcgcatcagtcactggaactctccctcgctctctctcctcaacgatcggcgctctcctctgtatacgagatgtatagctcgatgattgcaggaattgctttatcaggaaaagactatcatgatccaatctggcacgatattcgatcttctgctagagatgttcttttcaacgctctcgtggaggatgaagcagctatccgacttggtgtgatggccttggcaaatatattgcaaacggccttcgctgccaaaaagtcctctgcttctattaagggatctacagccagtgcttcgccaactcctctcgttgtgccctttgtcaccttcaaaaaaggactctggagcaacatgtatgatgctctgggatcgaaagaccctcaaggggttgctgtgctaattcgcgtcatctcaagattttctcatcttgatcttcttcccacggcatccgattcggcctggtcggtacttcatgtttcatctgatcgacaagcattgcagaaggtgatcggccacatcaatgaggctatctctatcactcgacgactctttgcccgttcgatcgaacgatttgcaaacttaagcgataacaaaacccttctagagctttggtcgaccatagacgtgacacccagtgcgcttagtctacttctatcccccaacgaagagatccacgattctgttcaagccctcatacaacaatcgtttaacgacgtcgtcgacagagctgactgcttccgggcgcttcttaagcatagcccggaagaaggtttagagggaatagatcgatttctcgatcagttcgtcaagtgcgcaacaatgtttcccgaggcttgcgctatggctaaatggatggttcgttgtttgacggatgttatagacgtactttgtcatcacggaggtgctcttcttcgagatgatgcgttcatcgatcacttcgctgtcaggaggcttgtaccagaaatatggtcaaagatgtgtgacagtttagctgtcatctttaaacggacgagcgagtggtcgaaattctacgaaaacgaagttatggtggattggatgagagacgcgctgatcttcgctagattgatggctgctcagacgagaacgttcgaaggagcgactgtaccaccaagtagagagtctgatagggaaggtttagagatcaacttgtctcaagctagtccatcaagaatgagtacggtgggaaagatgatgatttctagtttgcagaaagtgttgttgaatctcctcaactggttacggatcactgagtaggtctatttctcctttcaaataagtttggtttaatatatgctgatcataggaagattatcttagcgtggagacactataccagtctttcgaattaatcaagacgctcctcgatcggttcaaacgatcacagatcacgccagaattggcttcgctcgagaagctcaatatgttcactcaacgaggggaaaagcatagatgcaatctcaaggactctcaactggccgaaatttcggaacttctcagcttttgggacgtgtccgatgacgatgttgtcttctcttctttctctagccgctcatcgcttcggctcgcgccatcttccaaactcaaccaccagggtcagtcgagttcgtcgtccagacagtcaagcgctcgaccactcggttcagaagatgagttcgacgatgagtttccggacatctcagaatctgatcttagggccatcgataatgccactaaaaacctcgttcaacgacaacttcccttcggtcctctatcttcctcctcaaacagagcgacacgtccatcgggtcctaatctttcttcatcttcaatgctttcacgagcttcaggcggaactgggtttggaaagatatcgaaaagtacatcgaaggataagaaggccaagtcgtcgtcgtcatcgtcttccagagcaatgaaagagcttcgtaaggaatttaaacgctcggtgcctacaattcctgctccagggatgaaagtcgggtttcagatcaagacatctcacacaaaatccgagatcgaaccatccaaagcgaacaggcgaaccgacaccgctggttcctcttcttctgagtcttcgtctgattcttccgatacggatgaggaaaaagaaaaacagggactcgccgcgctttcgactagtggagacaagcgagcgcctgtggttcgaaaactggcgcctgctcagcctgttcgatctatcaagatgatgaacgacataccgatgaagactcctgctcagatcagagcggctcaacgagaagcagcacagcgaacacgacttcggttgaagcctgacatggacgagcttcatcggattattctgaaatgggaaccgaaggacgtcggtcaatatcccccgggtatggagccaaatcagctccgtaagataccagctcagttcaagaatgcggaagactatttggctatttttgcgccattgctcatgctagagtgttgggcacaagttcagaaggcaatcgaagaaagccagaatgaagaccggattgtggtcgccgtgactggaaaacagctgatcgatgattgggtcgatgtggacgttgctgttcctaccggacaaatcaaccaaagatattttttgacggacgttgatgtcgttcaggtctgctctgtcgatcctcataaaccggcctcgttctttgcgaaggtgacaaacttcaaaaagggcttcactgatatccaggtcactatccgacttcactcatctcgaaatcatcattctttcgtgagccgttctaaatggagattacaaagagttcttaagtaggtgtcttgtttattgtctctttttcaaataaatcagaagcagatgcccaactcagagggtgtttgattcatgtatgagcaaggtcacgacactaatatttgaagtatcctatttattcattcgcatttagcttaagtaccatgcatagagagtttgctggtcttcggggattgccctacttcgacacgccactttctaggaatccgggtgacacgctcatgaatgctgttctcaaggctgaatctttcccgcctctccaattctctagtcgagatattcaggaggctatgaagacttatgcagtcaatgagccacaagcaaaagccgttctcgccgcaatggatcagagaacgaccggcttcgtgctgattcaagggtgagtttcacttgacgtatactcgctgtggatcaatcctcatcgagacgtaaactcatcgtaaacttttattgttttggatctatagaccgccaggaacaggaaagacaaagacaatctctggtctcgtaggaaagtttttatcggacaggccgccacccgtaaccagtattggcagtacaaaacggaatgaggagacttcgcctcctctcaaaattctcgtgtgcgctccctccaatgctgctatcgatgaagtcgccaaacgattgaaggaaggtcttcgttcgtcctcgggaaagattattgttccgaagattgtccgagttggaaacgacgacgccatcaacatcgctgtcaaggacgtagctcttgatgagctggttgaacaaaaactcaacggagcaagttcgaccaagaacgatggcgcagccgacgtggaaaggatacgaaaagaactcaacgagctcatcgcgcttcgaaacttgaaagtcgaccaactgaagcagttcgaagatgatgcccaaaaatcgcgcgcattggaagatgatatcatgaaaatcaactctcgtcgaacggtcattacctctcagctcaacaaagccaaggatcaagaccgagatgccaacagatcgatgaatgccgctagaagaaaggctcgacaggacgtcatcaacgaggccgacatcgtttgtacgacgctttctggagcaggacatgacctgcttagttcttgtaattttgaaacggtcatcattgacgaggcagctcaagctgttgaattgagcgctttgatcccattgaaatatgaatgcaaacggtgtatcatggttggaggtatgttattatcttttcattgcacccacgtatatcgcagcttgatgaaaattattgatggttgtatacattggtaaatcgacatcattcaagatccaaaccagcttccaccgactgtcttatcacagacagcagataggtacaactattctgaatcactcttcgttcgaattcaacgtcgagctccacaaaatgttcatttgctcaggtaggtacctgtgtctattttgcatttcatcatcactgaacttgctactcatgtttcatctttctctcacaatagcatccaataccgtatgcatcctgatatcagtaaactaccaagcaaagtcttttacgacggacgtcttgctgatggcccagagatggcgaaaaagacaattcaaccatggcacgcatcttccgccttttctccttataggttttacaacgtcaattcgagtcgagagatggctggttctctcggtcactctctcaaaaatactgcagaagctaccgttgcgctcaatatttatagtaacttgaagagccagttcccctctgtcgatttcgattatcggattggtatcgtcacgatgtacaaggagcaaaaacgagaactcattcgagtgttcagctctcagtacggaagaggaattacttctacagtagagtacgtttttttagttgaacgtttgagctcatacaggattcgaaaactgatccctcttttggcgatagtttcaacacggttgatggtttccaaggtcaagaaaaggatatcatcattctttcatgtgttcgtgctggtgcgcctggatcaaatgcaggaataggtttcctgaaggattcgaggcgtatgaacgtcgctctgacgcgagctaagtcttcgctgttcatcattgggcatgctcctaccttggaaggaggaggggcccaatggtatggcatcgtgaatgatgccaagcaacgaggagctatgttggacgtacgcctacgttccttgattttgattttgcacgatcctgagattaatagcgttctatgttttgaactcgtcctatcagtatcatcagtacttttcattctcttctgcgcctagagtagatatcaattccgctgcaccgctggttacgtcagctcccattccacctccggttgcgctacctcctcgctctcctccgtcggcacctgcagccatgctaaaagccaattctcccgggccttcattaattgaactttcgacaccaaaagaaatctcacaagctcattctcatcttaaacggagtcgacccagtggctccaacgttaacgcaccggtgaaacctgagctttcttccaagatgaatctcccggaaattacaaggaaccctaaggcaagtttgacgaatgggattgaggaagagaataagccgaatattatcgacgatcacccatcgagcgacgtcgaacaggcagacattcttcctcctttcaagaagcgaaagccttttgtagagcatcaaagttcgaaagcgtcctctgaaggaggacggtcttcttcaccaggtccgatggccatgtcggatgatggacatcgaaatcgagtaccacctgtcgggcctagaaagaaaggatctgttcctaaagcaagagaagctcctaatctgttcattcctccaaagcgaaaggtatgcactcgacccttgttgtcttgattcaatatgtctgcctcagtttctgattgtttggctcaacactatgttttcctccgatagattgtaaagccacatcccgctcaaccactgccttcgacgatcccgaagacaacaccaaagacaaatcccacgaccacttcgtccattctaccaccttttgtttcatccgacgccccagcgaacgacagcgcttctgctaaggcaaagtttgccgcctttgttcgtcgacctgggggtccacccgggagaaaaagataagatgaggtttgcactctatcttgctcttccatttcatactgctttttctcacccttctcaattgtccacacatcttctcagttatccgcacatcttttttttcttgcctttcatcatctatcagttctttcatatagataatcgtctcgactcttgttcttccttttgttttacattcgtgaagatatcacacattctgtctctgtacacttatcactaacgatactattaccacttgcatagcccttatctccccgctcaactcttgataccatgtttcagaactacagattcaaatcagaacgatttcgcataatcacatattatagatacatgagtcgttacagaacgaaaagggaattacagtttgagaaactcgacaattaaataggaagatggagaaaaaaacaccactagattgaatcaagttttgattaagccaataaacctgaccgatcagattttcggactctagatccataactgatcccaacaactagcttgaacaatcttgacgcgtccttgtcgccggagaagagatagtcagctcccagagagtaagcggctgcgaatccggaagtgacagcaatctcgtgcatgttgagaaccgtccaagctcctgcatatcttgtgtgattctttccgttgatgaacatcatcaaagctacacagccgatgtagtgttgccatcgatgagattgctgcttccaccattttataccaagaatcttctcctttcggatgtcattgaccgtccaatgttcggaatcctctttgtttaaaaactaaaactcgcgccaatcatgaagaatcaatttaatccccagttgagtctcgtcggggtatatggcgtcaagattaaaagataaggatataaagacgaacgatagtctgaaaaacatggtctccaacctctctctcaggctgctttgccttgtcagattcatcccactctcgcttaggacccgccttggtctgattctcgaattgaggttgatctatgagaccacagaaatgttttcagccaaatttcaaatcctacaacgaacttgaagactaaaactcacagacggtcaagtcaaaactcatctcaagctttttccggtcctctggataactatgaat

SEQ ID NO: 1150 - DNA, 7393 bp, Xanthophyllomyces dendrorhous
ggataactatgaataaagtacagaggattccaaggctgctggtcttctccgccagcattgtcggattttaggttttttggctctttaagctcgtagtactaccaaacgaatttattcaaacaagctgatcagtcaagtgttcagctgagaaacgaaggacaataagaatgtgatactttttgcatgtactcggcgtcttgatgggtgtaagttacatcgtaaagacttcaataactcaaacagaacttagcactgatctcaaacaagtgtgcaaaatatcaggttgagatgcagacttactatttaacgtttccaagtacaaacttttctctccacgtagcttgttttccgaggatcttgagagcagcatcggcatctttgatagatcaaacatagatagtcagtatgcgttggtttgcgaccatcccttgacaaaaaggataagaaaggtatacttaccgcaagcaaacacgatttcatcgaaagcctcagtaccttcgtcctctccttctttccatcggatgatacatttcccgtccttgcctttgcttgacctagtaacaatctctgcgatctcttttccgagaccccaagtgaccccatcctttccggctcgaagactgacttcctcttgccaacgtttatagaccaaggatagccgagggaaagccatcatctttggaacggaatccaaaaacgtctctgaagaaaattcgaagagtttcattgacggatcggaaaatactctcgaaagtatcgtcgaagggataaaaggagtttggttgccggttccctgttaacaaaatgcaaaataaacggatgagaattaagctccgaatcgcctagggtacatgatgagttcaacatgatgtacaaactgacaaagaatagcgcgaccaggggatacacaatgaggtctccgaattctttgtcaaacaagaagatcttgagaagtttctgaacagagacgaagacgaaaattggctccgagacctggatcaccttgaggacccggccgaacttggcaatatcggacttgaagcgctcgatgagagacgacgggaaaacatttgtccaaaattcttcttctccttttccgaatgagatctgcatgttgacctctgtcccttggtatccgagcatatccagcaccttgatcgtgctgattgggttcaaagtacgcacataagtaaaagaagtgactaccgacttagtgttatttcacaagaaatcttatcgaaataggttatactcacttgtaaaatgcgggactgcacccctgaactccatcattaacccaattgcttcctactctctcactctcttggtctttcgatccttccttgaactctaaatcagcagaggtggccatacctccagctacctcttctttgtcgaacacggtgatatgatacctatctggatgagctgagaatgccaaggcggtagacataccggccgcaccagccccactacagttgggagcaaggacagcacagacaggttgacaaaggggagttatgatcgatcgggatcagctattttacacgttgaactttgccaatccctcccgtaagatcgaagagtgcgcggataatgagaaacatggaagaaaggaaaagcgtacatgatacagattcgcttgcgatcaggcatggtccgtgacagttattttctttcggtcgagggttctgaagggatggtgatgagtggctacgacgacgatgatggtggtggtagtggtagtggaagaacggatagttgtaaagtcgttcatgtttatgacgatcgggaaggaaaataaatcgggtatgtcgagatcggtcgatgacgtattaagattagataagaaaatgttcatatcttgttcgtgttcacctcaaacattccgtttcggatcagtttggttgatatcgtcactctgatgtcgatcattcaatgatgtctaggtttgcaagtcatcaagcacataagtttgtgtagaactatctgattcgtcgatgtatttacactgaattgtcagtgctatacatttaatagtccaaccacatgtgaacggtgcgttcgagcagactgtcctttctccttcgccttcttgaaaagagaaggaacatcatcacaaacgacaaaggagtatcggccggtacagccaagaaagagttttcactgtagaactagtctttggaacttccgagcccccatcgggccaaatcaaactcctccaacgaggtcaagacttggtgggctccctctgaagcaccggagttaaatgccaagagctctggatctgggatccagcacactatgatcaatcaatacagaacgcgttgaagagtgaaaccacgttgttcatattgtgagtatgtatagtgatggcttccaagttgatcaaaaaaaataataaatcaataagtaaaggtaagtacgaaccattcattcccgctctcaaagcagcctgaacacctggcaacgcatcttcaaacaccagtcctctctttctgaccgctttctcttgttccgatacaccttcgctttcatttacgccgacgtcaaacccgagtgatcgagcagcggcaaggaagatgtctggagcgggctttccccgggttggttcggtcgagggagcgacaggtggagagtcggaggtgaggacatgaggatggaaatgttcgaaaagaggaagatgtgactactccaacgaagataaatgtcaaatgacaaagaaccataaattaccgttggtcgacggttgatgagctattggtgtgttgaagcgatcctaagtataaaagactcaataatggagcaacgaacagttttggtcttgaccccttcgatagtgcttcctgtggcaagtgccattgggataccggaatctctcaaatcctcgattagcttgaccgcgccaggcaatggctggacgactctaaaagcagcgtcttgcaaacgaattctctcatctagataggcctcaggagtgtattccggaggaaacgtcccttcagggtagcacgaaaacaacttctgagcggaagcaagtgcggctggaaaaggggtaaaaagcatggtaagctgtggcatagatgtcgtcaaccacggctggtttgcaagatattggacgggagaatatcactcacggagacccatcaagccagacttgatgctccaggacattgtctgcccataccgagcaagaatatcattggtgactgattgccacaacatcccaaggcaagtggagctttgtcaatatgagtagatcaatagcaaacatcgggattatctcaatctgatggacgcgccaaaactacctacctttcgtgtagatggtttccgtgtcaatgagcgtgccatcctaccttacattcccatgaaggtatgttacatcaatcttgaacatctttcgaatgccatctagagatatatgacagactaaccatgtcaaagataacataatcaatttgttgcttttcctcgttcgacatgatagatagatggatatatgatggtggttgtgcaaagaagcgcgagtcgtttcgtttgagaaagaaaacttgttttacatctcgccgtaacgctggtgttccccaacaccatgtcggcaaacaacgcacatggaaattattcaaattactacaccaagcggcaggcttctcttattgttggagatcgtagggtagatcttctgcctctcgagtggattcagagtaagaaggtgcttgatataggatgcaacgctgggttcgtcagtgttgagatcggtagattcattcatttgtctgatttaagagctttccccttgaggtgtgtgatgttgacttcaacctgttcttatgagaatgcatagctcagagaatgtctcctgaatctgtactcggcgtagatatcgatccaagcttaatcaaacgatgcgagactcatctcgcctacgtccattctctacaagctccctcggtcgatgagaattatcccactgttcctcagccgaactattttcctattgcgctcccaaaaatacatgggtttatcccgttgtctgagtccaggccaagttcaagaacagggtttcctcgaaacatctcattcagagcggctgactgggtggttgatactttagaggaggatcaagctggttatgatctcattttggcgttcgtgccgttttgctcctcctgcttccgatcagctctcaggatattcttttctcacgacgaacctttggttttatcacccagactttcgctcactaaatggattcacctgcaccatgccgactctggtttgatggcgtttttcaaaaagatctacacccatcttaccccaggcggtcgactagtcctcgagcctcaatccttcaaaggttacaaagacgccgccaagaaagctggttctgcaaactcaccagacgggtcacgtttacgatctaatctgaagaccttgaaactgagacccgaagactttggagatgctctcgttggcttaggattcaagagagcaggtgcgttgagagccggaccgggggaggatagaatggaaggtgagggcgaagcggatgaggagctcaaaggtgtgtctcgaacgtattgcttggatgagttcttgttcaatcgctaatatacatcgatgtgttttttgtcttatcagggtttgatcggccaatcgaagtatacgttaaaccttcatcaatcatatgaatgcgcctcgtcgtacttcccatcattcgcagttattcgttcttttggtcacgtcgccttcctggtacgaaatcgatgaaaagactcggatcgataagaaaagacatgaatggcagaatttcggatcttacaaatagaataaagacatcgacattcaagtaaagaatcaagacggaagggaaggaggcatgataatgctcgaaagagtcaaggtagaacaaggcaagaatctgaagcaagcatcaatgaaagagagatatttcatcattcagacttgcatggagtgagccatgatagcagccacaaatgtcaaccgaagcttcggcttgtcctctactaaatcttcagccacaacgaataccacaccgcccaactttcggagaaccgaaatggccagtcgagcgttgagcttgcactcgtcctcgttgttaccctgttcaaccaaagtctgatcgactattcccggcctcaaactatcgactagatccaaaaagaagtgacccgttcgaagggtcggatcccgaagactcctcatcgatgttctcttaccagccttttgaacggtgtcgtttgcccatttgacgatttcagtatcggttacccccttcccgttccgagagatcgaggccaaagtcttgtcaatgttgagtctatagagggaggagagaaaaacaagtcagtatatcatgtcaagtgtatagagcatgggcataaagaagcataccgcatgagttgccagaccaaaccaagcaccagagttcttgttccatcaacaatgtccgccccctgaatacctacgatcctcatcccgttcgcctgggcgagatcgactgcataatttgtgttctccacagctttgaatcgggagatttcttgtccctctttaggcttggtcactcgtcgccagatgacagagccgggaacaaccttatcgaacgcttgtaagataaccgatccatcctaaggagagatgatgagggttggataaaaggggagaagcgatcttcatcagcaaagtgcgcaaaactcaagacattataaacaagagtcaacaacgagacaaaccttgagatcctcaaacaagttgtaaactccaggctcgacatccaaagaatttaaccagagggtaaataccctggcctctctttctccttctgcgtcaaagtcctctaccggtgggggagcctcagcctcatctagaggttccagacaaggccaagtgttgaacaagttggcgacgaatgcaaggttcaatttcggatttcctgccaccaaggacgaaggcgacaaatactttcggcacccgatcctgtcggcattttgaagaacctcttccgctctttggtgtacgtctttggtttgaagaggcgctcgagtgcattgctctggcttgagctggttgagtagaacagtgtagttttctccatcgttcacatcttttgagaagttggtcactctaagaaagtgtatgaacggattgattgatgaacggcatctgtcagaatctgccttcatttgaccaggagagataaattacaaaaaaatgctggaataaacgaaccgtcgttgccatccagcagctttgagatggaagttgaaccatctgagtagaatctggtccggagggagtctcaagaactcttccaactgaaggaaaagaaaagagaagataaaattaacaatcgaaacctctactagatttgagatcactcttcagagattcaatgacttacagtttctccatcatctagaagccgatacaactctgggtgatacttgatatcaatcttgctgagcaagccccgtcggatgatttgccacataagtcctaggatgagatgctccgttccatccgcgatatcactcggaccaatgttgacgaccgagcaaccgattcctttggccgacgagattacgatgttgttgttttccgtgatctggaacgcgttcaacgcttttggcttgccttttgagacagttggcttgttgaggactcgttcatcgattgtgtcgggtacagagtcgttgataagcttgcaaaggattaaaccgtctatgacaagtttaaattgaaggacagtatcagcgtgatgttcttaacggtcattggaaacaatagaaagagacggggagactcacctcgagcttcgtcgaagatctgcatagtatgctctgggatgggcaaaagatgcccgatatctttatctccagacaatacctaaaagctcatattgttgatgagagaatgtcagccgtgcatcattcttgttatagaaacatgtgaagggaacggatggaatcataccccgttgatgtgcgctgtgaaactggctcgctcatcctcgttcatggtgtgactagcattgcttccagccgttcccttcaccgagatttttccacctttggtggacaacaagggcgcctgggaggatgaatctcgaagggaggtgacgagctgttgcgatcatccaaatttatcaattggtctgtaagtttctcggatctgggcggaaaaggaaaggaaaaagaacgagtcggagggaggaaaagatgccgctcaccgcaacccaatcttcgagctctactcgaccggacgaatcgatgttgacggtcttcagggtctctcgaatctgtttcggacaatagaaatcagatgttgtgtcaatggatgttgtaaatcccaaggagctcattctctt

SEQ ID NO: 1151 - DNA, 530 bp, Xanthophyllomyces dendrorhous
attatgactaccctcatctcatctatctcttcatcaaccatttacaaagtccgctgggaagatttcaagaaaaccagagacggatggacagacctgatcgtaagatccttctccagattcctcaaggcctgcgatgacttttgccttgtccagacttcctttctcgtccacgtcgatctttctgagaaaagcggtgcgatgattatgatgaagagttatccatccggttgacccattgggtatcagaccaacacagagagagcaaaaaagagagaacttgtaagcttccgatatggactcgatccatttgctactcagtaatcgtcttttccagggaggattccgcaagatataatgagaagaacaaggaaaaggagtagaaagacagagccccggacatacgcgaattgattgatgatgttgtccatatcggctggcgagacctgaggatacttcctgcccagcttcatcttttgtagaccggtggccattattgattcagagttgagtactttgtaagtgtatacagg

SEQ ID NO: 1152 - DNA, 48283 bp, Xanthophyllomyces dendrorhous
agtgtatacaggtgtgtgtttgggtacgatgagtgattaagatgatgggactggtgttgaaaagggtgatgatgaggctcggcaagaggcggttcgacaactttgcccgccttatatgaaaaccgcctttcgtcatcaatattcatattttctccctttttctcgttcagatttcttggtcattgagtctctcatgtttggctgaatcatattgcactccattcaaaggtcgacccacgaatcattctgtgaccaaggatcacgtagaaagaagcgtttcaagattaaaaaggcaaacgtagtctaagaaaatagaagctcattccaatcaaatgatccaaaagccaaacccaccaccacgatcgctactgctgccaccaccaacaccactaccatcccatcacacactcagctctctcaaccaacaacagatttcttccttccgcaaacaagctgagaaagtcgagcgtcaaagacaaagacatttatgctccaaactcctcggaggctcggatgttggtcctgtgtgaagagtgtatatcaagatgaagacgcaatcagtaaacacgatttcaaaagaggctgcagaatatgtgttctgaaaggcgacgcacttgtcgttgtggaaaagggactatagaggtgaaagacagacgtgaagaagaaagtcgaatgagttagcttggcaaaggcgacatcttgtacagaatttgactactgcaacgaacctggtttccagacctgaagaatcgatagcaagcatataaaataacagaacatgaagaagaggtccaagacggtcagtaacgcataagaggtttgtgtagatgtgaaaatagatgaaagtttgagattgggattgataaccaaaactgaccaggggaaaggctagaatgggttcgatgatacacaaaatctgttagaacattgttctgttggaagggaggcagaagattttgagggatactgaccttagttcgtcggagcatgtactcgtaaacaactcgctcaggaggagatccaccgttggcctcactaagagtttcaattgaagatcatggaaagtgagatgtagaaaaaaagagcagagccggatgagttatgtgcaatagtcgataaggttatgaacacaaggaattcggtttatctgaaagagaagacaaggaattgccgtacatctcgtgttcgatgtgagcggcgtgctcggtctccttcttgtaggtccagataccggcaacgatgacgcagggaagagcgacgtagtagctgtaagacaaaggaagcagagagcaatgaatgttgagcaaaggaaggataaaaaggaacaagacactatacatcaaacgtttcgtattttcgctttccctcacactctctccttcgccctgtctaatgtgactaaaagtcacgatctaaaaaaggaagaacactcacgtcacttttcgccaaagctcagaggcctctgtaagatttcagatcgaatcgtattggggagagtcaagcaaagagcaaagacaaaagcgagatttaggcaaaagaaaaaaccaatcagcatccttcccattctttgacgtgctgaaccggtctgaatagacgttttttctcgcgacccggaaaaaagaaaaacggaagaaagagcacacagcagcaaccaaggaaaggatacacgaaagaacttgaactaaccaggagcatgatccctcatggcatccctctctctgctccaggcggtctctctgacgggaagatcggcctccttgatagccttttgggcgtacatggggacgcatccagcgggggtaaaggtgtgaacagagtttgatgaagctcggagaccaatggtagccctaggagctcgagcgatggtagatcgaaggatggaagccattgttaaaacgtgttcaaaacgatgaggagaatgaacaaatggccaaggtcgattgtctggggtgagagagagaggagagaaagagaaggcgaggaagagagaaggcagaagaagaaataattcgtagccatggttacaattgagtccgtaaccacgcccaatcgtccagcggcagcgatctcagccggcggcgcttggagttgatggaaaccccaaactcccatgatggataaagaggataatccgactggataccaatctggatcatagtgatccagaccaggcagacgagccggcccatgcccgggactttctcttcatcccaaattgctctcgccatcttgccgatctcacttggtagctgtttttcattctcttgaaagtaaccccttctgttcctgttgtcttttgtaacttctcgatgtgtcctgtgtctactcttcactgagtaaaccggtcccgtgggggagaaagacagtcggtcaaaaggcagggtgctcttaaggaagaagagagaacaagagagatcgacaagccaccattactaccctttattggcgagggtgagaagagaaaggccgggacggtcgtttggaatagatatctgaggagttttcattctcttcacactgtccttgtctttctatgttatttccgtcatctatcatgcttgtactctttctatgctatacatattcccacgtatcatctttttcctcctcttccttctcgcttttttctatgtgatattatatgaggtgtaatgatggcacatggtgagaaatgatgaaacgaagcacgtgacgaacggcaggctcgggcctgggcaaaaaaagaaaacaagaaaacccgacagcttgaagaacaacgttttcttgtttctcatacccagaacgactgactggccttccgttcttccttattcccatcattctttcactcagtataacatctatcacgcttcgggtagctcctctgtttataaggaatatgtctgtctccacttctgctgtcaccaccggcccgaactttaccagagtgagtgtgtatctgcttggcgtgtatttggaggcattagctgacagtgatatgatccctgtgttgatcttgtttctttcttttcggttcttcacctagcccctcgtccttttcggaccttcagggacgggaaagtcaacgctgttgaagaaactttttgaagagtttcccggaaaatttgggttctctgtttcgcgtgagttttgggttgaatctcttctattgcatggaaagaagggttgagaaggtccactaaaccggtcatgctgtaatctttggatacttttctctttccttccttcctccctttcttggccgatccttcagacaccacccgacaaccacgggaaggagaagaaaacggaatcgcttaccatttcaccacgagaggcacattcgagtctctcatcgccgacggagcattcattgagcacgccgagttttcgaagaacctgtacggtacaagcgccaaggctgtcagtgactttgaaggtagtggcaagcgatgcttgttggacattgatactcaggtctgtcttaatcttgaaagcttagatagagaaaagaagagacactggaagctgatcaatttattctgatactctcttgcatctgatccctacagggtgtcaaactgatcaaagccaaccaccctgggttgaacccggtattcttgtttattgcccctccgtctttctctactcttaaggaccggctgtccggtcgaggaactgaggtttgtcattcatcattctctaggaggcctctcgttcatcgcgcgcatgtctaaagattgcactgtctttattttgcgcccttatctcccgctgtgtgctctctctaacccaacaatcgaaatacgcactcgaaacagacggagcagtctctgcaaaacaggttggcagccgcccagtccgaactcgcctacgcaagtgtgcccggctcggctgatgtgatcttggtgaacgacgacctggagcgagcgtacaagatctttagagacgttgctttaggcaaccagtctgtccagggtgatgagttgcctgctgacctcaaggtcgtagtttagaatagagcagtctttcttttgtcctactacttatcaattttgggtatttgtatacgggtgtgtgaacggatcgaaggcacgaacatcgtccgactagagagacaagcgaaccacgcaaacgagtgacgaaagatggatagagagaatccacatagacactacgagaggctcgatcgagattatctcacaaagctcgactaagaacatcaaaaatcagactaacaggaactggctatcaagatactacaagaattataatagataaataaacacgtcatttctacaggcggcgtttgacgcgcagtaaaattgatctgacaggtcccgcccctgatcgttttttctctcgtctgtccttcatctcgttcctcgcgttcttgaccgtctactctcaactcccatctcttccgttcagccaccctatcttatttttctggcattggtcatccatccaggccttagtacatcatctagatggatcgtatcgcggctagaaagaatccgacgtcgagtcaacgtttgttgacggcagtcctgaagtaagatcgatcatccattcccgtcgccctgtgccgttcgtttgagtcgtggctcaattcagtcgttctttaccatcttttgcctttctgcccgtccctcagttctgaaaaggcacacgtcgacgctctctttcaagctctcgctctctcacacaactcacaggcagcactcgcggcttatgcgtctgcaggaagggatgaaccactcggacttgccgtcggtggtgtcgtcggtgtgttgggtgaagagtacgagaccagacaagaggtaagtctttccgttatccgttaaggatcccttccccatcttggtctgattcagattcagtggtggagagtgataatgctctcctatgacgatcttgactgacgcgtcaattctgacgtgacgaaacgatcgtttttatcattcttcctcctctctttttcgccctcttcgcaggcctatgcttcctctctctcgtccaccagactcgctctcaaagagattagagacgcggaagactctctcgcaaacgtcatcagagatcgtgacatcttgtatgttatttttttcttccttgcttttccttgtccacttcgagactgtcctcccgcctgacatatacttgccgaaccgttcttagagtccaacggatggtgaaacaaacgagcaaaaaaccatcgaaatcagatcttcggaactcaacgggctcgggaggctctatctttggactccatcactcgagagactcggcttcgatctcgtcttccaacgcctcacacgacaaggcgtccaagctcgaagaggcccaactcgaactcgccggttgtgaagaaactctcaaaagagaacaagttcagctagacgcgatcagaaggagagtcatcaaagagtgtctcgagcaccgactccgaaatcttgaagcgctcggaacgagtactcaggcggccgcaaaaagggctcttgtcgaattgcacacttatcttcacgagggaggtttgtctgttcccctgcatctctattcagtaagatgtgttacgtacatctaggttgagctgatgcgtcaacttgcttgtctatctttattcagctccattcgaagatcatcacaacatcccccgacagcaaggtccgtataccccttcggttgactcaaacacaccttcgctcgcaccgtcccaatcggcctcccagattggcagggaccgatacgactactcttcagatgaggactctctcagatcgccatcggcctctatcgcccgtcgacaggccaatcaacactcaagcgctccgatcagaggactcgcttctgtcatcgagagtggaggcagcagttccgaggatgagacaaggttgaaagttgtggaaaacacagccccaagacaacgagcggtctctcagccgtctcccttggtcaaacgtaccggaccgaccgttcctccacaggcgccatcttctcgttggaacaacagacggtctgcctcgtcgatcaccgataagaatttagctagcagagcttatggttctggctctgattctgacgatggtaccctccgaaacggacaaggaagaaagacacaatctgatgtcggtggcagaggaaagagaccgtcgatggggaaaagacggtcatcagcatcctcggtcgcttcttcttatgcaagaggaagcgagacggcgtccatcaaacgaaagaagggctttttctcgtccttcaagagtttctttggtggtggtagctcaaagagatcgacgggtggtagcgaagtaggaagtatcagaagtgacatcaggaataccagcgctcgtcgagggggaagtccagattcgctggtcagagcctctggtggtgcttggtccactcgaacaaaccgaaatctccgaaacgctggcagcggagggttgattcctaagcgaggcggtggcaaaaatgacggctcatcatctgatgaagacgcctcacacggtcgggccggcttagtagcggtaactaacgtgaatcgatttgcaggaggcaagggttcaagcaagagggacagtgcgtctacggccgtctcagcagacctaggagagtggaaagttgagaacgtaggacttcaacgaccgggggtgaagagaaactcgagtagcaagaccacgctcaaaggtatcgctgcgactaccaccccgatcaccccagcggcggccaccagctcttctttctcgggtggagtatctcgatccgcaaccacaaaaaccctcaagtccaaatcgggcttgtcgaacggaagcccagtggaagcgacgatgacgtcccaacctccggctgccatctcttcgaagcccaaaattatcaagcgttcgtcttcaacctcagcagcttcagcgtcagcgtcagcaactggaaagacgagtggcaaccctcgtcgatccgcttcgacagccttcgacctcaattcgaccaaaccaaagatcctcactacgtcgcagacgagcggaccatcgctatcgtcgttggttgaaatcaaggctccgaaagggttgaacccttcgttaggattgacgttgcccaccgctcccggcagctcgatcgtccgaccctccgcttttgaggtcactactcctatcaagacagctccgtcgccgtcgtccttggctcctcccaagtcagtaaataacacttcgtccttgacgacttctccttccaaacgatccgtcaaatcagcttcgaattccaacacaggttcgtcaactagacctctatcgactttttcaaactcggacagaaaatcagagaacacgcatgtgccctctcatcgatcaacctcccctcttcctcgatccgcaatgaaaccgaccagacctctcgatttatcgccggagcctcgaaccggaaacgcgaatgaacttccaaaattgatctccgctaccgctcctcctccgctatcgttccaacccgcccaagttagtcagcccgttcacaacccagctcaggcagcgatctccacgtttgatgatgcagcgagtgtgtacgagaccggagttgaggacaacaacgaggatgatgagcaagtcaatcctgtttctgccggtttggctagcttgaacctaggaggtgttctcggttcgtcgcccgtatcagctgccactacgaacagcaatgttcctgcctcggctgtttcctccaactcaacagctcttggaccgagcaacggtaacggcaatgccaatggagaaaaccctcagaggagaaaatcagttcgaatggcggtgccgccgtcaatgacggagtttccatccgaagacaacttttctaaacgtgaaccggtcaattccaatggagttccggtcaataacggaaacggatcgagctacgtccctaccggttcttcgcacagggatgatgtgtccgccgtatcaagcgcctacaacggagcatcctccaaaccgtcaggcagctggaactcaaagatcgatacagcttctacaggtgtctggggagcggtcgactctagtgaggacgaggatgagaacgagacggattatgcgatcgccagacgagcgatggaacgtgcccaacggcattgggagaaagctgggaaggacaagggaaaggacaaaagaaagggaaaggaacgagcttaaaccgtaggatcccttagctctttcttttctctatggtttccctcgatcgagttttgagtactatgcttcgtcgtttcagttcgtggtattgtgtctaaactacctccctctacacaatttagttttatttatttatttcctcttcctcttatggagttgctcgtccgtacacgcttaagaaatgagaggacacgaagtagattcctattcacgtactttgttttcctttcctttcctctttcctttcagctcgatctgtattactggaccggctagttgttctttttcgcttttcttctctttccattaccgaggcacacgttatgataggatcgggctgatgcgtcgagatctgaggtggtctgtttcgtttgtttctcactataatatgatacgattaacttctcttgtcttcattcatccgtgcttagtttgagttctagcgcaaagacgtttgatcgtgaaagacgaaaaagagatatgtgaagtaggaaaccagaatagaaaggaaaaatgaaaaacgaaacaagtatagaatcgagaatacagaaaaaagaagtgatgtttcacatcgggagataagccaagaggaacgcaggaccgaatcaattagaacagacagaaaagaaacaagtcgttcagaatatatcataaagaaagattgctagtcatcgaaacaggtcttccaaagtcctttgctcttctctcgctttcgactggcgctgatgctcgctagcgtctctgccgcctgaattgatagcgcctgcatctgagctagagcttgcgtaatctgaagatagtcaaagacgaataaccatgtgaaaatatcagacgcttatgcatttgcaacgatgtatcaataaagaagtacatactttctctgtctcttcgctaagctcttgttgaagagaaccagtccggtcaacgatgatggagctagaggtgagaaggacttggttcatcgctcgagcttcggttgtgagctgttccatcgcttcactcgttttactgtttgaatttaacaagaggatctgtagtaagcgcgagactagcttctacgagggaaagtatcgctagaccgtacgttcttcctgtattgatccttcggaggaattttgagtaaatctcatcattgatctcatccaaaacctgacgaattggatacatacaacattttgatgagctattaaggacgaacatgatcgatagcatgagaaaattggccaccacttactcgtttgaactctccagcgtctactcggtcgtttgcagctttgaaatccgtagcagttggctgacttaaattgtgagagcccaatggcttcaggaccaaaccttcggtgtttcgatgaatgactgatcgaacgtagtatatcagtcaggcatacactgtttttacaatcgccaaggatattatcttacggtgtatcggtgaggctagacctgagccctgcgcagatgtctgagacagacgatgcgatggtagggggagaggtttcgtagtttgcctaatcatactttgtggactagctgggggatccctcagatgaagatacttgggctgtcttagattgttcatagcagatgtcgtgattacctggggtgacctaagagccgactgtagagcgtacccagaggttggggcaggtccatgaataaccgaccgggtcaaggaagccgtggtcgttcccgaggaggaagcaccttgtatagtatcacgcgacctgttttcgagtgaagatgagaggcctgaggaaggttctgaaacctcaggttgagcgtgggacgatggagcgaagatgggggctgaaggaatatgggcttgcgggttggcatcactcctaaaatgacaagatttgattttcatatcattctgaatcacctcagcctaacgcaaatgaagaaaaatacaggccgtgtgaatgttcaatcatcgaaagcatgtgagtagaaagccttacctgagagaggattctgactgttcgtggagtgaacacctcagtggctcgagttgtcgactggggttttccatcttggtattcgttgacggtatcttcattcaacagcatgctaggtccctccttctcattcaagatctgagcttgacccgcctctggatcactgaactcatcgattggttcggtcccagctctttcctgttgagttgacaaacttttcaaggcgctcgttgtggcgatagagtctggttgcgttgcatcaacagcagtgctgaggtactgaacagacgaaatggctgaagtatccttgcattccttaagccgacgatagagcccaggcgtagaagttgtccaaggaacggatgatcttgtgatttcaggactcttgaaggtctgatttgaatcacaaagttaggacatccacgattaataatattgtgtgtgtgaacagtgtgtgcgcacctcatcgaaagcatcgtcgagaccttcagcggcaagattatcctccaaatacatttgaagaacggtaggagaatctaaactgtgttcatccgaataaggcagaagtgacacttctcctgagatgctaggctgtggggaggcggattcagtattggtaagagagctacagatcatacaacagtacaaacctttggtgtttttccagggctttcatccgtatacagagtgtttttcgaagactttgtgaaaacgaagcaatgaaacttttttagctttgttgctatttcttttattgagcgttcatagcacggttaccttggctatgggggatttgacgggaacaacgctcggctcttttacggttatgcgcttgactggacttggaattgtttgcacctggtatatttgatacccaaaggaagaatcaggtaagttaagatatggaaaacatatgggagacaggacatgcctggatcaagtctttcagtctgaaagttttagatttaggttttttatcaacgattgaggtctgttcaagagattatatatcagttacttgatactcccgcacttagatgaagcaatcttacctttcgtgagacgatattctgattaacctccttgatctgcctctttgactgcgtatttatgaggtagtcagcaacggaactcgacaccccgacggcccaagataccgaaactcactgatctagacaggatgagactcttgaatgggggttgctgaggctttttattgttgatgctgatctgcgaatcaaccacattttgttgggcaggatcgatataaatggccagctgctttgtcaaggccaaagaacatcgtcaaataagcgtttcggtgttctggagattttcacaatcatatcgtgcgcatatggcttaccttttcctgtgcgcgggcggaagttctccccagatgtttggtcaaggttccagtcgcgtcgtgactcgtggaagcacttgtggttatggtggtttcagatgccggttggactgctataatgagggtctcatctactgttacttgatccttcgtcgattcagatttctctaggttatcttcaaactgtacatcgaagaattaaaatcccgtcagaaggaaacacttgaatggagaaatggcgttgttgtgtattcgagaaagcatgatttcacgaacctccatttcgtcttgggagtctatatactccatatcaggcacctttagatccgatacagatatgacagaagtggtattggattcgaccctcggagaacacgcatgggatccgtcagcctcggacagatctgtctttttaggtcttcccctctttctaaccggcttgttcttcttatctgaagaatcagttgattcggagaccggtgacaaaggccgtttacgaggtcttccacgtccgcgtttcattgatggagtctcggcatccttcgagagagatttgaatatcggatcaggctggggtatggcatcccaatcaactttggactcggtatcaaccgattcaacctcttgatgagcaagatacaatgccttcttcccacccttcctggactttcgaccggtagagtagatgattttggcaatcgatcggcgcttaggagtgaggtcgaaagaagaactcggatctcccgagacatcttcagagcaatcttgttgcttttcttcttcgttggacgcatcctcgactgtgactgatctcagtctctcagagaatgattcggacgcctcatctcttctggacttcttattattctgctcatctgtagttgtcgtctccggttttctcttggtgttgcccgaaacaggttgggtcttcgtacatctggaactatcagttactgaagacttgtgagcggaaagcgcagcggatacggcgactagattgacattcgggtaagggctagactgtttaatgggggatcccagagtagacgggggctccgaaatctcgctatccgtacaagcgccgaaagcctcgacgtctagttgaatacctccatagtcggtcttgccgtggtgatttgcgatcattgtgtgcgacgcgacagattctgggccgcctgaatcttcaggcaaggacgaactcacgtggtcggaggtggttgtattattgtttacagagttagtttggttgtattgagtagactcgtaatcctgtttgtaaggttcggcatccatcccaaactgatcatcttcggacgatgtcgctcctggaaaccaaatcatgttagtctaagagcgtaaaaagtcaaatggtacattgaagcaaatgaacgtactcttccacatttcgtccgctttttcaagttggcttgacagttgaacatgagaacccgtacggccgatcgcaagcacagatgagtgggaatgcggagggagaggtggggatttaagtaagatacctgcttctgttggaatggataccttgatggatcccgttcttgaaggcaaagtgggtccaatctcacacggctaaacaagaataggtagattcaattaatcccccgttcgatatgaaggtagatacaacactcactagcttccggttgagtagaactcggcggagatcgccttcttggcaattcacttcgtattcgtatctcgaggttttggtggttatacagagctgcgtgtgatacgctgaaatcattacgagatgatgccaattggtatagtcaatccgatgaagcattacttagaagagacgaaaacgatgatgatcgaacgtacactcagaatagtccccttgcgtcaacttcaaagatatgatttcggaaagtgatacgctcggatggtcctatgaggaagaggatacaaacgagagtcagtcaataagtgttcgaagcatatctcgaactatcgagttgacgcaaagagccataacatatatagtggcaggtacctctatcatcccttgactcattatcactacatggattcttgtcgcatcgatataaatcagattgtcctgtagcctgttggaagtgtctgatgtctcaaaagcgtcacggtagatcacatcatcgaggtatcggaagcctgcaagcgtaaacactcgaattcgttcagggtgacctcgaccaacaagaacatgaattttccgtttgcacttcaaaatagatcaaaggcaaagactcttgagtcatacgagctttacgaccactattaagatgataaggatgatcgactcactgcttcccaatcagcggtcttggcctccatcaatgcatccgctatgccatcttttgttccaggcgagaatgttcggaatgttaatttcccgtattctttcttgtctcgcttcttaggagggcatgtgaaaccaataatgttgaggaccaggtccgttaaagtgaaagctaattgaagagagatggaaacctgagttaagcacgctcgcgccgtacaggagatgcgctctggacctacaatcagtgcagcgcaagaacagttctcctaatctcatactgcactcgccaaaaagataccattgaggtatcagactttgcttcattctagaatatcaacattttgtcaaaacttacgggcccaagatcgatccaggtccattcgatctcaaggcgagttgatttagtcgacaggtagaagtgcatagttcgataagctcgattatcttgatgacgtgatgaagattcaattatcatcatctttacacaattcaatactggttcaattagacaagtaatgaaaagcaacgtgttgcgctaacctcgtgtttcaacttgtagcttaaccttgggaacgatggactattaataattttgcacaaacatggaaataatgcttttcctatgttcaactgatctatcacagagagagaagatgggtatatgcggagcccaaaggtagattagcatcaggatttatcagatgctgtcgaaatacaacttactttcattcagctcttgatctaaatgccagttctgccgtttccacagatgtacgtcatccgaacaaaccaaaaactttgagcaccagcaaactgcacagtaatcgggtcagagatgaagatagcaaacttacataaacaccgttgatggcgccgctcaatacatcctcccaaatcagcatttccctttgcctgtcttcaggaattgctgtgggatcgatcgagaagaacactccaagtttgttgaccaaaactgaagggatgaaagctgcggtgactgctagtgctcgagagggaaagaggcagtatattggaatcatgtcctatcattcaaaatatcagcccccggtattgatcagtcgaaacacaatattccaaagagcgtatatgctatcacatactaccaggaaaagatcgatcagagctccggaagctgaaagtgtagatcgagtctgtcaagaagttttgaaggtcagaagaatatcgaatagtcaatagagtacaccctgaagcatagccaagtccatctttcgacaaaacctggtctagcttcaccgcatgaagcgcgttcagaactgtggaggaaagaaacccatcaaacgctttgaacgaaccagctggtgaagcttaactgcccatgacttgacctttcgagtcttaacagaatcatgtgtggcaactgcctcatcgactagcgccttgatcgtgaggtccatagctgagggattcttgatctgcgccatgactaggcgaaatataatcaatcttgtagactagggcagaaagagaacagagatgagaaaggaggaaggaacaagagagacaggttgggataagagaagagaaaggtgaaaggaaggaggaagagaaaacaagggagacaggttcttgaattggcaggaggtaagggaaagcacagaccctatcaacgttgacaggttcctgggcgtgcctgtttgaataagattgattggacgtgtaagctttgatcccggtcagtcaatgggtcagacagatctaggtcagtcagtgttctgattttatacagtaggcaacatgcttcgacgctctttggactgcatatgatacgcagactgccagtgattggtaggtgaaaaggaaatgagtaacaagaagtagagcttgcttgagatgagcggatgatttcgttggcagaaacgaagtatttagatgttttcttgctatcaagtttcacctaagggtacaataccttctcaccaaaacactttcacgcagggtcttttgtttcttgcctacaagccctcgcgcacgttctagaatgcacccgccactctacttaccatacgcttcgatggtagcgttctttacactcgctctcttactcctcaatagactatcaatcacatgacatgagatgggggaacacaatgtaatgtaggagcgcgggagaagagagaggttagagaatcgacgaggatgtaagaaggaagaggtgggagatgtaggaagggtcgatagagacaaagcaaacggaggtttctacatctacaaatactacgaagcaaatatcctaacgccaagatagacaagaagagaaaaaaagaggaaataattcaagaagagaagagtgaattacagaaggacaacaaatcaaagattagaagaaatggatggaataaagagcgaaggacaaagacagacacaatggaggttatcaggttgatgggaaagaaggttgtaatccgcataggagaaaacagacgtgaaacggtcacacttacaatcaggaaacaaaaatgaaggatgatgggttggaggagaacaagaagtaagagaaatcaagaacggaaagacaagaaggaagaggggattcgaacgagatgcaacaacaagtctaggagcggcgaagagttggctccaaaatgctagatcaacaagagattgagaacaggatataaggattccgttattgaacatttgttcaataaccctcgcctgctaattctgcctcaatggccttgcggccagcctcagtcagcctaggtcttccatcgtcgatctatgaatccaatcatgatacaacgcgcattcccgtttttgaaagaccagattagcaagctaatagaggaaacacatgttaggaacgaagagagaagagaaggccaacgtacattgggctcaaagaacctgggttcaaattcaatcccctccttctttcgctccgccgcccggtttcgttgatcttgctctatcgcttgttttgccgtagtagcgtcggtgtagttcttggcgagcatcttttgagtcacgctgtcccagagacgtctcgattcgaactcagactgagccgtcagcggccgaacattcttgggaatcaccgctagtatgtctagatcaatcaacatccgggtttcctagtcgagacaagtgtccaaggcaatatgtcagcacgttatgaacaaatctggggaaaaagtttgcccaagcaagatgttagagacaaactttggtagctttcagtttgaaagtgatctgcttcctccagcagccctctaatgtgccgacaacctgggcagccggtacgtccttgattttattccaactctcggctttttcggcatcagcggtcgcgtacttgtatacaactccctcgagcgcgaatcgaggtttcgagatccagctctaaggatatacgatgaggaacgagtagtgatgttagcgagcggcaaccagtgagtcttgatcaaactaaacatatgagctgacttcgtctttgtactcgatgatggttctataacgctctgtgctggaccctcctctgcaagtgatggtcacctattgggttacagaggtttgaagaaaaaagataaggcaccatcatgattaaggttttgtgaggaaaaaaacggacattgtctgagatggttccatagtaactccctttcagaagaccgttgacgttagctgtagggttcgtgacctgatatctatggacagcgtcaaaagagcaatgaagaagagaagaacattgttcgtcaacataactaaactttcagtgggtgtgagagagtagtctacttactcttcatcggtcttcttgactcgaataaagacaccctataaattgaggaaatcgatgggacgcgcaaacagtataatcagtagtatagactaaatcagatacctctgtcgagaggcgctcactttattgtaaactcccggtgcgatcttcacagctgtatttttcctcaagacaaagaggaatgaagtcagtctctaattgatattccagagactatgtcaaccgctaccacttgctcatcgaaagatggccgactcacacatccccgagactttcgcgctaatttgatcaatctatatggatatccaaagggaggtcgatatcttcttttagtctcttattcacagattaggaaactagaagaaagtaagataagacgaaataaagcgcacagctacggcctccactcccttctctggacaagagtagtacgcggacgagattggcgggtgatgggatacttgctcacactgtttaattgaattgattgcatagttgattgaaatagaattcgagaatcgccgtgtttatcagttcccaaaaccgaacctggagatgtacaagatacaagaagtagggaagatgcttaccaagaaggccacttttacagaagagacattgtccgcgctgacatccaatctcgattgactcttcatgctcttcattgacttcgaactgaagctccgaatcgatctgattggcaaatggatacgagttaggactgaacagcatatgatgatcggataagaagacgcacgaggtttcgctgccggctgcctctcctggtgtgttgtaaccagagatcgatggatcgcccacatttggttgatggagacatgtgtttatcacgggctccttcgtgtccggatcaactgtggaaggcggaaggagccagtgacaacgaaagtgctcgcctgtgaggaacgcggtttgatcgccatgaacacatggtgagcaaagatatgataaaaatttagatttgagacaaaagagggaacacgaaccaagaaccgaattgtagggcttgcaaacttttcctctctgaggaacatgcgagcaaacatcaagaagaagatgcctcctctgcatgagcgatgcccgtaaagagagtcaagttgaagatgactgggaatggacttactacaaacttcaactggaacgtgaaagaaaatctcaagacagccagcatacgctcaagagaatcttccgaatctccaattctaagcgcattgatgacgaaggaaagtcagtacaatcatttatctaatgagcgcctgtgaagtccaagagcggtcactcacgcggcaaacatctaaggtatcaagatagaatgaagggaaagaaatttcttctgtttagacctgaaggtaagtagagtacgatctgtggcaggagaagactaacatcggcccgatctccagcagctatgggggccaaatgtaggatacgatgtcagtctgagcaccattctttctatcctgtttgactcaggggactcgttcgatcgaacttactccaatactctaggtttggaactggttctctgtgaacaatagaaatgcaaagatagaacaacatttcagaactcggcctagcttttggccgaaagcgctggaaacatagagagctcaactgacataagagaagcaggcaaagacaatcgtctgtagatcgaacacatggtcagcaaggtttcactcgataaaagcaacatgacctagaaaggtgctctccatcttgaacagagggcttgactgaaacaaggagaactatatatgtgtctcgcacccagacaagacttctccctgaagaaatcgagttgatctttgaaaacggctgaaggacttacaaattggcaagatcctaccgatgtcgaagaacgccgtgtacgaacgagccagacaagggacgtgttagctgttcagctatcatctcggttccttcaccaacgtgcgagatgtgagaggcgggagcgagggcgtaccttgacgcccatgaacttcttgagaagagacacgatggttttcatcttgccttcttcaccggaagcatcggcaatggtaacaggcggagctgatgagacaagaggaaagacatagaggaaggaaagttgattagatctctgaacccgtaacagttacattccggctggacaaggcgagacgtcgctatggtgaatagacagtttgagatgaaggtaggagctccaattgaatcttctggtgtttatagtgggcttgatctcaaaggatcagatacaacaagacacagaagaaggcgagatccgttctatccttttacgacctggtaaaagactagttctggatagacgccatcctggaaagtctgggcaacgaaataacatgctgtgtatggtactatgagaaaatcggagaggttcacgacgtggtgggcagagttcgtgcctgagatcatacgataccgacgagagagagtaggaactgagcgtgaaggggggacaagccatcgtttgacaaacgatatagaaattttggctgattgaccgaaaggagttgtagattcgagacggaagcagtagcagagtgatacgggctgggcaagaggaggacgggacgagaaggggcaacaaaaaagacacgtacaatcatcttcaacataatcttcatcctcattcggccggacgactttctttgccattgctcttagtttccttccgtttagaagagtgtgtgtatgtgtagaggaaggaagtgtgcgtagatacggacgaaaaagcaatagaagagagatgaataaaaagggtgattggggaagagacaaagccgagacagacaagcggagacagacactatcacagagtggggtactagtatatgtcattgtggtcacgatagggttacggacacgtggctgtaaatgaacaagacggtcaatccgtcagattaaccgcgatcaatgacgacagagctctagacggcctatgtagtggattcccggcggccccaattgatcccacatgggtcaatgatgtgcccaaatgaaccccaaacaagaggcaagaccccaattgacccccagtgtaaccctagtaaattcccaagaaaccccaagttagacccctcggcagactcgaccaacccgcctttcaatatggtcgctctcgctctctcatctctttctcgattctctgattcctctctttctctccttctccacactttcttcctttctatctttctctcttccagttccgttctttcctctctctttgttttcatccattctccatctccatctttccaaccctactcttcccatcctacttcaactttttagcctgcagtacaagtttactcaaaatcatgtcccgaattggttcttcagccatcaccactgctacagctccagcaggtccatccactcgtcaaactcatgtccgcgccgctgtagctgctatcaagaacaagatccctgttgttcgtgctttctttgtcttccgttttcgtttctttctttctacgcctgcttctatctctcctggagaatatgttgtgttggaaaaaaccttgcccaaccaaccgcgtacaaagtccagatgccgcgattaagtccagacaggtttggcaacagtacgaccaacataatcgaaacgatgagtctgacgaaccattcgaggagagcgagtcggctatgcacttagacatccatacccatactatctgccaatcgttcctgccctggcactagatgtgcacgtaccgaaagggcaggagacgaacagtctctgtcgtctttacttgaagagacaggatggtcaatcagccgaccatcagaaataaccaatgggctctcctccacatcgctttacaacttcttcttgccaaaccaagcattctgtctcagcaagggattcagatagctaactacttccttcatcactcttgacttatgctgtataaacactgccctgcgggggaaaattccacagcctcagatcgactttactcaacatgaaatggaagatgggagcatagtgaatacccaggagcgagtgatcaaggacgtaaggccccgcgtctctctctttgtcttgcacaattgtgtagatccatcctgaatttatcttaacggctattttgaaacgatccgaaaaacaaacaaaccatccatttcaggtccaagccccggccatgttccttcctaccgatgaacagttctttactgccgatggaactaagccagatatcgcattcctcaaaaatcatttttaccgagaaggccgactaacagaaaagcaggcgctgtttattcttacaaagtacgtttcgataaagccccctcgatcttccttctcccagatagaatgggaaagagacagaggaggagaattctgttcttagactaggtcgaatggctggtcctgacgatgtggtactcgactttgcttggttggttgatcatccggcggaatagagcgagcgaaatcttggctagcgagcccaacttgctcgaggtcgacgcgcccatcactggtcggtattctatcacctcgcaaaatattattgtttgcttctgcctcctgattgttcatgttttatccttatgaaataactagtctgtggagatatccacggccaatatgtccgtctttgttgcactctctcgcacccaaccttcttacttcgcctgagctaatcaattcctttgttgatctgaatatctacataccaacaacgaatcgcgtccttagttcgatctgatgaaactattcgaagtaggaggaaacccggcggatacgaggtatttgttcctaggagattacgtcgatcgaggatatttttctgtcgaggtaggttttcttatctcttctactctgtttttgcattcgcagtgcaaagcaagtgttctaacgctatctgtgaaactggtacctcccattctctagtgcgtactttacttgtgggcgttgaaaattcattatccacatacgctattcttgcttcggggaaaccacgagtgcaggcatttgaccgactacttcaccttcaagttggagagttagtcctttctacttgtatattcaccatcggattgaagcctgatcaagaaatttatgaatcaactctatcacctttgcttactaatctttcattgtaggcaagcacaaatattctgagcacttttataatgcatgcatggagtcattttgcaatttgcctctagcggcggtcatgaacaagcaattcctttgcatccatggtggtcttagcccagatcttgtcacactagatgacctacgagcggttggtcctctgtcctctctggttgtttcttctcccgtcgaaataatgttggaatctgaaagttaattgtcttaaccgcccttgatggtctgtggtgaatgcgcgtgtgccaactaggtcaaccgtttcagggaacccccaacaagtggcctaatgtgcgatctcctttgggcggatccactagaagattttggaaatgagagcacgaacgagagtttcattcataatcatgttcgaggatgttcttacttcttcacgttggtctctctatctatctgtttccctgcgctagaaagaaacgaaggttgataatcgtacttcgaattttggtggaacgatagatataaggccgcttgtgactttttagagaggaataatcttctgtcaatcatccgagcgcacgaagctcaagactcagtacgtaccttgtttctcgtgtcatcttatccctgcccttttgacatctgtcctaatatcttgtcatttgtcctatgaaatttcagggcgtaggttactttgttgaactctatgtgtatatactacttggaataaacaactcgaagaataatctgacgctctccgtgtctctcccacttgaaccggctttgcttatgtcttttctctagtaccggatgtatagaaaaacgaagacaacgtacgtgtcgccttgttcgaaatagtccttgtgtggatcttgacgaatattcactctcgtatccttctcgaacttttcttatgttgtagaggattcccctcggtgatgacgctgttctcggcacccgattacgtgggttttttatgttctcctgttctcagcagtgatcgttccttttgctgatgcactcttttacatttcccttcagtgttcgtattcttcaacccttgcgaatctatttagtagtaaagacaataactaaatgtcaccgttctctccttgtgtgactcgtagtggatgtgtacaaaaacaaggcgtgagttctaatttatatttcacatacgctctggatgcatgttttcacagacgtcggcgtaaggatagagattcactctgcggttatatatctcgattttcttctatagagccgtacttaaatacgaggcgaacgtgatgaacatccgacagtacgttcttaaaaacaatctcttcttttctcatgacttgttgcgacgactaatcttctatatttaatttgtgctgatcgctgcctataggtttaacgcgtccccgcatccctattggctacctaacttcatggactgtatgtctttagaatctgcccaaatgttaactactttcgaatcactgatttgattaatcttttgactgagcaaacgtacaggctttacctggagtttgccttttgtaggagagaagagtatgtgatacttgattttgaagtcgtgtaccaaatacttgtccgaactcgctcaccttgctttctcttcttaacagtcacggacatgcttattgccatcctcaactgctgcactcaagaagaattggaagaagaggaagaggaagaggaagaggacaccccggtggaagctaacacgcctggtacgtgtctttccttagcatctaagtattgcttgcgtactgacacagcttctgtctatcgttttcatttgtcatctctacagaggaaccggaagagcgccgacaggctatcaagaataagattcttgccgttggtcgaatgtctcgcgtgttctctcttattagagaggaagtcgagtctggctcagaattgaaggcgattgagggaacgacaatctcgaccgatacgctgatgaacggcgcagacgaggtccgatgtgccatcaagggtttcggacaagcgtacgttccaagcgtcctttggcgatggtctgtgacttgatattctggtgtacatgttaatgaatttattctatcttgggtacttacagacgaacaagtgatatcgagaacgagcgactgccacctgatatgatcgacgtaagttcctgatcctcttcgaaccttttatctcactgattgatttagatgtctcaccccttccttatctgttcctgttttaaaaacaggtcgatgaggaacgacctgcttctccttcttcgtcagcccctaactcgccttcttcaccgcctcatttcgacaacgatccgttcgccaccaatttcgcccactctggttcccctgagacaccttcgagccctgttcactacggatcgacctcacctccttttggttcgcctgtgcttggttctccaggatcaccaatcagcggtggtgacggtactccgtggcgcagaggtcacggtaggagacaaagtttgggaacgacgaagacgagtccgtcgacgagaagaagatcattagagagcacgatctcgctcatcaaggatgttgtcgaggggacagacgcttcaggtgatacagatcagatcaatcagatcgcggaaactttgagctctccagtcaagaccaaggtatgtccagatattcgccctgatttatatcatcaattgggtatgatcgacgaatattggtctgactctatgttcttttcatcttatcctttgtaattccttagccacatcattcaaccattgaagaatagagtattttttgtatggctcaggatgaacgaaaagaaatgaccaaaaataaaaacaggaagaaaaacaaatataaactctatgttatctcgttctcttcccttctccttaccactcctctctccctggatctctcttttccttcttattctcccatcttcctcttctcttctcgtcttggttgtctctacccatcctgccatcatctcggtttcatctttcgacatcagaattaacctttcccccgacgcttgttcatgagttcactatcgaccgacttgtaaatggctatttttcccgcctgtgtaaagacattcaacgatcatcttttgcttctttcttttaattcttcccaactttttgttccttcgtgtttttttttttcgttttctcttgcaaagattcaactctgaattcaaatgtattcggacacgcttaaccgaaaacgtgcctgttgaacaggataagctaaagaaaagtcgggatttggaagagagagaaaaaaaacaaatgatgtatacaacgttgtcggcctttctgggaccagtacagttaggaaggaaagagggtttctactttcggttcatgatcaccacactgaaacagaagaaattcagcgaccaagcatgtgttagagttaggtgtcccgccttaccatgtgagagacacaacaagaagaagagaagaccccatcaaagaagactcactctgtctcgtagttgtattcaaacacgcctttctctttgtcgatccaaaccatatcttctgcgctatcaagcacctgctccaatttgcttattaaagcctcactctcttctttgctcaaaacagaggtgtaactctttgacatcactctattgatagcaatctctttcgtacagggactttttgaattccagacagtgaataccggagggtcgaacaaggtcttgtactctggagtgtcgtacaaggcatgccagagtttgaatcgctgctggggagaatgtccgtcgtagacctcgtacgtgtcccggaaggttttgatccatgggacggagagagattcggagttccagatgaatactaattgaccgttgtggggtttgagagaccgaccaatcgttttggctgcttcagcatattcctagatgttatgaaaaatgagtatccataagagcgctgctccacagggtgaggaggttttaggctagaggcagtgtgacttacaggatgagcccagtggaacgctctatagaagaagacacattctggtgatcagccctgtacaaccaaagggattcgacacaaaaactaacagcgcgaaggataagagccttactgagctatcaaacaagcatcgacagtcccatcttggacactctctggaaactgagtaaacgttccctccatagatacaaccggagcgtcaaccgaaggaatgacgttcctgttgaatgaatctctcattcccgaacttggctcgagcgcagtgaatgatttgataggaaactttgggtaaccctctggaggggataggacaagcctagagaagattccctgataaccattatcaagaccaaagaacgcgcaggcgcatgcatatgtttagcaagaggagatgactcatcgtgatgaactagctttccattacaatgaaatcactcacggtaccactaccgagctcaacaatgttgagatcatctttgttcttctttgtaatcgattgatgaatatgactaagcacagatgaggggtaagagggtctaaagagattatcagatccagccgagtgtgatatgatcaggtatatcagctatattcttcacgccaagaacaggccaccagaaaagaactcgtcatgatagaagcaatagcgaaattgaatcaagaggaagaggtacctgttggcgttatagaaatcattcttatgaccaaagccgatggaggcaacgggattgactttaagttcacgagtagtcatcgtggttgaagttgagaatgctctgactaccagatgataaactgagtgagctaacatacactcttccttagaatagtcattcatgcacctaccagctccagaaatgaaggacatccagcaggtgtaaaggagataaagattattaacgggaagagatgatctagtgagacagaagatgactgtttatctaccggggctagcagatgaattcggctcgttctcggcttgtgttcggaatcttcacccgtagggacaactatagccgatcgaccgatcggaccgatgagtaaccaaaacgtaaatgtgcaatcgccggggtatgcccgaggcgtagccatagttatatcgaggctgtacgtccggctatgactagcgataaatgattgatagagaatatctagccaagatataggagaatcgataaaaatatcagaataaaaacgcgcgatctagcaaccattacaagatatagttctacacattagaaaattggtgcaagcattcttagtcagggaacgcgaccaaaacttagacgtcacgatatcaatattatgatccggtccactccgtttctcgcagaaccacatccactcgtactctctttctctatcctctcccttcccctcttccctcttctctccgaactattccctctatctctccctatagtcctctattctctctccactcccttctctttcccttgatctctatctcagaggcagtatgacctcccgaattactaagaaggccagaatctatgcggctgccgatgtggcgaagcacaacacctcctccgatatgtggggtaagttttctgagaattttatcactgtctctttgtatcttggctggtgaaatagacaaacgcactcgagtggacatatctagacaagctttagcaagtcttctatgtttgccactcattcatggccttttggatgtttgcgtttgaggctctaccttaccactttcagggccaccaggtctgataatgcttcttttactctctgtcttcaaccggttcccatcatttttctcttgcgagaatcacagttactcacaaaggaattgtgtacgacatctctggctttgttcaggaccatcctggtgagtcaattttcgttggatcggcttcgttcgagctgttgtcggtgcctgactaatgtcaatgatactcattgaaactcaggtggagacgacgtcgttgttccttatgctggaaaggacataaccgaagttatggttgacgagaccgagcatgttcattccaaaagtgcatttgagatgatgcacgacgtgagttcactttaataggctagtttctgtgcggtcgtatgagaccaggactgatggcttgtcttctgattgggtgcctcattacctggcttcagttcgcagtaggtcgactcgtgctcggagagaagatcgttagcgatggtatgccctcatgcctttcaacccctgtcttcttgttgctccaaattaatcgttgcccttccattgctgtgctctcagactgggaagccactgaggatttccacccagatgacaccgatgtgatttctgatttcgagcgatccgagttcctcgacctctccaaggcattaattcctcagatgtggtatgccaacttcagcaaagaattctacctagagcaggttcatcagccaagacatgtgacctattccgctaagatgttcccctacccatggttggaggtgagattcatccgatcatatcacttctggtcgttctacagctaaatgccttctttgtattctgacttgcacgatttatagtgcttcactttgaccccgtggtatgtggtaccctcgatttggttaccaattgcctccatattcttctacctgtccgctctccagtcctcgcctgcaacggcagactactcattcagagccctcgtcggctccgctagatcattccagatccctccggctccggccgcttcgggatttgcagcggctagtctctgctggagtgtgggatgtgtggtctggacgttgttggagtatgctttccatcggtttctgtttcatttggatgactacctgcccgataagcagtgggctcttatgttacattttttgatgcacggagtgcaccactatttgccgatggatggactccgtctggtgatgcctcctgtgatgttcttcgttctcgaataccctttcaccaacctggcccatatgatcttgcctgcctggatggctaacggagtaattgctggagcgttcacgttctatgtgggctatgactgcatgcactgggcgtaagtatctgatctattcgttatttgtgttgtttttgttgttgtttgtatttttttgtatggatcattgacgctgttattcactccattctgtctgttgataccggactttcagtcttcatcacaccaagttgccggcctacatggcggagatgaagaagtaccacttggcccaccactacaagaacttcgagcttggttttggggtaacatctaagatctgttagtctatcatcttacagatcttatccatgtattgaggacatgagcactgatcttctgtccttgcttctgtgtcacgtaggggatatcgcctttggtactgtactcgatattcagacaaagtaaatatttccgatcgctggctactggccaggcttggatccgatctttcttctttcattctctttttatgttacagacatgcatacttcttccatcatagtacatttacttaatcaatatctcccctcctttctctctacacttactcgagacacatcaatctcgattgcgcccgtccttttgtctgatatatttataaactcaatgtggatttttctccccaaagttctgctcagtcgctcttttgcttgacgaccttaaaactaagtcatggtgcttcagactattgtgatcttttcatatctgtctgcttacttgttcatttatttattctatctgatcagagattaattgagacagcaggagactcagatttatcagggtcctgaatcgagagaatgagggagacctagcgcagttgaggagtacgcagtccgcagctgaactgccaaatcgctctgggctgcgctcgtgcacggcccgcgttttgtcaatcgtcccgaacaggggtcgatttgtgcaacagcccgaatgttctttctttgtgttaacttaccctttgctcatcccttctccaacgatcttctcccaatataagttgagttctgtggttcatatacatcgactcacacctctttggtatgtccattttcgttcgctcgaatgtcaagctaggagtgaaatagttaacgatactttcacaacctttgggctaatttgaacctaccgaacctatctggacaatacggaatccctttcctgttttcttttctccttcccgttcttcaacacacctcttagcatcagctcacgaccatagatactccggattggaacaatagagattgtagagtagggaacgttttcatcaagaggtaagacatcattcgagtttgaacggatcaatacggaagagtattgagttaagagatgacgggaaggaagctctggagtataacagtcgactgataaagtatatttgcggtttcgttgcgctttggcctggtctttctcaacaggttcacagacacttttcctttgtgaaagagtaaaagtgaaacgcaaatcccttttgcgtatagatttgtgatatcgacgacaaggacaccagaaaccgatgtctcgacagcgtgcttccgttccggaacccatcggctcacctgcagctgacgatttcaccaaaacatacacaacctctacccgccaagcctcgttctcgcaaccttcacttcagccaagtggaaaattcatactcaatcgatggtggttctatatccgtcgacgacgaatcttttcgaggtcaatctggacgattgtcctgtacggcttagttgtggtgttcttgatgaggacatttatcctgtggtcaaacaccctaccttcggcagcttctgccggcggagactacagtcttagcggtggtctcaactatattcttgaccagccgatcgttcaaaagtccaaacagttgctttcttctggtcagatcgagtctgcttcgaagccagtgtcccccgagccagtctctgatggcaaggtcaagtctagaagtggacacaagctgaaggacggtatccttcatgtggacacgttgcagccaacatctcagcacccaatctaccaactcatgagagatgctaagcgagactggaatgcgaagattgctaggcaatcgaccactctggaggaggccgtggtagagtacagaaggaggaaccacagaaacccgccgttgggattcgataagtggtgggaatatgtacagtgcgtataggctgttctaacgggcttcgacaccgcttttgcttgaagtatgggtctgttgactccttcatctcctcgttttccttttgtacttatagaaagcacaatgtcccacttcctgacgaatatgatcagatcaacaaggttcgtccaacacggatcttgacccattgtatgtttaagctgatgttgacttcatcgtgcccttcctgttctcttctttctactttcatcaggacctgagtcctttccgcgcatttactccgaccgtacttcgagcgaggactcccgaagctagggatttgactgatacgttcaccttctccgtctccaatggagttgccagcatcgatcatgtcacatttgatcccgaacggatcacgggtgctgaaaaacgaatgaaggatcagcttcatttgctcaaggatgtggcaaaacacattcctgactttgagagcgtgtactctattcatgatcggccgaccaggctgatgagtcatgcccacagatcagatctccttgaaactgccgatgatggagaatgtacgcctctcgttgttttttccacgcatcaatctactatatcttatcgctaactttgtggaattttctctccctctcttggttaatgggttgatcttgtctctacagactttgatgacaagacactcgtggagacacaccaggacgattggtccgttatgtgcggaccaatgaccaacatcaacacggctggcttctcaaagaaaatctcatcggctaaatctttcatctactcgcactcgatcgctatggacatttgcactcatccttcgttgactctcttgcacggcgcattcatcagcggtaatcccaacacacaacctaaagccatccccatattctctctgtccaaaacgcccgctcacgcggacatccttggtatcccaactgattattgggaatctacttcggaggacccactgcttgaaccctggtcagctaagacagacgctcgattagtttggcgaggaaagaacaccggtggtcaacactcaaatgcgattgattggaagagcatgcatcgacttagactcccaggaatggccaaacacgatgacccaaccatggtcaacgtgatgtcaagcccaaagatgtcctcttacatgggtgcggatctgaagttgaaggattcaatgaagcgagtgaaagctggaccgatgaacaagagaatgacagacattgcgttgtctttggatgagtacctggatactcccccagaggccattcgtgagcactttcaaatctttcttttgtcaaatgagtttatagtcgcatcttgcaaacacatctgttaaccgtgactgattgattcatctccgaatttgtacagaatgcaatgtggaacaaggaatttgtgccgagatcgcgaataactacccctttgctacctttgttcgtaaaagggatgagccaacgtacaaatatctacttgatattgacgggaacgcctggtcggcacgattcaaacgatcgctcaacaccgggtcccttgtcttcaaatcgaccgtgcatgtcgaagtgagtctctttgctccgctcttttctctactcttgctgggctactagtgtactcggctttgaacagcccgggcttttcttgcctctgactgattctcctcttttcaattagttctggaacgatcgaatccagccctggttgcactgtaagtctgcatcatatcagctacattgatgattactaatggctgacgtcgatgagtttcacctttgaatcataaagatgttcctgtcaaggtggattactctgatctctacgatatccttgttttcgtgagtctttgttcttccttcaagaactatgtgcagtttgctccttgagtgtccatttaaactgtttgagattttccattggaaaaaatagttccgaggagataacgaaaagggaacaaacggagaagatacgctcgcggcaaagattgccgaaggtggactcaattggagtcacactcactggagagaagaggacatggtgagttctatccctctcaaatcttaatgatgagttggtttggaccgcaatctctgattcgacgggatctttctcaattcaaccgccttcatattgtagactgcttatctcttcaggctctacttagagtatggttcgtaacgtgttccggcttctcttcccttaatcttatttcgcagcccgatgctaacccccttttctgtcaaatttttatcttgtttagcccggcttactgctaaaaatcgatccaaggcagacttcaaacttcccaaacattaaaatatctcaatgtttactttgaattttgttcaggatctcttccctttcctcattttattactatcattctggatctctacgtctttgtgtcatgtaactttcccctcaaggattctcatttctacatcacggaatttcttctttgtctaaatgaattgtatcattcgatcaatgaacaaaagtgagggcgcgtgtttttcctatccgtctatcatagattaacatagattaagctacagatgttgagtcacgtgatgatcttcatctgaacaacccggagaggttgttatcaatctgggaaatgtttatcatcttccattcagacatcaatttatcatccctaaagatcaacccgttgatccgtcatccagttccaattgaccgttctctatcagagatgaagagaaacctctcggcgacttattcaagagcggccagacgtcgaacttcgtcggcttccactggtgcacctctcgttagaaagctaggcgagctctcagactcatcctccagcgaagacgacaacaagaccgaaggcaaagctcaaccaggagcgaaacgacaaaattctctcggagaactgaaggaaaagaaacgaaaagagaaagagtctttgggaaagcagtcgatcggaccaggtgagaaaaatgttatggaaagaggaacagcattggacattatatacacgtccccgtccaaagctagtcaatcgaggagtcttattcatggcggtagtgtaactgccgatgattcccataagagaatggccattggtgctagaaaaagtaacggttggtttggtcgtttcttgtgtattgtccgatacagacattgatgggtgaacgatgtttgatctttgggtcttgaccagaactcgcttcgcctgccataccaaagaaatcaagagcgaaacaccagaatcactctattgctcatctcgttcccagccctcctgttcaccagatcacccagccagtagtttatcccaatggtccgagctctcctctttcctctcctccttcagatcgacacagttcgcttcctgtaggatctacatcttcttcgccgagtaaggaacgcattcgaacaacaagtccgtcgatgtcgacgcctacaaaaccctctccatctaagtcacctctcgaggacacgttcacaaagccaactgagacgggcgcggaaactatctcgtcgatcgacttgaagaatatttctccttcacgcaagcatgggatgatcgatctgataaaaatggaacaggaggaggacctgcctgagtttggtcttcaaatgttcaaacttcctaaaaatagaggtggcctggcaaatcggatgatgaaacgagctggttcctctcaagatgcttccggctcatcgataggccctactgagtcaatcactaacggtttagcagccgtcacctctccctctgttcatcctgcattatctaatctggcggcgcgctcgtctttattcgagtcactcaacagttcgggtttgcctgttgaagaaaactctgacatcgaagttcctccaacgcctacatcacaattgataccttcggtcactatcccccctgcaaaacctcagctttcttcgaacaagacttatggtggcacttcaagatcgatgttggccactgcagaagcaggatctgacgtagagggcgaaggaacgaagagggagagttatttaacattggcaaagagatggggagtggacaaagctcaagagttgaaggaagtttgttaacgtcgtcttttctttagtcttaatcgcctctctacgcaaactctctgaacaagcttcctctacctggttttcttttaatgttattttcgagcagcagacgatcggtcttccgacgttaaacgagcttcgggctcgaggagagaaccagcgctttctagacgacctcggatatatcatggatggtctacagggcgattcattggctgtcaagaggcctaggttcgtcctttgactcttgtgtccttgctgtggtgacacgttggcgttgagcatacttcttctttcatcagtgctgtcgatctcatccgaaggatgctagataccgatttcaggataagtatcaaaacgctcgatgaggctgccaatctgtacaaaattctcagaaaagcgggagctggagccggagactatgttcgtcagatcttttcttttttccttccttaattgcgtgtcttgttgatagttgatcgaatctttatcggtatcgctaaggtgttggacgcttcgctagtgttgtatcttggtttgctcgctcaagacagtaaagcggttgaggtcatcctaacttcgcattctaaagactgcttcaacgttgtcggagaaatgataaagacgaagaatgatgggttttctgcggagagaaagagggaggctgaggggaaagccgtcaagccaaaggacaaaactacttccaagctagtaaggaatttcttcgcccgttgaatcaacatgtagtggctcagtagttctgtgattctatctacagctaaatgagcttgctcgaatatacagtgtctcggatcttgactgcaaaacatttcacgtgaggaactatcgttctatctccctatgaatcatcaattcgaggagagatttatcccgagtatacttttcgtgatcattagatttcattgcgagggattgcttcctccttccttgcatcgatcgttgctgccgacaaaggtgctcgatttgatcgacacttggctttaatgcagacaggcatagctgagacatcaataacttcgctagaggcggagcttgggactctgcctggacgattgaaggatcatgagattggcttggtgagtttacatcgctgatagttccttgatactcaatttctgaagacgggtctcctcgcattgatattcgatagcctcttctcccgaaacacgagccaccggatattggacatgccgaaagatgccttttcatcctagagagtttatttcttcgatttgaggaggtaaaggagattattaggacaggacaccctcaattaccgagtctattaggaactttactcgctgtggctttacggataacgtcgtctctagaaaattacttggacaaagccgacgagataggtgcgttgcatttatcgccgaagtcggtttctttcggcaagatctgactgattcaacatatgggggtgcggcatgaaatctttatagcaacaaattgtgtaactggctgtttgagagtgctagtcaatataactcatagccaaacatctttagtaactgatctcctagcatgtccgacgattgtccctaccatcttccgtctgatcaacacttcgacgtctcttccgttgcctgttgatgactctcggagaaccctccaaatttctttagaaatggatgtggactatgctgggaacgggcacatcgatgatgccgaagaccaaaagatagaagtcctttgtctagctctgagcttgttaaacaatctggtggagaagacagaggagctcaaagaccgagttcgaatgacaggtgggtatctcgatcatggagaccttgactgttgtagagatcgagaatactgattgtcttctctcgtttacatcttttcgttttgttggtagaaatgtccaagacttgtaatggatccagaatgtgtgtttcaagttgccgctgtcctgaaagacgttctgtgctgcacatccttgtggacttgtttgtatctcaatcgaaacaaaacgcctcgccagaggtctgtatgtcttatttctatctcgaacggcctgattactgatagctagaacttcggttttgtttatgttcattaggcatcgtatttgtctggttacgctgttttgctgctctcgcacttcatgaagaacaaccagaccaacgtcgaccttattatcgaggcacttcgagcgactaccgatgaaccgtcggacgccgcttccacagcttccagcctggcagcttacctgaaagatttcgctgacgtccatcagcgattccatcagaaaatcacgacgatcgcgcgtattaccttaggaaatgattcagacgtttccgttgaggatgctgtgggattgacggacgggaatgaatgggacaaggtgaccgccaagattcaaacagaggaattgccggctgtcattccttctgtcgaggagggagtaggtaagttcaaatcttgttttcttgtgcagaagcaaagtttcacttcaattgataggccaagctttgatgcctgtgtttcttctttttcttgtccaaagatgcaatcaggtcgatggctctcgagatggagcagctggcctcgcgccttgctcagagcgctgcttgctagtcgaactccattgttttcatataagttgtattgtctatgcatgtaatagtaaacattttctgtcgaccgaaacatcagtaatttcagtacagcaatcggatacattgcagtgttataccatatgttggtttgatgaacgagcaagacaagatctgatgtgtgactgtttgtgaggatttgatgatgtagaactcataccggttcgtcctcattttcctttagactgggatctatataaacgatgaataactcagtgattcatcttcagtcccactcttcatcagcgctcccctcatccctctccctcttcgttctatcttctttctatcgagtgtgcttccactggaatgagtgcataagcgttgctcttgttggagatgtactaagtttcctcgctcatcctggctggcgttctgcaatgctcttcatccgtttctatgatcaaacaacgatatactcctctcctgttgtctgttttctttccatcctcacctctatccgattcatcggacttcatttttgtttgagttgaggcagtcttattttaaaccatacactgatgggtttgctggctagtaactagattgtatctatgataaaatgcagcaatttggattatatttgaattatatttgaattatatttgaattcaaaaatgctttaaaaaatccttgaaatttttccttcctctttttgttcctcgccaccaaacactcatctttctcaacgtttctttttttctaaaacctttcaactcttacttcaaaatgtacggaaaccgaggatgctacaactgtggagagcgtgcgtgttgagttgcctctttcctcccctactcaaatcatttcattggaaccgaacacatcggattcagtagcttccccatttatcctccggatgaaggagaagggaagaaacactttccagcatccaaggattcggtgtcctgtgtaaatactcttgagctatgccgaagagggagcggagaaagaacgaggagcgtggagatgcttgaggcttaaagtcgaagcggagcgtaccttagttttttctcctctttattttctccattccttttgatacaaaccacatgcacctatctttgggtcgtcctattgtagtttcttccttcggttgtcgatgattttgtctgcgagtcgcgagctcacgcgtggaggagctgacgagtttggtgttctaatatttactttatacttcgggcgacgacgacgacgatttgtattcgacgacgaaatggaacggcggcgtatcaatgactttcaacttgtcttgttgatctcgatccatcttgaaaacgaacgttatcattcggttggcttgatttatcatgggtttgcatatctgtgtttttttgtatgccattcatccggttgcttcatctagagggccacgtcgcctctggtatgtctttcttatccttgtcataattcaaacacaaaatgagcatcggttggcttatgcgaccatgttggttcttgattgcatagcctgccccaaggccggaacccccacttgctacaactgtggaaacgacggacgtaagggaactttctttgtgtatcaatccttgaactcaagcttatcggggtcttcccatcgtgtatcccttagacgtctcccgagactgcactgaggcccagaagcccaagtcctgctacaagtgtaacgaggagggacacatctcccgagagtgcccccagaacccccccggttctggtgactgctacaaggtttgtaatccttcctgaaaaatttcccgatcttatcggtcgttccctgactgatgttattttttggattacttgttaaatagtgtggcaagcccggacacatctcccgaagctgccctgagcagcagtcctcgtacggttacggaggagctggtggattcggtggaggaggatatgcccctaagacttgctacaactgtggtggtcagggacacatctctgccatgtgcacctctccttccgctggtggcggtttccgaggtggagccggatccggtggaggatcttgctacggatgcggacaggtcggtcaccttgcccgagactgccccacttcccagggaggagctcgaccccctaagtcgtgttacacctgcaaccaggagggacacatctctcggttcgttaaatgagtttttttttgtcttgagagcgagcttctttctgacttgtcttccttgttcaccgcttcgcagagagtgccctcagggagcccccgcttcttaagcgtctcttgaccgtttcttgattcctcttctcatctctgttatctaccttacttttgtaccattagtcgggggcgctttgacgtgttttgatctcgatgatgttgcattcgattcctcttcgttctttgtgaacacgcagggacgtaagactgagaagaaagatacgaaagaaaaacagaaaaatagaaaaaaggataggagaacaaaaataagcattgctttagtacgtcgctttgggcgagaatgacgagcgttgatattttgtttcaacccttgacgttcatccccatttctttcttcgtctcacgacctttgtcaagcttctctttcagttctctaccgaggcttctttcttcctggttgttctctcggccatgccaacagtatctaggcctaactcttctctatctagattttcttcctggagccgctttctcgcccttcaaatccttcaggtcacatcactctcaatcacgttcagtttatcatacgatacagcgcttccttctatcctctcaccttctttacaatcctcgcattcttcctcccaacaggctcttgtgcctcggccggcctcttcagctactgcctccgccgtcaatcaaaaaggctctcgaggtcgacgaaagaagaaacacgataaggctggatcgccacatccgacatccgctcatccagcaatatctgctgctccccatctgacggcacaggcggctaactcaatcttttcggacaccgaaggggaggaaggagatgagaatgagaacgaatcgtccgtgaacgaacaagatcaactcggatcgaatcaacatcttcattatccggaacctagtggatacctcaaaatggccgccggagcggaccttctagagggtagcagcccagcgagtggtctcgaaggaagaacacacctagcggttctgatgagcagaggactggctgtcacggtgaatggtaacccttggagaagcgtggcagcccatgtgattgatgacggggatgaagctatcgttgttgtttatggtctgtcgtgagttttctcccttcccctcttcctctgccttgtttctcggcgtacgctcttgaagaattcacttgttctagattctgacctttgagggaactcgatctatagacctggagaagaatatacagttgagcttgggttgatacctgatgaggattccaagtccggtggagagtaccctactggcaagtccaaccttctcgctttcaaattcattttctgtgcaagcagtctgactgtctttctcatgacctcctgtttagcctggaccacaacgacgacacttgctcagtccgagtcaagctcttcatctatacctacagctgcttccaactccaagtacacaacctccgctctttccagcatagctagccctaacagtactgtccgttcccgctcccgctcccgtgcaaactccttccgccgctcaagagcaagttcgtccgcatcggctcaacctccctctctacctgaactgccgccagtcctctcgacatcgcccgtgaacaattcctctattccagcttctccttcgacaaatactagtcttccgtccacctcttctctctcggtagaagcgcttacgtcgatgttcaaacatctcctcactcagtctcaaacacaacaggccattctatccactgagttgaaatctcaaagacgctcatctcagaaaaacgaagcccagctccgatcgtccattcaggctttacagagaacactggaaaagaattcggcaggggatctaagggggagacaaaaggtgttggctctgggagaggcggttaagagactgaccgtcggcaaggaagacgttgatttagaaaggaaggcactggaggaagagatctggggtgagcaagtcaacgaaggggaggatccaacaacgaagaaaaccggtatgggtctagagaggaaagaagaagaaaaaatagaagactggaaggcggtcgagcgggatggagcagagatggagaaagagagaaaccagattgtcggttcgaatgaaagagtcttagctgaatgggaaactgagatgaatgggttgatttccaaactagaaaaggttcgttctctctgccaattcttcttgcgctgcgatttttcatattttgatatgctgtgagcttttgtaacaccgcttgatttgatttcagcttaatggaaagcaagaacggcttcgttctcaagctgacatgcttcagaatcgactcgaaacggtttctaaagaacgagctgaaatcatcaatggaactcacccggtccttctcgacgcggccgccaccagcacgatcgccactatcacaaccaacatgaacaatgccaacaaccaagccggattttccaatacccaaacgacccctcggttgagaaatgatcgagaacgaaccagtctggaacacgttagcgcttcagggcaagcatttcgagccaacgttcgacctatgaacccttccggtggaagagggatcggtaacggatatggcccgcctgtcatagggcctgtggcccctcctgtgacctcgttaggtccatctgtttcggctccatcgatctcaacagctaaaacgtataggcctttcgggacgggttcgaccggaaatcttcctcagttgtctcaacaacatccgtttcccatatcgtctacatcggcgattaactcttcccaagcgaccgtccctccattccgaccccatggtcctcctcagacatatcaattcaatcactcttcgacgccgtttgggctgcacccaccgcacaacaatacaacctctgggtcaaattctcaatcttctctctcttctcttggagaggcctccaacggattcccggctaccttgaatgttcacgggagaagacgtgtctcggggcctgataaccagggcactttcaacccgaatccgaacgaatcccaaccaccatttactttgaacggacatccctcctccgggacagcgcccatcgccgtctcttccgctctcaattctgcatcaaatgctactttccctcctctgccttcccaaagagaaggtcattctccatcaccatccccttcgatctctcacgctcagcttcatcattcgccttctctggctgacatcgtaacgaagggtgcgacatcggcaggttcaactcatcagcaccatcatctatatcatctatatcctaatccaaagagtaatcagcaccatccattttcgacaaagtcctctccttctgtacccaaagtatctccttctccaccaccgtctatgacagcaaatgcaacaacagctttcccaataaacagagttcagcaagctcaagaagacttcccaccactatcaccggtcatgtcgacgaatccacctagtagaagacaatcgagttcttcggcgattgaagcattactaccgactggtccggttatggagtctcgctaaacggatctgggtgaccgaacgtttattgtaaaaggggttttatgagcacgacttttttctctattctcgctcgtagtttccgagtatcaacagagcaagacaatataaaggaaacgaatcgttgtctttgatgaaagaggattttgaaatcatggtgcaggcacatcagataatgcctctacttgctatgctctttcaagatatcttaagaactcttttgtaggtaattcgcccagattttccctagagatttttgtttgcttgtttttgataaagaagcggcatatatagaaacgaccccaaaaccagaggtaaaagatacaaactgcttatgagaaccctgtaatcaaacaactctgtaaagagtcagtcaatatggtcaaagaaccgcaatccataggaaaagctcaacgaaagccccaaaagcaaggaaaaaaagatggatggaaaagaggtttttgttctcagacagaaaatagatccacaaagatgattcggtagtctaacatgttttggtcgaaccctttcggattcggtacatcaacgagcaaaagtatgcatgcaggaggagggagagggtgaagaagaaagataaaaggagacattgatacgaacctgaaagagattgcgaaaacgattcgatccgagccgagccggcaggatgaacgaaaaagacgagaagaaattgcagaccaccaattgctctttttgtagttttcaagagaaggtggaagtaaaatcttgattctccgtcacgtgatgtatgaaacacagcttgatttgttcctaactgtaatggcaggagcaagtgttactttgaaggggaaataatactgtgtacgaatcatcatcagtcagcatggacacagctcagcgagaactcaaaagtaagtaccatgaacaagtgacatttgagacaaacaaggatcaaagatggaaacagagaatataaggaatatatcgatagacggacactacatagagaaaaaagcacattagaaagtactacacaaaactagatatagaaagatagaagatataatgttcttgagattcgagaagagaaatggtggcgcacgcgcgtacacatacttccacgcatacacgccacaaattaaggagagcgagtccaagaccggatgatctattggtttagccattgacctagatcaaaaagaattctcacatgaagtgatagagggaaggtagaagagagaagtaaaagagcgaattgtcaacaaatcactcgttatcgccctcctcttccacagccttcatctctatcaatcgtctgcgcatcgccttctccgtcttcgtaggaggaacctttcgagatatggcggcagcaacctgtttcaagaacacaaaaatggtgagctcgagtagaaaatatattttgaaaatgagaagaaagacacaccaaggcgcaaagacctccgaatcggagaacccaaacaactccgtttgggttttcgccatcctcaggcatgttttgatctgagcctccaggaggggacggagcaggatgctgggcagcggctacaactcggaagatcaactaacgttgtgaaaatacgcggacgatttagcttcacctttttgatatgcacatcgctcagaagagaaccccacgaaagacctaccgaagataccagagcgacgacaaactgtgggaacacgaccgacaaattatgcacacccaagatcgaacccgtcgcgaccggtccttttgcttcactttccatccggttctctccgtcttcatcgtcgtgttcagtcgtatctatcatggacttgcttctctttaacaaggacgatcgctcattcggtcggtttggaatgaggaacgtgctagaagccctctgaggggcttggacgagaccggcagtagtggcagatcgtccatgcgttcggagataccgaggaacaacgggctcctcctgagttcgagcggtgacgacaggtttatccttaacctcctccatctctttgaggtactggaacagcaaataatggacgacaatcagtgatccagtaacatcactcgaggatacagcctggagcgtatcatacctccataagcaatctgaccaaagaaaggcaaaagaaattttgttaaccgacgtctagatactgggtctcagtaagcacagtttaaacttacgagaaggggacccaggccgcaacagcccagcaggctccgataagtgcaatgataacggtagcgccccaaacctcggtcacaaggaaggtagcaagcctatgtgttaaagagatggttgattaatcatgtgattcaggcacggaagcgaagaacataggaatgggcgtacatcatcacagcaaaaagaattaaagcggcagtccagatattccgtaacatgaaaggcactatattccactcagagatcagaatgcttgttttacatgcaacgcatcgttaatcgtcaaaaataagaagaagaacatacagataggtagtttgacaggttttttgtctctctttgcttcctctttccatcccttgaccatttctttgatttttcggaactccttctcttcaggagtctcgtcttcatctccatcttccaacaaatctggagcgagaagccttcgatctcgatcagcgaggtaaggaaggactgtgccagcaattaccgcgactgttcggagaaaatagatagcaaggtccacaaggtccaaagaagaacatcagaaggcatttactttcaggaacagagagattagcgcaccgatagaatagaatagcattgcaagagaaccagctctggcctgttcgtctctagtcttatgtcgttgagagttagccataacctcggccacccaagtggttccgtagaacaagaaggggaaccaggacatctatcacccagataatcaactcaaaaatatcaggacgtcatgtaccattactgacaatagggccaagaacttacaaaggcaaagacctggacatagcagactcgtcggatgggtcgaggaagatggataattgagtcatagatgttgtacgcgatatctctcactcctctgaagagatcaaaggcagaagagtcccgtcagaaacagactcaattgatagctactatgatagaagctcatagagacgcaacacttacccaggtcggacgccgaattctttttctcgggccgtctcgtgagtagtagcgcacgtgacccaaacagttaaacctaggatcaaaatgatgatcacacagaactttctgaaattgcctccacccagccaggcaagcagagggaaagtagagaggtccaagaagccgagggtgaaaccgagaatgtttcccatgtgggtcattcggccaatccaagcgttggcagaggacaattgttcagcaggagtaacatcgaggaccaagtttcgaagagatgcttgctgcaaaagtcacaaaacagagaatgagcaagatctatagagtcaaaaaggtgatagaaaggtatacacttatatacgtatacgtgaacttaccactgcattgacagcaaaatccagcagataaaacgcagcgatagcaattccaatactccaattcttgctaaccttgatccatttagggtcccagtctccctcaccagcgccgactatgtcagcagcaagtgcgcctagaggccgggcataggccaaagcgagcgtggcgatgatcatcacgatggtagccaatacgacccaatatctacgtcgatatttggagtaggatgcatcggagatagcacctgaatggagatgatatcaataaccatgtgatgttaggcgggtatattcctctcgagtatttgtaccaaagaaagagtattcgaaccaatcaagggttgagtaataagtccagaaattgggcccgcgagccagacgagggaagtgagctcctcggttaaacccaaggcctgataagacaagagcagacctggtcagaatcggtcgtcagcttagttgggtcaaagttgaagggcttactaggagctcttgattgccgaacctatcaaaattcagcccagctcaattttattaaaatcaaattcgaaagacgggaagagggaagaataagatacgcaccccatctcaag

SEQ ID NO: 1153 - DNA, 919 bp, Xanthophyllomyces dendrorhous
atgcgactatgcaataagagaatgtacacattgttggtgagtagttgacgacattgaagtcgacagtcacttcagaacttactctgagcacctcccattccaagagtcatggtaatctacgtacgtagagaggaggcgggataataaaaagaaaaagaggcggggcacatcacattcagccaacatcatttataacagcgcctggtcaatcggaccagttcaagacttgacgcctatcaagaatgagtcgttgtgaacggatgaaagaatgaatggacgtaccatattgagcaaagtgagcttgtgaggaacctttttggattctgatgacctattgccaccggggcctctctcaacatcttgcccctggccgtatgaacctcgtctggagctagcagcctggttgtgcccgccctcctgactccatagatgccagccgttctttcgatcgcccttgtctggctctttccctttctgggctttccgaagagaagacagagaggtatatgtatgaggagagctaacgaggttaccctcggaaggcgacggtccggcggatgggatttctccaggagcgatgatcgaaagtttcttctttgacgacggatcgacggacggatcggacattgaattatctgtgtgcgtatgtgtgtggaggtagaggtaaaggtgggtgtgcgggtgatgtatctgcccttgataatatgcctgctcttgctgtcggtctaccttctttggatctaccgatgggaagccaagggaaaacttgatgcgactttgttaagctggacaattcctatcggggctgtcggtgaatgaagccaatctggggacgcacaacaacgttcgggtctgcctgcctactgccttggttgattacgtcactttgatcaccatttggtaaattatggggttgggc

SEQ ID NO: 1154 - DNA, 21286 bp, Xanthophyllomyces dendrorhous
ggtcatatttgggggaatttgggtaaacattcggtatccctgaacgccttcttaagcagaatgaagacaccatctccttcggtcagtcttccagataatcatgatcagttgatgtattcctttatggcttggacgatggacgctagacatgtttcatccttatctctgctaacatttgtaagggtcctcagtttcaaatagttcctgaatgtcgtgtgcgctctgtttcttgtttctcctatttgcgtcccttttggtagatgttaagcaagaacctttgtttggaaaactcataagatcgcccttcaaagaattccgggctactctttcttaacccatcgttccagtttttccctcctttaccctctcctctagaagttcaagctttctccatatacacatatttcacctccaccgatgagctctctcttcttagtaagtctattggcagcaggtactgccaccgcgcatgtcgctctctgggatccaggtatgttcggatgtccttttgaatgatttcctcggaaggccgagtctgacatttggagtgtttcgattccgttcacacaaggaatgtatggtgtaagtgcactttactttttgcctttttcttctggctaatgctgacgaaccctactgtactccttcctacctgggcagttcaacggatcaaataacgcgtgcgctttgctctcttttagattttgttcctctaattaatagcgcttgctcacctatattcaacattttatactcgccgtttcagtgtggcgtgagcaggtgttttctttagtattccttccgctcttctccaagtgaccgtccgttgaactctgtccgttctttcgaactcccagaaattacgacaacagagatcccagccagcctctccggctcgatcatgcgctaattacgagcgaatggtttggtcagtaagttctccccgtttagtggactcactgccagatctttctataggattgacgactctatctcgttttctgtatttttttgcgccgtcattcagcggatttcaacatctacctccaaaggatggtgacttcatgatagtgcgctttgtttttctcgcgactctttttttcgttttggctctcatgctgtgtacaatgactgaccgatggatgtgcgtgacggatctggagaacagcttcctgctggcgggacttatcatggtgagccattctatatcctatctatgatatattgaggagtcacaacattcaatcttaccaaatccatatatcttggcctttccatcaggtgaagtgtcttgtatccgatctcaaacaagctatgggcgacccggtgccacggatgatcttcccgaatatgcgtgcaaagaagttgactgtcagttacgcttcagtcgttttcccagctatctttcaacttgggttctaccctctaactcgactaaacgccttattttcatcagctctgcatacgatcttgaatctaggggaggagactgattcaaagtggcttggtggatggtgtgtttccatctgtcacctcatgtttcgtcttcttattctgacgttttgttttgtatagcgcactggccatcgcctatgaatcagatgtcacaaaggtaaagcctgaggattttgtcgtgctttgtaagtcttgttaacattttcggaagcctctcctcacaagattgagcttagtatgggcttaatgcattgggtgttctagctgttaatcatgaatgtgtctggaagagaaaggtaaattttgagattccagaggatatacctgcttggtatgtgtacatcttcaatgggtcttggactttgattccataacaactgagaactaaacttggattgttctgaattcttagtcctcctggaggctgccactgtacatggaactggatcgtaagctatatgctctcaaaactataaaactcgtgtattcattgcgcgacctcaaccaacatcgatcttattcccattgttcttcacagcatgaggctggtcacaagaatgctgctggaagagaagaaggatatccgttcgaaatggtgagactcttcgaccgtcacgatattagtgtatcgattattatatagtctgggctgatgaaggagtggatggccttgatgggagcgcacagtataatcttctctgtgagtagtttttctcatctcgagagccactcatgagacgtagattaagctgaatgtcgaaattcgaacggggacatgataatttctagatcgatgcaacatctcaggtgcctccactgagacaacccatactgtaggcgctccccaagtacctgtggagtgtttggacgattcatctcgatgcatcaaaggagcgaagatgccgatgtatttcgctcaggcagaggggtataacattgtcacatccgtttgagtcttctctgtgtttttctcttcattattttgggcgcgcgtcctgatctgacaagtcctgtttggtattttggtgagatacagaatcctccattgtacaacgacatgtaagatattcctctcttttcctgtcctatcctctcttcttttcttcttaggtttatctgctgaactgaatatctatacttgttctatattttaccgcaggatgggattttctgatggcgctcaagatgatattcttatcgagacgccagcgaagtgtgagcctgcttctccacttttagccgcagatgatgatgtctggcagataataatatctttctctttaatcgaactcagccaagcgatctgctacacaggaaatggacctgattgagagaaagatcagacatcacaagagatcacctggtcgcctgtaattgtgttgtctcttgggatgatctctctagttgacattctctacttctttgtttgcacatctcgccttgcctttctgttttctctcttcgttcggaccgatacccaacccagcctgacatcatgctcttcaataccatcacctcactgttctcgtctttataactttactgaacagtctatacttcttctattatctcatccatgttcttgcgtcctctcctttcctcgagtgagcttaaatagaaaaagagagcgataagagatttttaggggggtcggcaatcgaagacatcccgcggatttagccggacggtcgtgtttctttttctctctccttctttctttttaccatcatcaccaccatctttccgtctcaacaatctttgccacacctacataaacccgagttttcttccttatataaattgatagacatgcctcgattggcccacaaagtatgctcctcgctcactcatttctggctccgcaccttcattctcttgaagagggtcgaggcgagatgatgttcctgatatattcaagtttagcgtggctgaaaatcgcaatctcgtttatatccttctttccttctgtctgattgctctaggttgctctgcttaccgtaggttgtttctctctgatacatacgacatcaagttgtgtttcatgtcagcgatgtcatgtttaaatctgcatggtcttgcccccttcctctcattattgctttctagggggctggttccggaattggtctcgagaccgccttgttgtttgcttcagagggggcatcaattgctcttgccgatatcaactagtcagtctctcttcttgcctctggtttgtttttccttctttcttctttgctgaacgaactgacgctgctccttccttctccatctgttttctcggtttaaacatctgtttgaaatcaacagcgccgctgtcgaggctacccagaagctcatccaagaaaagtacccggaagtcaatacttggcctgtcaagtgcgatgttggaaaagagtctgatattcaggctgccgtcgagggagctgtggagaagttcggaaggttggatatcatggtaagttcttctttccaggatttccttgtcctctgtctttgtcgttcatgggtttttattgatcgactatgtgtccttgtatctgtttgggactacttaacacggtctattgtagttcaatgtcagtatagcatatcccgttttttttaccatctacccaaagagctgctacttaccgtcatctaatctattgaaacgatcagaatgccggtatcatgcactctcaggacgacaacgcccttaatactgaggagcgtatctgggatctcacccagcagatcaacgtgaagggtgtctggtggggttgcaagcacgctatcatcgctagttagttcttccttctgtgcgttcttcttatgatctgcattacgcaagctgactccgatcgatcacaatgtcggaaatagtgcgcaagaaccctacggacgagtctaagaagttgcacgtcggaggatcggtcatcaacactgcttctttcgtcgctttgctgggtgccgctactcctcagattgcttgtgagttacattttgatgtaatttgtcttgcagtgtcgctttaagttcgatgctcaaaagaactgctcaactctgcctttacagacactgcttccaaggtacgactttgatcgttttttttttcgatccttccgttcttctacgagctcatcgaattatttttgatctgcttttggacagggtgctgttcttgctatgactcgagagttggccgctgtccacgcccgagagggtatccgattcaattctctttgccctggccctatccgaacccgtatgtctccatctctcttgtttttttattttctgttatgagcttctccttgcaagctatatgccctagctttggtatctaagaaacggtaacagctaaacattttgttttgttttgcctcttcgaaattgaattttctttgtttagctctcttgatggacttccttgatacccccgagaagaaagagcgacgattggttggtttttctactctgataatttggtggacgatggataccttctgaagtgtttgagttgcgcgatgatctacaggtccatgttcctatgggcaggtttggagaggctatcgagcaggctaacgccgttcttttctgtaagtctcagtcctcttatctctgtcgtcactattgagatcaatgagcaacagactcggtcaaaatggatactatcatcaagccaaacctaacggatctgtctttgcgattttgaatatgatctatagtggcttcggatgagtcgagctttattaccggaacggactttgctgtcgacggtggagtctcctctgcttatgtcgtacgttgttgtcctttgttcttgtcttgatggtcgcgagaactcacaagagaatgctggatttcttctctttccagactcctcttggcgagcctgtgttgccccctcctaagggactcaccggaaactaagagtaagggtggatttttgagaagtactcaatgaaaaggaattgtcactttccttcatttcgagcggacgtatgtttacggttatataggaaacaaatagattgatctatctgatggggtttgtctgtattgagttttgttctcgattttcttggtctcaagtgaattccttgtgtcttctttcgcgctgtcttgttctacgatttcttggtttgaaaatcgagtttgggtacatagaatttgacaacgagtggtaaagatgcaacaacgaaactaacatcggaagaacgatggttgaatcaatagacgagaggtccaaatgacatggaaaggaaacatagggatttaaccaactctgataccgagagcgagacctcctaggaaagtcgctcgttgttggaagtccctacaggtataacaagaaagacaagccataaggttgagtttcatgactggaaagaaggatatttgtgttgggaacgaaacgggaaggaaaaaagagcctaccgagtcaggaaatcagtgatccagttccaaagtcttgtcaccgtcaaaacacccttctccccgttggaggtcgtaagactgtcgtatcgactgccgatcttcgtccagtttactttgacaaggttgatcgaattcaagtacttttgtgtttcgttgttcaaagaggatagtcacgaagtaagacagatatccttccgagattctgttctcgaattacatgatatcagaagaggacatacctggaggaagacaaaggcgccaccgagaatgaaagcgatgagcttcgcgcccttctttatgaacacacccgcgcaaattccacagacggcaccgaaaccgagttcatatggattcacgatcgaagccggttcaggccgagaaggtggaggcggaggaacgacgggagctgcttcacgtattatcgatttgtttggtttttttttaccatgataaatagtggagcgatatccagtttgaaaagaagtgaccgtacttagtcaacagtgatgccacatcactcttttttttttagccctcttcctcttcttcatttgtcttacttctcgaaaggtaacaaagaggaaggaagagggagggaaagagaagacgtacattcacaccacaccttcttcccacctttctctccaccagccgtccaagcgaggttcagccccactaatcccactcccaccatcgttcccttctgccagtttgcccagttgaccttgctctccgtaggattcgcccgggctttcacaagcgcgatcggatccctagatgaaggtctagggggctgtcctcgggctcggatgaaccgggcagcagaaccagaagggggattagagtggattgaccgagtgaggagcgtcgaggggaaggcggccggtctagatttcagagactgaaaggcatgaggaaggagccgttgattaaaagccatgtttgatttgtgaatagaattaggagaaagaaattagggatgcaacaatgtggatagatgttgaagatggatagtacagaaggagcaagaaagagtatagatcggacggaagctggataatgtggagtgacgcgataattcgtttgcttaggtaagcacgatcccagaactaagcatacatctcaccaaggaagactacataataaacctaactagacacacagaccttgagcagagaataagaatgaaagggaaatgactgtatcgaaatgggtatgcaagagagttaactggtctgtcaagttgaatcttacaccaggcatttattctaaaatcacaaggaagtaggtatgggctttttgtgaagaagaagagagaaatgatggaaggaatgaaacgaagccatgtatatgtttagggaagggcgttggtctgatcaagagacgactataagccgaacgactccattcctttgacggcaagctcataaccaaggaatctggattgcagaagcagataatagcagtcgatcagtgtcaagggatatagtagctatcttgatagacaatttactcacgttgcggcatctgtacgagtggagcgaggaaggaggcaagatcaaaaatagaaaatgagggaatcaacaaaagctcgctacgctatcgatccagagcaagtacttgagtgaggaatcatcaagagagcaacgcactagcagggaaagctctgctcatagctggtccgaaccccttccagagcgccttcactccgtcggcagctacaagtttcttggcgcaatccacaaatccagagtatgttccatgaggagccgattggagccgagatttgatagtctatgcaaaagaacaggcgtaagaggaaagaagtcgaaggtcatcaagagaaataattacgtcaggctatgataaaacaacggtagtgaggaaacaagaggatgaagcagaggtcgatgagacgtacgtccggaggaatagcaatcgcccacatagccacaccggccgtgccaccagcaaggatgatagttccaaggttcaactgggacgggtccgagccaacaggagtaagtgccttcttggtcaattcataagcgacgaagtacctgattgagattcgatgattgagccagaggcaattttggcgtttcaagaccaagtcagtacagagcgctatcaaatgaggtcgaaacgtgtaaagaaggaaggagtaggacaaacgcagcacttccaggaccgtctctggccaaggtcgctccagtacctctgaagatagacttgatgcccccctcttgatacagctttctgacaacatcgatcggtcccttgtactgaaccgaagactccccttggcctgcaacctggtgttcatttagagccatattcgagatgcaacgttcatccaaaagaataggtgagtggtactggatgacagtacggacaagacatgagcacgaaactgacctgaagcaggaccttaactctctctgccggaccggtgacaagtgtggttggtatagcagagaagaaaccagcaaaggcgagttggctaacagttaacggtgcggtcggatcgttcgatgcattcggcaagaacgaccgagaaagcttttttcccaaatcgtatgaccagaaggagagcgcgaagatcggggtcactcctactatcggaggtcccattcctcgatacattctttgagatcaaatacatgagaaacagttcgaagaggattatgagtaggctcgcctttatgtctttaggtacctttgagggagggaaaaggagctacgaaccctcgaactccatctctggcgacagtcttttttactacgtcgatcgctccagtatacgttcctggagcggccgtttgcaatctcgtttttgtgaggtcaaacggatgtcctgaaacgtgagcaaaccgcgtggcagtaataaaggaaacagacagatggttcccagtattagtttcatattgcatatagtcgactctactctctatatcgaccatctctacgatctcctgttctagagacaaacgaccagacaccagacgcgagcaataaaaagatggtaatctgaccgaggctcagttcaaggacgtaccaactagaacagcgctcattccacctacaccaccggccacaaacgcctttgctcctcccgagtctttcttctcctcttgaacaaactcctgtgcgccgtggacgacggtgtctttaagttctttgatctcttctttgttcatcggtacgggtatctttggtggagtgtacagaaggtaactgaataacggcggtatcttgggcaactgttagaaagaagaaaggcttggtcggtgagggatgcttcgtctttatagtgagtgcttgtgtgttctctggatgtttgctcgtctcgtccattcggataagttcggaagagcaaataagcgggtggacccggttcattaaatcgtcatcacgtggtatgttacgtaaagttatgctatgcatattttggcttgaattttctctcttctctacacatctattgatattgaaggcacattatattcgaacagcatacaagcaaacaatacaagaaacacctgtaagcaatggacagagtacacctggttagcaaactcaagtttctgattaattaggaacacggtgtggatatcatcgaaaagaatcagaagccgtcgttgtaatctttccggccactcccaagcaactcctcccgaacccttcagtatcctagcctccctgtacaacataaacagacaggaagacaaatgtctcaagaatgaactgacagaaagtctgcacaagctatcaacataagccaaatctgtccgccatgaagtacaggtttgatgaggatcagatccaaaaagggactcccaacccaacaccaacagaacgttggtgagaggcgaattaccaacttctccacaaggaagaagcctgaaaggggaagtgagggagagtgggtaggaatcagagaatggattgactgggttacatcccgtggaagggtggaggtgcatagaaagagccggatgggcatcatactcacactattcaacaggcaagtcgatctaataaacaaaaaacaaagtcagtatgtgaattcattcaacatgcgacgagagagacaggacgacgtgatttcaagaatcagataagtgtttttggtataaagtgtttgtcttcaacttgagccttgcgagcctgtccttgcggacatattgcagaagcagaactgattgttcatcacatagaaagaaatcacgtcgtcttcggaaggatgaaaagaatttaaatcttacctttgggtggtaatggtagatagatttaatgaagctagctgttgaaaagtgatatgaaggcaaaagttcaaatagatctattttcaccgagcccaacgaaaacaattaatcttagtcagtaaacatagttcacaaaaaaagagaagatcagtcgattcatggaatgataggtgggtagggtggaaggtcagttggtgatgcatgttgcgagatcgctcatgtatgtcacgtaaacgcgtttggataggtatcatcaagccagggtagagaaaggattgggagaattgtggtatggtatgacgtgagatcaatcaaatcgttcacttaccagtaggcgaattcacgcatgccctcatccatgcaatcccaacagatgaccatcagccagactttgtagatagaggagagaggagaagagagagatgaatatgagagagagacatcaagaaatatccgaaatttaggagaatcgaccgtctgacttttcttgttccttcgtgtgacttttcttctagctcgagccgatttgccggcataaaacccaggcgtcacattcgtcgtctctggatttgacctttctccaacaccggctgcatctctttcaaacaatcagccggtctttccatctcaaggtgagtcttaatgcattgaacctctccaatcattcccaaacccttccacgctcctgcccaaagacgacaaacaaaactttgacaagcatatgtctgacctccttctggagatgaggatcaagttatttcttcaactgagggcccatcctacaccacctatcgtctccaaccactgtttctttaacaaacaatatctcgttaagctgtataaaaaagcagagttgactgacattcttggtaatggtttttgctcgtttgatctccgattcaattagatcacgctttctttgtatctgttgctgtatgaatgacataacaagagaacctcgcgtatattggtgtgtacgaaaacagagaaaagattccattaataatttagatagaccaatctattaacaaaacaaaaacaaactcggaaacatcgcaaacattcgttgaaaagacggcattcagcagattgctatagcttctcatctccaattttatcctcgtcgacatcaataggattatcaaatgacattccagccatgttaggggtaaatgttgtactatgcgtcttgctttctgagaacccagccgtcactgggtctggttggttcatcgcagccgccatctttcgacgagattgtgttctgtttatccccgtgtattcgaacaagtataagagattagaaagtgttcatcatggaaagacatcagaagaaagagaacaactgacaaggcgagagcgatcgactcggccgctcgaagtccaagatcgtaataattatcgttcccactgggagagactacagagcatgagtgctggtcaggtttcatgacaagttctatgggggaggaagagagaagaagaggaaatgaggggccatacacatttctgtgtgcgcgtcaatctcgccttttacgatgttgttcttagcagacacccagtaaggcttcgtaggccctttcggttggggcaagatacaaaacgtcctggggagaataaattgcggatcggacgctaattgagtatagaaactttattcgtttggacaagatcaagatctgttcagcctttgatgtagtcgctttcttgcgagaataaagaaaacaaaaattcgtactttctgaacaagattccgtcctcatgaacgagctcatcaagactctcaagtctcagtcgcatcgtttctccgtcccataagtttcccacaaactggagatgatcctgtgtaaacccgtgagcagaggtagataaatccgccagacgtcagtacaggagagagcgagagtatgtccacacgagcacgcgcacgagtgcaagtgtgagcatatgtatatatgtgtgcgcgcctcacctgagcccagcccatgccgagtccgagatcgtctctcttgtaataagctccagcagcaccagcagcgacagcggctgctcctaatccatacaccaatggcactcctttcgtaaaccttgaagcccagcctttagaggtagccgccgtcgtcgtcgtcgtgggcgtttcgtctatatggggcgccggttgggaaacggtcgatcgggtcgttggcctagaaccggtttgttctttcgatgatgatgttgtcgtcgccgttgtagtaggaataggaccatgagtagcgctagaagtactagtagagccgatagggttagaagcattggtaccagtggtaggggaggaagaccatgggaagatggagctggcgctggcaaagagggaaggcgcaatgagccctatagtagacgcgatgtctttggcggcttggacgttgctggctgctttggtgaatgtgtacttaaacacgttgggatgaaggcctaggtactaaattccgttccccaatcataggtttgtttcgttatttctcttttgttcgacttcagacatgattaaagagccttcatccaaagaggaggccaactagaaaggatacgtacaggcgtgtcaaaagcgatgagaccgataactcggggccagagaaagtccttgacgttttgcctagaggaagcgatatttcgaagggcatcggctgctaaaataccacccatactgtgtccacaaaggatgatgcttgctttaccagcaccgccaaacgcgttctccttttcgacagtgattgtggcgagccagtcagagaatcgttcgaccgcgacggcctggaatgagagaaaaggtcgattagttaccgggggcgatcgtcaatttgagcatgtgtttacaagcattaatagcacgatgaaactctcactagtacacctctggtctatgaagacgggaagagatagaagggtgtgtttgagatatatatttagtaaccgtccgcaaaaggacgcgtctgaagttgtgcagagaaagaggaccgacctcccattgtggaaacaccacgctctccaccttcacgtccttttgagtctctgtaagtatgtggtttatccgttcctatttagtaggtttgatcataaaataagaatatgagaaccgaaagtgagagtagcttgtcagcagcgatcaagagaggcagtggaatgcgatactagattggccatcacacacagacgcgagagagcgcaacttacaggaaaccgtttgaacgtggtatcatctcctttgaacccatggagatatactatgagtagtagctcgctcatcgtgtaggcgtaagtggatggttatcgatgaacgttagtgactgtatgtgtatatgtgtgtgtgtgtgaattggaatgagagtgaacacaagagatgacgacaatcgcggttagtaaccgggtttcaccttgtatctggatttaaccctaactacacagaatcagcaagagtttccatccggtagaattcccagcatacattcacccaccaaggtaaccagccatcaaagcaaactacccatcaaggcaatcacaatgcaggtcgattcaaacgagcaggatgctagtgaacctagaacaccgcctagagattcaccgtttttgatcagaacattcgttcacccacagtcgttccaccccgttcgcttgtttgaagatcgaaagatcccagtacgggatgaataccagctttacgcgtttgagaacacatcgtttggggaactcctagagatgctcgtgttgaaccttccggaaaagttaaagccctctactgccaagtatgcacttcggtgagtgggtgttttctcttcttttttggtgttttctctcctttcctatgggtactagatgggtggctgactgtgtctgctttcgaaatagaatgatctggccggataacaagcttcgacgtttctcctccaaagatcttcagacaatctccttacgggcgttgcgagaacgggattcttctcttgatcggtcagtctggttcttggttcaccttttggttctctactctttctgataccaatctgatggcatacatgctttttcatctatatctgcccaccagaacgttacaaggcgcgaattttgttcctggatcttaccttcttgtctctgttgtcaatcctgatctcgcatctggttcctccgctcatcccggccctggtcccggacccggtcttgcttctcggccgcctcctcctcatcttgccacttcagctcgacctggtcagggccaagtaccatctcgagagtttgcaaaccaccaccccgaacgtgattcgaactcaggtggcgcgtggacgagaggttcgattcgaggagcagctgctcggttcggacctcgtccaggatcgggtcgaggcgaccatggaccaggcggacccgcttccactaatggatggggagctcgaggcggcagaggtggaggccgaggaactgggaacggaaacggaggtggaagagagtttggaaacggctggacagacaggaaccgaaggagagagtctcccccacccagatctgaatccggctggggaaacagaggcagggatgtcgacaaaccgagagacgatgatagacagaggagcccacccagaccaggacggagagcgagcccgtcttatgaggcttggaattgaataggaagaaaacaaaatactatgagctttttatctcgttgtagtatcctctctgttgtggctgagaagatccgagttcttttcgacacctacaaagttccagagagagtgtaatgtttatctttatgctttgacgaccatttaacatgacctaaacaagatgatgcgatgtcagttgactgagagacaacgaaagatagagtcgatgccgatcgacgagtctggtggtatttgacgcgttctctcgttgctcatcattcacactctatctttcatcgtccatcttccttggatctacgaccatcagaagcgtatcctttccagaggtcattcaatatgtccgatcctctctctccgacggtaacgtttggtcgaatggtgaaccccattcagccacctccttggccgtcgagtcctcatcaaccggcagatcttccagcacatctatcgccttcttcctccactagccgatcgttctctcaacaacagtcctaccgtccccaacaggaaaacgcccatcaacccccatcattgcaaagaaacagaccttcatccaactcaatctctaaccattcgtcaggatttgagaaagaaagacaggtgtacggacaaccaagtcaatccttgatgtcgcccgacgcgctgatggatgggaaacgggcggataggctgagtccgtttctgagggtcaaaatcactgggatggagcgaaacaggaaagaccttctcatccggttcgatgcctcggttagtatgatcatcattcatgccgaatcttggtctttcatagaataaggatcagtattatgttctgtgatggacccctccagatccaatgctgatcctcccattgacaatattcttatcctgccatctctaacctttcggactgttatgaacgatagaccaacctcagccacttcaacaggaatctatataagaatatgcagcgaagctatgtcgagttcaggctatttgccgatcaactcgccatcggaaaccctcaaagtaggtatcccaaaaacctcctttaaacctcctgcaccgtagggaccattcctcttcaaagaactaaatccgctcgctctttactgtttggccgtttcaagcaattgtggccgcccttccgctacctcaaagctcagctgtgacagacgaagaaggtatgttcccctctgtttgcgtctctgtatgagagacagctaaccttttatcccaaactcctcgcggtactatgttcttggtgaaatatagacgatagactcgtgcgcatcgctcttcaaagatggttctcccatgtgtgtgaggatacggtgctcctccaggatgaagaactccggtcgttcatcgagtctgacttcggcgtatgttctgtcgacttctattcctttccccctttgatttcttccgcattcatcaaatgggttctgacaatcgaacgttctacgcgattgtgtatacagtataaccccgttcctcgagcacgtagaaaggctccttcaactttcccaattcagctacctctgttgggtaaaggaccgcacgatgaagacaaagaactagcgacggcaaagtcagagatcgcaaagctagatactcaatttgccgaggcggccaaagcttcagataagctttcaaagtcgaggaaaagtcggtctcttcttgctcctcctcttcttgatattgtaggaaatgcagacgattaatctgcagtaattctctacagaccttgctgcttccgaggtcgattttggaaccaagctcgtcacgtccgccaccacagaacaggttccttcgctgagcgcggcgttgcggaagttgggacgagctatggatgcgatcgctgggattcaacacgttcaggtatgcaacaatatcattcttgggaggaggttatgtctcgattgagatgttgctgactgtagaaaccaattctatctcttgggtacaaatcaggccgtgaatgagagtgtggtgattggagacacgctaggctatcaatccttgaatgctaggtctgctcgagtatgttctcttcatcgcatctgtggtggcttgctctctcgatctagtttcttatcgaggagccgttattcatcttgctgtcaacggagaacaggaaaccttatctcaacgaactattcttctggaggaatgttcaacggctgcgaagatcacaatcaccaaacgcagggcagtagagcgcatgaaaggttcttcaagtattgcttctagtaaggtcgacgacgccattgccgagttaaatgaagtgcggtttttgctcttttctcttctctagccgttattgcgaaattacaaacgatgtagtagaactaatccaatcatccattgggattgtcttctcttttgttataggctaaagaagcagaagaagtcatttcaactcgactggacaacatctcaaagaatctccatcgatctctacagactcattcccgtcaagctcacgaagacatcgctgtcgcactgctggaacacgctcggatgaacgttctgtgtgaacgatcgattcttaaagagctagaggcgcttcgatcggatatcagcgggatttcaaacactggatccagaaagacggctgtgtctattggcggaggtcttccatcgactacagcgccgtcgtcgagtaatgtgaacaaggcactacctgttccggatcgacagtcgttacctccaacccgatcgtgggttgaacaacccaaaccggttccatccggttctgctccctctttctcgtcacctcaatctggttcaacaggacatccttcgttagggccttccgggatgcatcctaactacccacaggcacaagcatcagtatacgccggaaacaacccctcttaccattcttcacgccccctgatgtacaataacaacaatagcaccaatagtaacacgtcttactaccctcagcaacagcaacagcagcaacagcaacagcagcagcgacaatactcgcaacgtcagcctgatttgacacaatcgatgtacaatcctcctctgacaggcacctcgtttgtcgctcccccacgaaacggtacaactcaatccgcgttctactcaaacccaaacctaaatccagcttcttcttctcgtagtggcggtggtccagggggaggagcagacccattgtcaggaggaaacggacaggtgtacagtagtgcgaatccgaatcctcgattagaagaccgagggacaggtggtagtgccattggtgggcaaggtatcacacagagtttctaccagccctcgtataaccggccaggcgtaggcgcagggccaggagggatcccaccgaggagaaagttggatccgagggaagcggctagacagttggctaatggattctaacaagaggctaagaacctatcagagtatatctatgtctgtgtctatgtgtgtgatgggttgaggtgaggctggtgtgttagacgcacagatgggagtctcttgcaaaccttatatctgagtattttcatgaacttatacgacttatggaaaggaaagaggagaagattcatttgttcaaaaacggatcgaggtagaccatcatgatattctcaaacggcttgttctacatgaattgaccatagccaaggagagaatataaaaagaaaggagagactcaagaggcgaaagcgtctttgagaacaattgtcatatctttgtcaagatttgccactctcttaacgacatccagaaggaatgccttgttcgctgctgtctgttctgggtttgttgatttgagactctgttcgaggaaaaaaaagaacacgagcgcagtagagaaagaaaaagaaaagggaaggagacagcaatttgagtatagattcttcgatggatcgcgtgtgggagagaggaaagagtctcacctttttgaaatgactgatcaactggccgatactaggtctcgttctcttcagataagcaatcacctgagcttccttcggtccggtcgagggtaagctagatacacgctcggacccatcgacccttggcttctttgttgcttccccgttgcccaatccagatggtccgagactctgaccagaagagtttgatccgtcagattcaccttttcgtttgttcgcaccagacggaacgggtgatcgactacgctccctttcgagacttctctccctgctaacatctctacttcgagaagagttttgttttctgttgggtgttgttgctcgatgagcgaggaaggccgctccgctcggtagaggtgagcctgatcgagaagatgtcgtcgtcggcccgctggcactgttcccgacggtggaattgtgacgggtactggcagtcgagccgggtcgactgggcggagggggagggacgtgcatgccgtggatcatggttactggtggtcctccgttcgaaggatttgtcaaaggattaggtacaaccggttcctcatccgacgattgagattcctccttatcgtttgaaacagggaggaagacaaggcaaacaaataaaaagggttgagcatctggataaacatttaaacacgcgaaagcagaagagaaggaagagaaaaaactcacagaactagcgtaagggtttctgccatcgtcatcctcatcatcactatcgtccagacctctacgcttcttgtgcttcttgagagccttcttgatcctcttcccgttctcatctaacgcgtcatctccgaacaagtcttcctcatccgagacggcatcgtctccttgggcattaccctgtctgaactcacgttttagccgttcctgaaaagagaaggaaagaaagtagaggaaggatcagatgcagtgtgtataaaaccagaaataattttcggacgaacctcaagctctttgttctcttgctcatccgtttggtcaaattcgatcaagccgtcgtcatcagagaatgcgtcttcgaaatctgcatctccatctccatctgcgccggcctattggggaaaaaaaggaaaagacaaaaacacaaagaaagaaagatcagagattaactttcagccgatccaatctcatacacgcgcacactgtaacgagattgatcagactaaccccatcatcttctcgcctaccacctcttccgtcaccatcgccatcaccgtctccgatctcccaatcttccaaccgaggctccctcttgacagacccgaccatgttggcgttctcaatctttaccactgtggtcgctcgcctgagccaacctgggagggcagtattctcgcgtttgatcctagatgaggtaggaagtgaaattccttggtgaggtgcgttgggttggagggatgagcctgctgaggggttggtagagttgcggtcggacgggatggacgattggattcggtcgtcctcgcgcatcatccatctgccggcatctttccctttaagtgttcgggcgtactatcgcgagaggaaaagcagaaggggaacacatgttgagcacataagtaagaagatactcagaacgaaacaacataaaaagacccacaagttcttcggcctcatctgcagcgagggtgccatactttggtctaggttgaaacttgaaccatcttctaacatcaagcacctcgaactcatccttgtcatcttcgaatacaaacagacagtacctcgcgttctccgccttgtcctccatccggccgacccactcttcggccttatcagcgctctcgacaacccaaggatgccgttcctccctgcgaagtcgaatggtatctgtcgagatcttgaacacctgctttgtctttttcttaaacgccgttttcttgtttctcacggtgtgctgaccgttgcctgatgcgccgtgaggagcgacgagggaggcatcgaatttctgtttcggtggtgcgtatatcggttcaccctgtccgtcgaccataggcttcccttgagcgtcaaacatctgcttgcgttcttcttccgccgaggcggcccctggtgtagatggacccgataccgatgggatggtctgaccggtggaagaagactcttgtttgacctttgctgctgccaatgtgctggaattcgatggctgaccgtcaatgtttccatctctgtcgtccgatagcgtaggagtagcgacagcagcagcagcagcagaagcagaaccaaccgccggaggagatctcgctctaggatcctttctgttcatcttgacaggccgagcgaaccgagtggggtcgatgtcctggagagagttaaatttgatgacgttgaacctggtggagccggatccggcagagacgagtctgtagtcgttgtacgttgccggtggcatcggttctgtctttggttcgagctttggtctggatcgacctggcagtcttgagaacgaggaggatgacgaggacgacgttgacggaaacgatctaggagtcgatgtcggaggcatctcgttcaacgagggctcccgcttgacatgggacatgctgtgtatatatatatgtgtgtgtgtgtgtgtgtgtgtgtg

SEQ ID NO: 1155 - DNA, 11893 bp, Xanthophyllomyces dendrorhous
  misc_feature (637)..(646): n is a, c, g, or t
  misc_feature (11199)..(11208): n is a, c, g, or t
gcaaggcaacaagcgagcaaggcaacaagcgagcaaggcaacaagcgagcaaggcaacaagcgagcaaggcaacgaggcaacaggcaacaggcaacaggcaacaggcaacaaacaccaaggcaacaaacagcgacggcaacgatctcaagcgaaaggggaaaaatccgccagggagagaaagagaaagaaaaagtttggacagctgatgcggatttattttctttttctttttttctttttttttctttcctttcttttgctctccccccccccgggccgggccggatcgttctcaacggggaataagtgggtatatgcgtggctgtaccaatctctacatccacccagatagagacagtgaacaaaacactcaccaagtgtgtgtgtgtgtgtgtgtggttgtgagtgggtgagtgtaagtaagagtgggtgggtgagagaaggagtatgagtgtgattgatcgattgatacccgcacacccgcacactcgcagatacactgatagattagacacgctctctctttttactagaccaatgacgatgatcagtgtttctcttggtgcgctctctttctccatctttcgctcttttgcctctgcgctctgatttgctctcttttttcttctttttttnnnnnnnnnnatgtgatgttggcggtgatgatgatggtgacgatagtgatggtgatgggtcgagtgtgagagaacacacacgactcagatgccaaaagactacaaatcgtctctaatacggcgactacaaagttttgcttccgacaactacaaaaattcataggctagcaatttttccttgctcactcttcccaccgcgttcgttcaactcccgacgaggatccatcctggctcaagacaagatagaccggggcagacagtgaggaagaagaagaagagcataacgaatcgaataacagctagaaggcaagtctctttaacgcgtatctcatctagaccgagagactggtactgtccagtcgtgcgtgtgctaccgctgctgctccttcccgctctttgtccactctcgttcttgacaagggtgagataaccatcgacttggctggttgagccgtagtcctcactctttggcctcaaaccatcatcccacgatggtcgtcgtgatcgatctatcttgttcatgcttggcgcacatctctagtcaggctgatgtactgaccgtgaacatgacgtcctgcccgataccacacgtgtttcttcgttgacctagtagagctgaccgaatccggaggtatcctcttgctcttgttctttctctgttcttcaacgcctgaagatatcagcaaccaataccaaggcaacatcaataccgacagccttcgtctgtcaccatttagaaaagagggaacatgcccgagtctaagaaacggttcgcaatccccgcgttcgtcgattcggctagcgctctgcctccaccgccgccaccatcatcgacggcctcctcttcggtctcgtttctagaaccagcgaagaaaaagagaaagaaggacaagtcagagtccaaagacaaggaaaagaaggacaggaagaaaaagaaaagacgaactcaccacgacaagaatgaccaggtggtagccaagcatcacgccgaccgggaaaacaatggtcaggatgatgatgacgacgaggacgaggacgaccacgaagaccaaggcaacggtaatcaggtccctgtcgagggagacgaaggtgccgctctcgctctcatcggtctatctcaacccgctttggatgacgtgccggacgtatcggatgctcagatggaggatatcctcgccgaggacgacgaagaaggtgaaggtgaaggtgatatgcagaccgtgcatgccgaggaagaacccacagtcgaggctgaagaaggacaagatcactctatcgatccgtccacgcttgaacatcaactcagcggacaagaggaagcggacgaacttcttgagagttaccaacataccttcacttcagacgaagccaccgccctcgccgccgctgtcgccgaggaggaagaaccgtcgatgcaggacattgtatctgccatccagtctcacaatgagcttcatgatgtcgagcatcaagaccaagagcaggatcaagaccaagaacatcaccaagaacatacccacgatgagcatgacccgaacgcggccgctgccgtcgatccttcgctctacgtcgtcgacttctcctccatcatcgccaatgccacctcggactcggatgtcaaccttatgcgagctcttcaggacctcgatgctgccggtgctcatagtgaagagaccgatgtggctcaccagattcaacagcaacttcttcaacaccatcttcaacacaatctggccacccaccaagatgatccgttgcacgaacatcacgatctccaccacgaagcagactacccagtcggcgtcgaccacgaagcctatggacaggaagagtacgacccccaccaggatcatcatcacatcggtgaccacgaactcgacgaccaacacatccatgaccatcacgaccagatcgacgatcaccaccaccatcatcatcaccttcaccacaatctccatcacgacgttcacagcctgcaccacgaccccacctcgttcgaggctcactaccctgaggcggaagaagatctgtcgctgccatcagctcccaatccggacctcgtcgatcagggtgaggtatctgggcaggcgggcggacggaagttgtcgacgaagaagaaacagcgaggatcaaaggacggagggttggtccaagatccaacaggtcaagattcatctgtcggagaaccagatctcggagccggtccgaccatcgatgatgactctgttggttcaggccaacaaggagcagaatctgaacttggccatcaccccgccgctgtcatcggcctgtctaacggaggcgtcgaacaaaccgggttggagtacacgacagatcagacggttgctgcacaggtcgccggtttccaccatcatgctcagatggaaggccagagcgcggagcacgcgagcatgctctctgacaagtggctcaacgccggccagcttgcaaagctcgtagagaccacaggttcgtcctcctttcgaatttttccaatacttgtcgttatcatagtgtagcattcttcgataacttatcccaggatgcttcttcctcgtatgctgtacaccttctattcagggctgagatacaagaaaggcaagttttctcatgtcgaagaaatcgacctccggaacgccctcgacggatacaaagctgttggtctcctcacatcttttctttccttttcttctttctcggctcgaaagatgactgctcactcggcgctctccatcaacagatgcacaacttggaccatgatcaactcacacagatcgtctttgctaaaggaaagaaagctagagaggccaatgctacattctggagtgaaatcagtatgtataatattttccttccttccagtctcttcgtctttatttgctcaaaatttgtctcttccccctccacccccttttctccttatttgatcagctcggaaagtcgctgagcgaccaatcatcgccgtctatcatcatgtccggcgaatgtgtcatcctcttcggaatcaaggtccttggcgcaaagaagaggacgagaagctcaaggcgtaagtcattcctttcgaaacttgtcatcatccttttgtactagtggggctcactcgtcaagttgttggacctgatactttatcttctacagagctgtggcagaggtcggacagttgtgggaaaaggtggaagggctcgttggccgaatggctggtgattgcagagatcgattcagaaaccatatcgagcataatacaggtggccgagttcgaggtttgtgtccatctttctttctcttctctttccagatcgtttctgatttttcttttctttttgtttctgcatttgctctcctctttcattctctcgttcgcgcatcaggttcgtggacgccccaagaagaagaagaactctcgcgtattatcaaagagatgacgaccgaccagggcaaatcggccgataatgacgtcttctggggagcggtcagcgaaaagatgggctacaaacggagtagacaacaatgtcggattaaatggttcgtcgaagggtttcccttctcttttctactcggcctgcccttcttcttcctactaagtcttctggcaagagagctgatccgaaaggtgttttttttcctttcattttttccttccaatcattcattcgtttgaatttcgattgggaataacacaggcaggacggtctgcacaagaaactgaaatgcaatggaaccaaaccaaaatggtctaagaacgacgcctacatcttgatacagaagtatgttccttcattaagtttcctcaagctttctttgcgtgtcgcggttctgaacgattatgctattatctcttttagagtcgtttctctttcggttcagcacgaaactgagattgaatggagattgttaccagatgaagactgggtaaatgcttttgaacgtctatctcgttcttggtaatttctcgcaagtgttaatctctcctatttcttcttttgttcaaactcagcatctatggtcagggcatatcctcaagaaacggtatctcaagctaaagggagacatcgaaggttcagccgacatgccttatcatggttcgtttcttccttattttccttgttcttaatcccaaccttcacttcatatgtatctttacctgacacccttaaaccggcttcctgtcaatttatatttagaactcattggacacctcgctcaaaagttctctgtcccaccagctgaagatcaccacgctagaatctcaagctctcgaacgagaaagagaccagagtatatcatgcctaacgagttgatcgacgaggacgatcatgagcttgatcatgaacatgagcatgcccacaatcatgagcacccacatgctcatgagcttggtcaacatctacacgagttcgtcctccttttgacttccccccctttcagtttgaatggcttgtttctgtttctggtcgctgatactagacatatggttatccttctctatcttaaaaaaaaaaccaccaaagtgcaacacaataccacctgggtgatggagtggaataccacgacgacggaacaggtggcgtggtcggtggtgtgggtgatgtaggtgttgggggcgtcggcgtgggaggggatgagatgttgatggatccgatggagagaatctcgctggatcaacaaattcaacaacaattggaggaacaaatgggtcagctggaaggaatggatgagtagtccccaatctagacccttccttttctttcttcttcgagaacttttcaatgcgtagatggctttgtatatccttttctgaatactttcactaatttctcttcaatttactcttggcccattggttattcatctcttgaacccatctgagatgcctctttcctattctggcatctctctcttttgttcgatatatgtacgcttcattcaaacggcttcactatcgattaaaaattcaaaacagcaccgtttatcttcaacggaagaagattatggattagaagtattcgataaaatgaaacgaaatccaacatgcagggatctattgagaagaaagcttagagagcggatttgacgttccaatcgtcgaatccaaagtcggttcctgataacgaaaaggtaaccaaagaaaaaaatccgttcagcttttgtatgctcgtcccttctaattattttaagagcaagctgaaaaggaatcttccaggagagaagctaagtcgttgaagggcaggaggaagaaaacgaaccccagtcaggcttgacaaatcgatgttgtttcccaccctttcctgccagttcatccaacacgttcatatcatcctcatcgaattcgaccgtcttcaagttctgctcgatcctagagggtgtgactgatttgggaaggacgacgagtcctcggttaactagatgggaaatccgttttattatcattattgttattattaaacatgtgaagcgcaagatttgagcggacgaagtggcaacgatgagtttttggaaaatctgaacaaaagaatggaggaaaggaggcaggaaacgaacgctggtaagaaatcaacactgtgccgacagacacgtcgtgcttcttggcgatcttgacaatatcagggtcggagagaatcggagagtcggtcgagcctaggggcgaataagattctagaaggatgctgttgagagggggtagaagggaacaagacgaagaatattagacttgatgacatcagatcaaataaatcagagacagacatactcgttgtccttgcagaacttgactaattcatgctgagggttgtaagggtgaagctcaacctatatgaaagataaatatcaaggccttctctgtcagtccaacgatcgcccgcttccatctccccgcacttgttctccaagttatattaaacggaggtggtctgacctggttgcaagctggcttgacagatcctccatcgaggatgatctgcagattcttctgagaccagttcgagacaccgatagccctgcatgccagataaattgaccgtcagagcatgctcacgcaagaaactccatgtatgacacatgtgataaaacatggcgcccatacgtactttgcctttccgctcttgtagaccttctctaaagccttccaggaatccaagattgtccagttctcgaccgtgtccatcgagccgtcctctttctttggtacgttcgcgggagagccattagggttcaaaggcattggccagtgcaaaagcaaaactacaaaccgttcattcgtcagccatctattcgactgataaaccgaggtatccgcgtcgaaaataagagcaaagcgactaagaagaatcacgtacgatcgacatagtctgtaccaagattcttgagagactcatccagcccttgatccggtcgagtgtgataagtgcaccaaatcttcgtggtcaagaagatggacttcctgtccaccccagaagctttgataccttctccgactaccaaaaacaaagccccatccacttgtatacgtcagtcctgtctcgctctatcccaggcttgaggcatctatagaagatcagatcggagggtttgagaaaatggaccttctttctcgtttccgtagatccaagcgccgtcgatatgggtataacccgacttgagcgcgtgctcaacggccttggcaacttctccctgaggagatttccatgtgccgagaccgatggcagggatagtcgttccgttgttgagcttgtaatgggtctggtggacgggagaatattcgagagaaagtacaagatggaggtggatgagtttgagtagagacaacaaggcgaacagattaaaactgatctgcctacctggatggaaggcattgtgtttgggtagatgaagagctatagatagaggtgaaaagaagaagaacgaggaaaaggagaataagaacaagaagatggagatgggaatgaaaaagaaggaaagatcagtcgatgtctacttaaataagaatattgagccctccacctatgatgcggcaatagccggtcacggcccaggggccccggccgaaagcttccctcgtggtcgctcggagaaataaatagaacactagctcagatctagaagggtggcaacaaacatagtataaaccggtacaaagatcgattgaacgttcagatcgacaaatagagacaaacagaagaagggtacaaaaagaagagggggagcgagaaaaagctgataagggcaaagaacctcgccaagtttacaaacattggtagtagtaatactgagatcgtgggagaaaagacaaagagtgaagttacaataaaatctttgctagttcaaggagaaagaataaaccgagcaaagtggcaggaaaagaagtggaaagaaggaagaaaggatgatggagttatcggtagacctgaggtatcatgtcaaacataggaaatcaataatcaaagtcagttcgcatcacagggtttgcttgcctcgaccacgtcgattacgttggggaaaagcacatacgtgatcggctctcaagttggctgcaagctcagcttccattctgtctccgttctctaacagcttctccttgttgtagagtagctcttctcgggtctcggtcgagtactcggcgttttgtgctagtttgaagaaagaaaaaacattgagcaagcacacacgagtgaagatacgttgtcagctagcagaattgagagaattgaaggagaaaggatgtagcaaaatagacaaacattcaacaatagcgtccacagggcaagcctcctggcagaatccacagtagatgcactacaatccaaaccaagatcgaaccaagagcatgttagtgttggccaagtacaaagaaggtttaccagtacgctagagaaagaggggatcatgcatcggaacacagaaacgtacctttgtcatgtcaagatctatcagatagtagccatacccgaaccaatcacaacgacaaaagaatcaacatgcctgttcctacaatcaagatacaagaagatgacggaccatatcgagtggttcgtctagatccatcttctcggggctctgactcgatagtgatcgcctgagctgggcctgggcgttttcgaccaaaagtatgttcctcatggtcgatgagttaatccattctaacggcaacaacggttgtaaggaaggctgtttagacttacagatggcctcgcaaagcttgcaagctggtaaatggcgatattcaaacgcggaatgagtctacgtgaacgcttggggaaaggcaaagccatgagaatagaggaagagcctaccgatgcatcgctcttctccggtaggatatcgcctgagagcgtgttcacctcggaatcgaggagagatcggtcctttttcgaaagggctggaagagaattgccaacaggtagtcgtgttagaatgagatgacgctaggaagaaagaaagatgttgtgcaacttactacataatggtgtacggctagagaagaggacagaggagaggaaaggcaagagaaaaaggtaagtcaaaaggttcgcgtagaccgatcgagcgggaggatggatgctatttgattcacgtacttctcctggatgattcatggaaggggaaaacattgttggattagcaaaactaggttgtagccggagtagccatgtggaaagacgtacggaacatctgctcaaaaacgacccaggcacctgtgatcacaaacagaaccgatatcatacgatgaacgaaacaagaagggaagttggtcaggtaaactcctcttgttcttctgcttttgttgtgttttcagcacatcgatggatgtaaagtcatcgagaacatgggtatcacgaacctcgaagaatcctagacacaaccaatgatacataaagcaacgataggttaggatcactctggaacaatatctgatggacatagtcgatcgagctagtggaatgagtggggaacttttgcgggggaacctccatcccaggttccaccacccaatcagaatggcagaaaatcaagtgatttccccagatcgcatcttccatcctccatatctctctgcatccactctggatgggagattgaagagagagatccagaccaaaatctcaagagctaaaagaacacagaaaaaaaagagaaaaaaactcactctccaaagaagaacaagtgcatcgacttgtccatcacacttagccccttgtcataatccgccacggggtgtacaccgtatccgactttggcatatccgggcacgatctcggttgggccggtgatgggctccttggaaggtgggatcacagtatgcacaattggctgatgaaggttcttgagaccggctcgactagcagaagaggtcaggaaggttcggcgaggaagctgattccagatcgatgtctggccaagaatagtagcagtggtggtggaagaagctcgaagagcccgaagagatgttctaggaagattgttcatgctgattgtacacctagtgctgttgatgtggatctgcttgtctgtctggatgcgtcttcaagcgtcgatatgtctgtaagatgaccggagagaccacagattgaatggatggagttgaggcaaagatggaagacgacgaggacgggtggttgcaggcagaggggccgcttatgtaagctatatcacgcggtggctacgcgactcactgtaaccaggcctggttactcaccctcccgctggctggctcgcctacgtcttttcggtctttgactttggctaatcaactctctcgacaatcgatcaatcaagcaacatatcaatcagacatggctcccaggatcggtcggacactctcggatttgctggcgtgagtattgctttgtgcgttcggtgtggttttggccttgttgccctctcggcctttgagaaagagggagagaaggagaaaaggcaagaaaaagaacagaggaagaagaagaacaagaagaaagatatactaagctgatgtcgtcttgtgctctctctctttctcgtttcactcggtgttacgctcttagcaaacttccccagaacggtttgggcgccaaggtggcacccgtgaggtgggctctcaaaggaacagccgattcatactatcacatcacctcctctcacctcgactttaccgatcggattgaccaacgcggtttccctcttcggatggtgaataacaagatcgtgcccgctgacgagacgtactctgctgttcgagcgaaggagcgaaagcaggcggcagaagagctcaagcgagctctccgagcaggagaacgagtccatcacgaggacgtccacagtctattgagagcgggtgctgaactcgacacccatcttgtcaaggagaacaacgcggtgctcaagccggccgtcaaagcatacggacactttttctggaaaggtaaaccctcccctctttctgttttgtctgtttgccttcgtggagctctgtagggttgactgactgattgactggtgtttttacgtcctttatttgtggtcactctgcttgatcggatgccaattgatattcgactacccctggcgttcttctttttttttctttttttnnnnnnnnnnttgctcaactcctcttttcgcctcctcctcctccgttgatctcgtactgaaacccaggcgtgttgaaatccgataacggaaccgatccgatagagatcacttcccagacgactaaatcatcctggcgagaagtctgcgacgaagagattagcctggcccagttgaaggtaagatagctatgtctgtttcctatatgggatccgtccttctgtatattctacgactctgtcgattgtcgccttcttcattttcctttcttcgttctgtttaaatcggctgatcctggtttgcgttctcaacgttcccttctcctttcttccttgaacttgccgatcgacacatccagcaatcgatgggtaaacgaacggcgaagggacgacgtaaatgaaagtagtccagtcgtggaagaaattaaaaatgaatgatgtttcccttgcttccgtctcttcctctttctcttgaccggccttttactctctgggttgtttcagcattctcatcccccctcggccccgatcattttgtcccctctctttccttgctcttgtcccgtttttcttgtctcctttttgcttcttgccactcaagagacgtcaaggtggaaaagaatcgatcaagacaaacgagaagagagaaaggaagagaaaagaaaaggcgcgccgactgaaagaaagaaaaaaaaaag

SEQ ID NO: 1156 - DNA, 3413 bp, Xanthophyllomyces dendrorhous
agaaagaaaaagaaaaagaagaagaaaaaagaaaaggaggaaaagagagaaagaaagagggatacatgagaacagaagcagaaaagaatacaaagaggtcaaccccggatggcgagatctcgccgtccggtcgcccccctctctacggctcggacgtatacctacagggctttcatcagggtatttccgttccaggactcgcccgggccgagcgtgatcagggactggatcacgccgggttcccagcagatgaaccttagggatcctcctttgtgaaggtctgggatctcgatctttgtactcgggttccagaggctatttgtttgaaaacagaaacatgaaacatgaaacaagagaggataggtcaacggctagatggcaggatgagatgaatattgaaagaacctcccccccagaagaaaaacaagaagaaaaagaaggacaaacactgaatccgtccaatcaccctgcacgtcgatctggacgccctctccctgtctgtctccggtatggccataatcaaccctgacggtcgacgtcttttcctccttcagatcgagatggtagcacctcgcgatctctttgtcctccagctggatgacgtccggggtggagggcgagccgggggtgaaggagttgtcgagtcgggatgtgtacgggatctcgccgagtggttcgatcgaggctttagctatctctgggactttgaaatctgttaccacgcgaagcaaaggtcttttcgtgagaatggggacgagaacaggaagaacaacgacaacgacaacatcaaagaaaaacaaagagaaaggacgaaacaaacaagtatggagacaggtgttgaacctgaaggattctttccctgggttgacgatcgtcaacgcagcatccaacgtgaactttgtcagcgtcagcttgtaggacaacttgaagtctggccggaacagtttccttatgtcctcattcgggcttagcgctttcaggtccgatggggcatgatgagaggaagcgggatgggcatacaacgcgtcagtatctgatgtggggaggcccgttctgttgtcaggtaatcagaggaacgaagagagaaacggacagagaatgatggacacggaatctgaagtctcggactgatgtactagctcccatgggttgatcctagcgaacccgtgaggtccaccctttgtgagtgtgaatccatgcgcgtgcgcgcgagagaaagagcaaagaaatcagaagaaggtcaggatcgaaaagaccgagagaatatatatgagtgtgtgtgtatgtgtgtgtgccgtacgagatttggataatctggatgaacgtcggtcgcgaatataggaaaggcaattggaatcccgcctctgatctgaatgagattgaccgaatcaggagagcagaggggagacccctatctagattagcatgtccaccaggatgaatttggcaggatgggttaaataaaggaaacttgcaggacccgttccgtccaagatggcctctgcacacacgcacacacgcacgcaagagagaaatgaaccaagagtcagtgctccaaaaatcaaacgaacggagcgagatgaaacctgaatcgtactgtcactcataaagaatctctcctccacaggcgccccgttctgtccaggagatttccaagaaacgacatgtgctccgtagaagctggatgtatggaagaaggaaggaagagaggggagttttgcatgctgtttcttatttgttcaacggttgacctgtgagagagcggagtgggagggagggaaagaaactttacgaactagatctcggcggacgctcccttttgattattaaaatatatataaaaagaagaggatgaaccgaggggtttagatatcatcagtcaagaaaatgagatcggtaaggacgagcgtgaggacaagcgcggggatgaccgaacagctgaaaaacgactgacatccttctcgatcgtgatgatccttccgtcgtgcgatatggtcatttctggggatatgtattttctttcctgttctatgaatacaacaaagatgtggcctgtgatgatgaatctgagaatatgatggatgggcaaaggaaagaatcgacagggtgccgtctctttatacaccctagaaaagggagggattgccggcccggcccggcggaccgagggagaaagatgagacagccagaggagatttcctcgcggagaaagtgtgggcaatggacggttctggttctcgatctgttctttcgtgtgtgttttatgagatctcaagaagatgttgtgggctcgtcatcgataactgcatcgtatacgtcgaaacgattgtctgtttgtttgtttgtttttttcctttttttttctttttaaatttgtacatatatcatctttctaccggcgaatgccgaggagtatgctatccgtttggtctattgggtatcatcatcgagccttgcgaggagtgagcctagacgccgacgacgcctggggcggaagcatcggccacgacggccgtgccttgtggtgtgcttgcgagtttgacgttgttggcgaacccaccggtggatccgaatccgcctgatcctctggaggtctcttccaggctcttttgtatgtgtgtgtgtgtgtgtatttgggggggagggaaaacaaagagatgttaatcgtgtgtagcaggaaggtaaggagaagaatgcaaggaagtcaaagcacaggaaagaaggagaagaagaagagggaagaagagaatacaagaaaagaaaggaccgacctcgacctcgaccacggcactgtactctactttttcaagaatgagctgggcgatccggtcaccttcgctgatttggaagtcgacgtccgagtggttgaagagcaggacgaagagcgtgcctctgtagtccgagtcgacgacgcctgcaccggtctcgatcgagtgctttgcggctttgttttggggcgtggagagagaagtgtgtgtgggtgtgggtgtgtgagcagagagtacagagaaagaaaggaaagaaaagaaaaaagaaaaaggatggaaaggactgacctagtccactccgaggagcgactcgaccgtacgtgcctagggggatggccaacgagagctgggtgtcgatcagggctttgcctcttgccgggatcacgtttgcctgtgcgctgatgtgggcggggagatgaggatgaagggtgaaagaaagagagtgtgagaacggtatgtgagcacgaatgggagagacgatagagagaatggaacgaaagaggtacgacgacaggaacatggaaggctcacgagtaaaggtccaggccggcagagaagggagaacctctggtgggaagggtggcctttggggagagtctcttgatgagcagctgggatgttgtggcaggggcagacatgttgggg

SEQ ID NO: 1157 - DNA, 1373 bp, Xanthophyllomyces dendrorhous
gagagagagagagagagagagagacgtgagaaacaggacagatacaagacacacacacacacacacacacacacacacacacacacgacacagtcacagtcacagaaagagacgagctaagggggaaagtgagagaaccaaccagagggggccactacaggggggcagggggaacactataggcgggcagagggagcactacaggcggagagagggaccgggactatgcgagtacgacttgactgtgactgtgactatgtgactatgtgactatgtgactacgcgactacgcgagtatgactaggacagcaatgacaaacactggggctacgaaaaggaaaagatgccgcgggtttggaaattttcgcctgttgtaatttttttcttttgtttgattagaaccggcctagtctttttttgtattggctgtgagtgtactgtgagtgtactgtgagtgtatagtgttagtgtcccacttttgtagtggccttctagtctaccactccaccgccccaccggtctaatctctcactgctctgtttgcgtaatctagtcatcaatttttcttctactctccctctcttttctccactcggctctttctctgctatcgtgtgtaatattcattcgaatttgttctagtcccgattatttctcctatttgtactttcccgcgtttgacaattcactttactttcttactctttcctttcccttccaactctttccttactatcgctccctactctttcttgcctactcgccttccttactatcgttccctactctccctctttgtattccttcgtactcttctcgtctctctcgtacaatacaaacaatggcaaaggtgcgttctatccagtgtgcattccatccatccatccatccattcattcaagagcagcttcttttcttttctttttttctctctctccctctcattctttctcactcactcactcactcactcaccctccctctctctctctctctctctcgcgggaaaatttacctttttttcttcttcttcttccctcgtctgacccgcctcccttcttttttctttcttcctcctcttccttgcacacccttccgacgcgtctctttccctcttccattcttccattcttccatccacccatccacccatgcactcacatactcactcacacacacacgccacacaacaaatagatgtccaaagctagagccgcagcgaacgaggcagagcttgagctcaaacgacaacaggtatccccatccccgttctttccttcttgcttgcttactttcctatccatggccttgctgacgcgtttcttttttaccgcctctccctcctttccttcctcgccctttccttcctcgcc

SEQ ID NO: 1158 - DNA, 903 bp, Xanthophyllomyces dendrorhous
gccgcgaccgcgttgagaaacgcgtcagactccctccaggccttcgcagagaccaccgcgctcgtcgacttccaagacctccaggccatcctcggcacgctcaaacacgcctccgagccagaactctccgcggcggaaaacaagaagcgaaagcgaaaggaggcaaaggccgcaaaggacccaaacgtgccaaagaaaccgtcgacggcgtacctaacctaccagaacgagatgaagacccaggtcgtcgaggacaacaaggacaagggcttaaagtacaccgacatccttcgaatcatcgccgacaagtggaagaacctgcccgaagaagccaagaaggttcgttctcttgttctttcttttccttcttttcttttacattgctgatctaatttcttactcatcttgatctcacttgcgtctctcctcgtctttttctcttacttcctccccctccccctccacacacatacacacacacacaggagtataccgacaagcagcacgacgacatggagacctacaaggcaaacctcgcaaactacaacagagccaagaaggccgtgcgttcccttccagttctctctctctttatctttcctctctcttttgccttcctttcctgacacacgctctctctctctctctctccgcgcgctcgctcaggccgagggtggtttccctttggacgatgccaccatggaagtccccgaggaccaggtcgacgaggacgacgaagagatcgacgagatcgaccaggcccaggagaaatccgattcagagaccgacgaggagtctgtcgagtctggttagtttactttatatgcttgctttcattccatctctctctctctctatctatctctgtgttctcaccctccgttctaaaaccgttacaccttc

SEQ ID NO: 1159 - DNA, 470 bp, Xanthophyllomyces dendrorhous
tcttcacagagcctgaggaagctcccaaggagcctaccccgcccccggtcaagaagcaaaagccaagctcgaaaaaggcgacgtccgccctgggttccgtcgtgagcgccctcgccggagccgtcgccggcaagccagatgaagatcacgccgccgccgtggccgtgaaggagaagaaggcaaagaagaccgaaggcaaggagaagaagaagaaggcagagtaactctttgtcttgttttcttttcttttctttgttcttctctccccctcctttttcgtctctgcccctcttcttcttttactactactactactactactactactactattactactactactacgttttcttctacttcttcttcttcttcgtcttcctcttttctgggatctcgtctcttgtcatttgattatcatttcactctcccctttacaagagaaactcgaaaccctcgatgttcatagc

SEQ ID NO: 1160 - DNA, 6446 bp, Xanthophyllomyces dendrorhous
ctctccctcccttgtctttgtctagtctcgattcgatccggttcgattcgttctgtctcttgttctctctctctctttcctgcttgtcgaatagtcctttttttctttccttttctctttctctctctctctccccctttaccatcttgtcctgtcttgtcttttctcttgtctctctgtttgtttctgtcatcagatgttataagaatgaagccttttttgaacaaagaataaagatgacaaagaaagaaaagagcgcggtgtctcgacgagagaaagcaaaagaaaagaaaaagaagaagaaaaaaagtacaacgtcatatccacatcccgccttggcatctccatccacatccatatccatatccctttcagaaaaacctccaccagacaaagatgacgatgaaaagaccgacgaacccgacgggcgcgtactgtctgatcaacaactccagatttatattccgtgcttgtttcctgtatttcatcgattccgaccggagcgaggtcgatagagtggacattcctatatgtgcatatgtgtatgtgtgtgtgtgcgaaagtatatgcccggctggctagtcaggactaattcttcctccttctttcaagatcgtgatcaaggcagaacgcggagggagagagagagagagagagacagagagggcaaacatacgatctagtgaatccccacgccagagaagatcttccatgttcttcgacatgatcctcgtcacgtcctgtagctcatcgttgatcctcgtcaggtttcctgtctgtcctgcacccgcgccgagcgctgctgccgacgacggtgtcgttgctgctgatgatgacgacagagaggcagaacgggaatctcgatatgtcctagctgtctttgacatgaacgagtctgagtccctcccgtcgcgcacaccaacacacaaagaaagaaaaaaagagagagagagagagagacaaaaagaacacgcagacataagcacaaaaacaccaaaacaagagccgcgcaagagagagacataccgaaaccgacgaaagcataaggtctcgtcgtgttatccaccttgtccccgtagaccttctggaactcctttgcgcattcgtcaagatacgcgaacgccagcttccgggggtatgacttttcggtgatcaccaggtagatcaccgagcacaagatcaggtagctaaacaagatgaccaggaatgaatagggaaaacggaaagataaaaaaaagataaaaaagggaaatcccccaaaggagagaaagagaacaaacagcctttcagtctcaatttcgcttctcttctttcctccctctctcacctctttcctcctcggttcaaaccaaggacacagacttactgtagggtgtacgctccactctcgatcgagcacaccggttcagagttcggactcaaccgacggacgatcaatttcgcctgttgcttgtgctccgtcagcgcgttctccgtctatatcgttccagacaaccccgtcccagaccaaaagtaagggcgtcagaacagaaagaaccggcgagaacaaacaaaattccctcagcctgggttcgttcagtctggaaggttgaacaaaacaaaacagaacaaaaaaaaacaccccgtacttgttcatcatccacactcgatgccaatggaagcccgtccgagattcgatagatgttggtagcctgaatcgaacagagaaagggggtggacgccatgccaagtcgtcacaacggaggtcgacggaaatcagagtgacgaagatacacaagcggcagaaagaaaagcgaccaaccaagaccatgaagatgcttgtcgttatctctttatgtttctgtccttctgatgacctatccgaccgagagtccactgccaacttgtgagatgtgggtgtggattgcaagccggccgggcagagtgatgtttccttctcccccgccccttgccagcgtaacaatagttagggttaagtcgaatggcgatcacatccagtcacatattacataagcagaaaatcccttggaccttgctcttactttccacttctcagtcttcctcgccttggctcaacgacgacgaccattcacccttgagagcacacacacacacacacacacacacacacactcactcacacacatacacacacaagcacatacatacgccgtctggctctcttcttctcgattgatcatcattgggttgtttccaagtcggtgtctagtgcaaaagattggatcacagtccgctaaaggcttcttcccagctagtcaccaccctcccattcatccggatcctttttttttttctttcttctctcgtttctccttcctctctctctcttgtgtgtcttttccctctgtacagtctttttttttgttcttttttttaaaaaaaaaaaccttgtccgctgttgaatcccttgttccaaagcgaggaaaaagagaaagatctcgaggaataaacaaagaaattagcatagtagattaaaacaagatggatcctgcttctcaatccgtgctggcattatgtaggccaggctctgatgaactcgcctggttaactgaacaactaaggagcttccccatcgttcgtaacccctcctcttatccatctgatgtccccatcctcctgttccgctcttcttctaatgtctaaccggttgctttgtaaattttggtccttctagatgcccggtcaagtaagatgctgtttccaacacaactcagttgaacgcacggacgagctttactaatcctctctgtccctctcttttttcgtcttcttcgccccctccaactcttttctctctcatgactgaacaatagactcctcaagcatacatccgagctcgagctagcgtgtgcttcccagatatggtgttgaaggtgcctgaaccagtagaggcagtacccataccggcaggtcagtttccgtgtcttattactgaccttacatggttacgcgtgccttgtgctcttctgcttgccgctctctttcctgctgctgcttcttctttctccttcttgctgctcttcttcttggttatggcaccgatctgtgttctcgcatgctctccgctcctcaccaaatatctgatggctgctatccgcaattgtgctcattcgaaaagagtcgctttctttccctgagatcataatcgagaagagaatccaatttcagcgacccagggtctggtaaccaggcgtgattttagggcgcagctctttctttccccaaagaggacccccatatctccgtgttaccaatcatgccgtctggtcgctcgtcgggttcttttctctctctctctcttctctcttctctcatcggattttctgtgtgattaaagaaaggaaaagaaaggaagaatattcaaaacaggcaggacacggccatctttcacgaacgaccttatgggcgttcacacggtccttgaggggtagcgcatgttactcgcgtgccaaagaataaaatcgtagcccccgcgcgcgcgcatccactcgggggttacgcctacaagcctcctttgataaggaaaacctatcgagttttctcctcctctctattgctatgattagagattttctacacgcataaattacaccacttttctcatcggctacagtcttttgagatcctcatatgctcatctctctgattctccgcttgtcattcttcagatctatccgctcagcctgtaggccagacaccgactgcttccgcgcctggtctaagcacggtccaacctgcgcctacatcatcgctccctgccaaggtaccggctgccgcgcccaagcctaaacccacgccaaattcgaattcgacaagtacgaccaaatccggctcttcttcatccgctcgtccttccagcacgtctagtaccccacgacataccgtctctccacctgcgacccctttaacgcctgccgagcttcaagcccggatcacacagctggtcaacaacatatcccgatcacccgtgccgaccgtccgagaaatcgtcgcccttctagcgccctcgccgccgacggaagctcctgcggctcctgcaagcctgcgcacagaattcctacaagcagcagcgaccgcgcccgtcaagtttttctcgtactggttggacgaaccgaacgcgatgggtctcatcgtttcctggttgaaaccgctgttgggcaaggaggctaggagctgggaaggcacggctctagcgttgctacagtttcttaaaaagcttgacatcaccgtgtcgcatctagtaaaatacaagttaggaagaatgttgacaaagatggtcgataacgaagtgctctcccaacgtgagtcgtcctttttcttttcttcttcttcttcttcttcttgtctccctggtcatgtcattctccagtgtaggcttattaaaatgttgatcatctgatataaaaaaaaggggtgcgagattcggcaaaaaacatggttgagcgttatcaaatattggtcgacaaaatgcaatctgctgccaacggagctgatgaaggtttgttctactactttgttcgtatgaattgagtgaaaactgacgagatctccttgaatccacctgttgattccccaggcagcaacaagaaacgtcggacgagcgagaaatcgagtactcctcttgctggcatagccaaaaagacaaacaccactaccaccaccatcaccaccactgctgcctccaagacacctacctcgaaaacatcgaccacacctgccgctcgaacgaccgtcgtttcctcgacgaccaagccgtctactaccgataaagcatggttccagaagccgggcccgtcggctcctcttacgttcaacaagaaatctgcttcttcttcctcgtcctcgtcctcggcaacgaaatctaatgcttccgccggatcatcgaaacagtcggacgtgttcaaacaggcgctctccctacttaaacaggccgaaccggtcaagcagaccgcaccgataccatcatcgacagttctaggaaaacggccgatctcggccgtcgaaggcgctccggcagaggttccggctggcagaagaaggagggtaacattcagaccggaatcagagttggttcaggtaaagttgatcgagagagctatctacgacggcgaggaggtgatggcactggatacactcgcagaggtaagccgtcacgatctactttctctaaactcgtttttttctctctcttaaatatcgagctccgtccactcatgctttttccttccttctcgcttgcttaattccaaaacaggatgtccatggtcatcgactcacagagctagatcagagtgaagggtcttcaatgaaacacagcatccggatctacgagcaggttgactggtttgagcctccaggtaagaattctttaattgtagatgctttaatgtctcctcgacgttccagtattctcactatacctgtggtttacctcctctttgtgtgtgtgtttccagacgtcgaactatcctcggaacctgatagtgtggcgacatatgtcggacaggaacgagagagtcaagcactcagagagctcaccgtgttaggagcaatgtacctcaatcctgttgacatcccaccatgtccgtccgaggcagagatcatcgtcggatcgacagaacagacgatcgagatcatggtcccatcagaatacgtaccaaccgagtcggaggaccccaccaccgccgccactaccatccctctcatccatccggagccctcgactctagccggatacacccctgcagaaccagtctcacaaccattcatccctccctcttcttcaacatctaacacagaaaattcctctcaacccagcgcacctcccccacttgcgttggcaggaatcgactttcaaaaattaggcgcactcgccgctagccttcaaaagactcaaacggagcagcaacttcagccgaataacaatgggtttcagcccggcccctctcaggagtacccggcttatcctccagttccctctcaggactacccggcctatcgacctgttgcgtcgggttctcaaccttatcaatctgaagggtcatcgtacagagggaacgaagaatcgatgtacccgaactcataccccaatcaaaattcatatcaacaccattcacagcaacaaaaacattcgggatacggtctccctcctccgagtgggatagcagacacgatggactttggagggagaggaaattcaagaacgttccagcccagtgaatcaatgtatcctcccagagggggccgaggcggaggtcggggtgggtcatcaagaagccagagactttgtagatattactcgaccggtcaacagtgagtgtctttctttctcttcttccttctctctatttatgttgcttgggcgaacgattaaaaacaaacaaacaagaatcttgatctgacgagtagatctttccccccccccc

SEQ ID NO: 1161 - DNA, 383 bp, Xanthophyllomyces dendrorhous
cccccccccccctttttttcttttctgatcctcaagttgtgtgcgaggcttgaattgcaatttcagtcatgacgaccctatagagtgatctccttatctttcttttacatgcatccttcgacttttactcgcattctctatccatcttgtagtactcttcctcttatatctccttctaatcctgccttttcattcggacgaagggcggtaacaatcagaaggaggaactcagctcaagggattatgctttcaactcatttgtttgctcgtaaaccttttttctttttctttctttttctttctttttctttctttttctttctttttctttttctttctcttttgacttttggaaaaaaaccaataatacccgggacaaatga

SEQ ID NO: 1162 - DNA, 31139 bp, Xanthophyllomyces dendrorhous
caaatgattttcatagttcttaaatccttcaaaagaaatccccgtatgtttaatgcaatgaaaactgataaactacgttctggatatcgaagaggaagaagaagaaaagcaaaaggacaaatggacgcaagaactgaagccggatgggatttgggtgactgataagtcggggatacgggatgagcgagaccgtcgagtagtaaccaaggacaaaggtatatgagataacagagaatgaagaaacacctatcatcggattatggtttaaggaattcagggttatgcgctgtacacacacatacacagaatcgaggaaaaaataaatggaaatgggaaataacgcagtctggtatctttgaaggaaaagagaaagagagaaaagagcccttgtttagacccaaaagaaagaaagaaaaaacaaggaaaaagaaaaaaaatatattattatagccaagagtccttcagtcaaatttaagcagacacatctcgcgagttaatggggaaatcgaaaatcaacggtccagccacagtgttctcgtcagagacgtccgtggcggcggctggtataagcccagagaaacaaaaaaaaggagtggatcagtaaacaggtcgcagtatcggtcgcagaagaggtgagaagagaacgtacaagcagtggtgatcacggcataagaagttccctgcagagtagcaggcaagacgacctcaaagttctcggggatggcaaccacagtagccgtcaggccggagtagatgatcaaattctcgacagctccggtggtagggaacttcaaggtgaccttgtctccggccttgtaggtcgtctgcacaacagtggcagcagggaaagccttgacgggcaacgtggggttggctatcagaccaatttgacgacgacgacgacgacgacgacaacaaccgaaacgataagctcatcgatgcccctgaagataaacgaagaacaaagaaagagaacgagaaaaagacgaactctcagggcagctggtaatgaacgcagcggcgattgagtaaacatcagagaacccaagaggagtgtcgtaaggtccgctgaagggggcctccttgaggacggctgagttgagccaggcctggtgtcgagcctcgacagtaaggatcgatccagcggcggtctagagaattaacaatgatcaaagcatatgcatacgcaagagggcacgatgagagtcctggcctggtgaaaacatcaatcaaggatacatagagaggggagacgtacaacataagcagggttggtgatcttgttagcagctccgaggtaggcggcgacaccgacattctcaatgacggaagcgagctgagagaggaaaaggtaatcgcgttccgagagatattagccagttgtctaccgcaatcggttaaaccagtacgtgaaagtcacgactgagcacggatagaggagaagacaatgacataccccaaggaatcccttaggaccggcagcatcaaggccaaagttgtacgtgcagggcttggtcgcggcatcacccagagcggtctggaggaaggcgacatgggaagcctcgtgctgaccgactacagagagtgagagagtgtgtggtcagcaagtgatgagaaggagagacgaagaaatgaagagataggggctgatctcactttgaacgactcgtcgtcgaacccagtcgggcaaaccagcagcctcgaaagaagcggagtcaaacttggacaatgcctcagagtagaaagcgttctcgaggcttatagtacaaacatggtcataatcatcagtgcgctatgcttgataatcgcaggctgttatagaagagattatacttactgctcaagggtaagagcatactgcaaaatggctatgagacagaataggtacacgtaagtacaagaagcttgggcagtaataaaaacgcagactaactggtgtcgatgttgtcccgctgtcggatggggccgctggaggcggcagcagcggcgaccgaggcggaggcagcgaggagagaagcgatgatagatgtagagaccatggttgtgtataaaagtatagtagcggttaagcgtgtatgtattgaaaagagtgtgttggaagagaaggaaagagtgtcagtggatagtcccgatatgtagagatattaagtgttgaggatgatgaagaagaaagagaagaagaagcggagaaaaatccagaacgatcagttgagtttttatagaactcgaggtctctccgagatgaatgtgttgatatgttttcgttcgtaatgtcaactatcaaaacattcaaccataggggccgaacgcttgtgacatgaagagccctgtggcttgaaggcggagacaaggagaaatgtccattcgccgtggaagatcaaaacaaacacgtccaacaagaacgattatggacatcagtcgcgtaagagttaaaaggctaaaacgaaggccaaagcgaaggccggtcgaggattgatcccagacgtaaccattagtgtagatttgtcagttgtcctaaacgccatcggtccaactctcatttagagtattggcgaccggcctccgacctcgatcagcagatggttagtatgtgatgttgcgttgttgttgttattgttgtcatcatcgaaggtactacttggcataatttgtttgagtgatgtgtaactaaggggtgcttagtcatcattatagtgacacgtgctatcggtcttcttggtcaattggacccaccgggcccatcggccccgtcgatcctgatgtccgtttggagaagcccaaggcccgtatgatgatgtaagatcgtgggaagcgtcgtaattataagaaaaagacgattcagatcaaacttaccttcatatgacctgattcttcaacaatcgtcaagctatatactctctcatccacattcacattcgtacaatgtctgaacaaggctcagaagcacagacagcacatgatcaacagccagagaagtattcgaatgacttttggtcaaagaatccaaaggtgactgctttgaggaaacagtatctgaagtctatggctggggcttgcatgctcaccattatcttcgcgtggatggtcggtcttgttctcttttttcttgttcttctgagaggcttgcttacgtgttctatctccgtcgttctttgtctcatttttgactctttggccagtagtgtctgcccttctactggtgagtagttcactcaagcatatgtttccttacatcgttctgaatcgaccgttcggaccaaaaatttatttttctcctaggggctcgttatggaaaacttcgcaacacatgtttgagctttccgcctgggtcgtcaatctcgacagttccaattctgtagcgttcgcggccctcgaaaatgctgttcggacagccgtagccgaaccgactcctcatatgggctggcagattcaggacgcaagccgcttcaccggcgccgaatttggaggaaatgtgacggaggagcttataaatcgtttactcgaggaggagacttggttgattgtgataggtatgccattcatctaagtctaatgtcagatcatttgtgatcaccttgccctgtcaactgaccgttccatcgtggatttatctttcctactccctccctgtcaaacgttactagttaatcctggagccgacgacgttttgctcaccgccagacagacagggaacgcgacctataccgttcgtatttctactttctggctttcagtagatatgccttagcatatggttcgctgaacaagattgtcattggcatgtccacagggcacctcggctgtctctgccttatacatgggcggtcggaatgagaacgcgtatcgccaagctatcttccctcagatcgtctccgtcatccaaccaggtagcgatataaattctgtttcaattcatacgtcatttctgctgcgctaaacaaggtgtatcctctgtgttttattcttcctccgtttgccaacgaatacagcgcttcaaaaagcatcagcgaattcaacagcatcgtatctcaaccaaaattcgggaaatgcaacagctattactttgttgactcaggcgcaaggcacaatcgctactccttatagcctgtgagccaagaccgttctttcgaccaagtctcttcaccaaatctctctgacaaatatattttcggtttggactgcctatgtctgccaatgtatccaggagccgatacgatctccgaccttttagtgcaacggttgcgactgccgtagatctcgttggactaatctacttgatgagtaagtcgataagaaaggatgagaacagctatcgggaaagaaaacttctcaactgagccatctttctatgtttctctcgtccgttcacagtcctcgctttcatccaggtgaattagattttgtatatatagcccctgtgtatggaaagagcgacaactaatctgttatcttgattctgttcgctcgttggactaacagaccatggctggagcatcaggatacggccctctggcgccatatctaaagtatagatcgctcgtcatgatgcgaatctttactcctctggtcagctatatctttgtagctttcttctacacgatgattgatttgtacgtttcattcgttacgcttttgcggtgtactatatctgaagaatagaaatatgactgaatgaagaactgttctcccggaacgggtgtttgtgtttcctccttgctccatttccaggcctttcaagcttccgttcggtgcgaagtatacgtacgcaggaggattcttcctctgtgagtcagagtccgatattctctttcccaaagcggattagggacgttgaccgtagggatctgctcgttacatcgttttagggtatgtctttgtatatatgggaatggcagcgctaggactagcaaccgaggcggtcgtcaccctggttggaccgcagttcatggcattctttttgatcgcctggatcatcattaatgtgtatgtctgattgtctctgtctttcgattcttcgccacctgcttgtgcgtacggctaacgtcgtgcttatccgactcgatcatccaggtcggaggtatctgttccgatccctatgaccggcaacgtgatctaccgaatcggctacgcgttccctttctacaacttgtcagatgccgtacggacgatcatcttcaatacaaagaaccggttggggcgaaatgctggaatattgatcgcttggataggtgggtcgtcgcctaacaaggggatttctttctttctttttttgtaacacaactgacccaaggttaccacttttcttcatcctccttcttagccctctcgatgatcaccattccgttgtttaccttgttgatgaggaggcgtacgcagaagaaagaaagccaggagagcaagaatgagaaggagaagtaaccaatagaaatcctcctcgacgcacacgatcgaaacgatcttggtatgcttgttttatttagagatttcttcttcgtgttacttttccatttcttatacattttcatctgctgtatacaccacatagtcttaatatagagaatattagaatcgtcgatattttatcatgtattttacaaacatgatgatccatagtttggagcgaagaagactctgatcgtcgatcggcccgatgggagtaaaaatacaccgaggaaaggacgatgacgacactcaggacggacgatcgggccgacagagtgatcgagaaaacgccataggggcggaaggaaaacaccatgaacgtcggggttagtaacctgacctgtttcactcggtcctccggcgttcgaaatcggcggccgatggacaaggaaacaggtcgaccgttcctcgaggattcacatccgaaagtcttgcccgtcactgtcttgcttggctaccttatttttgccttgatcggtccaccatcttatgcctgttgctaatcgatcgtttgcagcttgaccagacaaagacagactcgcatgtactcacccttacatcatctgcataggcaccgacagctgaccgactgagtggatgaaccagatgggggaacaaccctattttcagacaccatccttctctccctccgtcagaggggtgatcgtagatccagcaggtacatgtatcggaggccgaaccaactttttctccggacatgtatgctgctcgtaccacttgtccatctctgtgccagacagttcctcctccttttctaagccctagcccgtggtcccagttgaaacttggatgcagagccttccgattgatttgaattcaccatcggcctgaccggcgtgagttgaacagatcggatggacaagtgatcggtagtctgtttgaactctgtccttctcttgccagtccatacttccacctgaaggaggtggttctcctgaaggactcaacctcctccaaaaaacacataaaagccctctggattttggtcttcttggagatatcgttttcttctttgctcactccatcaacatctcttcaagacattactgtacactcaaaccacaaccgcttctactctttaatattcttacaaatatgatctccaccactaccgctcttgccgtcctcgccgccaccgccggacttgtttctgctgcgcccctggccccccgagcggacgacattgataccaccatccttcaatacgctctcactctcgagcagttcgttatgtttccatctcttcttttgtattgaacgagatcgatggtctgactagacggatatattgtccttccttcagcttggagaatgctttctattctgaggccttgtccatgtttgatgccgatgcgtttgcttcggtaggctacaagccttgggtccgagaccgagttgttcagagtaagacatccttcctcgtcttttatctcattttatctctatcttcatgttttgaactttcttctgactaattcttcatcttctctcgctctccgtagtcggtcagcacgaggcttcccatgtcgccttcctccagaccgctctgggcgatgccgcgaccaagccctgcaactacagctttggccttgccgcccttgaccctaagggattcctcggcgtaagtcttcacatgctcaacccatattttctcttgtttaaacaatatacaatcagagacttaccctagtctgtctcattgaacatacagctttcgagtgtgatcgagaacgtcggtgtttcagcttaccttggagctgccagcaagatcactaaccctgactacatcgtacgtccttccgctggtcttctctttctctaagatatgattactcacacccaacctttattctggcctctttctagactgctgcaggagcaattctgacagtcgaggctcgacaccaggcttggataacttccgtcggtctttctgctagcccttggaacgggccttacgataccccactcggattctccgacgtctactcgatcgccgctgcgttcattaccagctgcccagacagttcgtcatcttctattctttctcgattctgaatatgttctctttcttgcgcttttgactgaggccactcttccctcaaaaaatagccaacccgactttgcccgtaaaggctttccctgctgccaccgtgaaggagacttcgtacgccgccggtgacaagattacccttgacttccccaccaccggaaactctgaggctcgtacgttgatcttttctccgtctttacttcatttataactcctgttgtatctcgtctaaattaggcatttcgatcgttgttgctgacaaaaacatactccttggcctatattggcgttcttctcctcgtagttgttgtgtactctgagttgaagtcgttcttcctccctatcgcctcggacgagaccgtcacccttccagagggtcttcagggtatcgcttacggagtcatcactaccgccggtatgtctttccctaaggccctgcttctttgcctatctttgtccgtcctgattgctgaagagtgtttccttctttttgtttggctgtttaggcgccgccgccaatgtctctgatgagaacacagttgccggacctgtcatcttcaacttcggtctcacttcaactgaggtgtcttcttaaaaagaaaatgcggaagtcaagtcatcttcgcctatagttgtctctttgcctattcttcttctccttccttctctggacttttaatttaagatacgtatgatactcttgtacaactcttgggaattaattatttcattcttcacttcatccctctccgctcactttgctcaagtaagcgccgaatttaacctacggttggttttatgtatccatatggtatttcttgccgtttctgccgtttctaccttttcttgctccctcttgctttctcatatgttcctttctctataaccaaatctatcactgatgaagtggttagcctgatgtctgtcccttccctcttccctcatttgtttcgagacttcacagacgaacaaaacaatcgttaatacaaaaagagagatggagagaacatccattgagaagtggattgtcattgcagcatacgaaaacaataatcagaatcagactaaactaaactgaaaagatatgataggtgatgagatggggtgagagtaagttatcgaatattctagatatcaagactaatagatacaacatagtatgggaatttaagagaaagaaacaaagaacagaaaagatgaaggctacggaatacaaaagagaaggaacatgaaactcaaaccacagatttcgatctagtttcccttcctttgaaagaagaacttgaacagcccgacgatcccaacgacagactctgcatgatcaaatctagcgccctacatgcatccctcggcgtactcgggccagccgctggcgagaatgaagaaaccggtccgatgttgactttcgaactgataggtgtagagttgggaacaatctcgattcttgatctaccggcaagtaaggaagccagcttatcgtaatcgaatgagccacccgctttgagcgcagcagacgaaccgtatggctgatgtgatgtttggtgatctgttttctgcctagatgatgacgaggccgaattgccagtactgatctgttggatgaacaaaggggtcggaggtgtcaatccaggggtaggtgtgacaaaggcgtccatgaacgctttagaaagtcggttggcgatcgtccagccacctccaggggaacaagacgagggtgcatgtccagtctcgtctgttagagaatgctcgatctctttgtatggcggcggcggtggggcagagatcgaaggagccttgtatgacagcccgacgagaattgctccgagcgatcctgccggtggtgatgacggggaaggagtcaccgaggaggaagcggatgacgtccagaacgcgggctttaaaccagagtttgttacagaactgtttgctccccaagcttcttctctggccaaccgagtccacagctgattcttccaagcctcgaccgtttcgttccggacgccgaaaggcgtactatcgatgaattggtcaaacgtaccagtctgggacgtccctgtgggtaagttgacgggttgactcatgtggaacgggatatgagtgatcggagtatgatagttgaagagcggattgaggttgggttgaggggctgaggaggtcgtggcaatagaagaggaggatacagcactggtagtcggctgggatgaagatgatgttgctttcagttgggaggggtttaccgtcgtaccggtgaacggaagaggagagggtgtgttggtaggggacgaccctctaaggctcactgcattcttcaacgccatgatttctcgtctgaatagtagaacataaaggtattgtaaacaccgtgagatcgtcagtcgccagtttgacaatcacagatagaggaaaataggagaaaaagaaaccggacacagatgccctactcacctcagcgcttcattctcccattttgtgctacctaattcatctttcacagcggcaatcagccgatccctctctcccagatgtccctcgagagcggtgatgtaatcttttcttcgatttcggaaatttcgggcggatatcttattacgaagctgacgtttttgcttcgaagaaagcgtcttgtattcttccggactaaataaagaataagaagatagaatgagaaagagtaagtgacgagcaaatgtaagatagtggagtgcgaaacaaagaccactgacgagggtctccagtcatcatccggtcctcgttcttcaccttcttcgatgaccactcgactcataagatgtccacctgcagcccggcgcgcagtttgtttaaaagttttttgaggcatttcgatagatgcgttggaggcagacaacaaaggcgagtcggcagtcctcttttcagtgggacaatgaccgctatcctcgctctcctccccatcaccatcctcatcttcttcgctatccttggtctcatcctgagcctcgtggttcgtatcagaggctgctctgtccgtcaaacgcggtgacacaggttgtatcgcaggaggtgacggagaaaaggtgtgaggcgaactagtcaatacatcgtcgaggaacggtgccgagaaagtagccagttccgaggcattctctgcagggctctgaccagtgggttctgagacggcctgagatggagaagccatcacaagatggggaggaaagctcgaaggttgactgtcgccaggaagagaattcgccacggatgaaggcgaagtcgagacagaatcaggagaggaaaagaagtttggctatttggtgttgatagggaagcaaaagaaaacgagatcatatacgataaagagttaggagtgtgtatgtgcatttgtgttgaggcggcagttgataaacatacctgtttaaagtaattttcccacccggtcaagtgagctgtagggctctccttagttggtagacagacagcttcttcggttgattcagggctagatgcagaatcaacaggcgagccagaaagctaagagaagagaaaggaaaatacgaatagagattgagcatggatgtgggcgcactgttctcaaaagcaatgctcaactaaataatgataacctaccagcacagaatccatattccaaaaatcgagcggtttgatagcgtcttccagtgatttcgttaacacggcttggagccatggctgataagacatgttgatggtatgatcgtctgttagtctttgagtgcgcgtcaatatgtgtctgtgtgagctatcgtgtatctgtggatcagtgtatacgagaaaagcgaaacgagatggatgatatagaaaagaaagagtactggaataagaaaaggaacgacagccaggtatttttctcttgccgagcgtacgtgtgtggtccggagaaaccgatcggactgccgccctcggccggggttctacggcgatgaccacgctcatacccgagcggggtgtccttacataagcatacacgtgaagtagttgaaaaaaattgggttacttgcaccgcatgaaaactgtagccagcttgtgtttgttacatctaacatcattacataattatctgcaacaagcgccttgttgattgaacattctactcttcatcttcttcttgaacatttttgggcttatttctccgatcctataaagagtagagcacgagcttcgctctcttcttcttctcagcaatatccattttcttcgtttccctttctctatcaacaataagcaagagctggctctcttcgttctttcaagaacccatcacattctttggtaagtttcttgatgataagatccaatcacctctataacgaactccactcattcatctgctattatctccctgatgaatcaagaattccattcagacccggcgtcacctccttactccctctcaaaccgttcaaactcaaacccataaatatcttccttgattatgtccaccaccttcctcttcctctcccttctccaggccgtcaccatcgcctcggccaagcccatcaaccgtcggcaagatgatgtgtctaccgcatggaacgaaacctcttcttggaacgagaccactgtgtgggatcctacctcaatcgagaacgctactgtatctgtcagccctacgacaagtgagccagcgagtgtgccctctgagtcggctaccaccgaccttcctgattctagcttgttctcgaacaagacgtccacctcggcgacattccctctttcagcaactaacgagaccgttgcgctgcccgacgttgtctctgtccacggaaactcgtctgcccttggaaattcttctactcccgaggtcacctggaacggcacgagtgtctcctacgacaacaccactgtggtggagtttggaaactatacgtttaccccccagaacatcacccttctttctcctgatatgactgtcaacattactcagccgttctatctcgagaacgctacgatctcttcggccaatggagcaactcagaccctcttgatcaatggaacggtcgtaactttcaacaacgtcaccggtaccttagtcatccctctcgctatcgacgtccctgacagtgaaaccaactcgaccgttccaactaactcgactacgaccacttgggacgagccttctgcatccgccacgcccgtctggaccgagccttctgcattcactacgtctgcctgggccgaaccttctgctactgtcgtcgcatccgagccatctgtcactactgaatactccgaggtttctgccaccgttgaagcatctgctccttccgcttctgctacagccgttgccaccgccgagcccacacctagtgcatcttccagcgaggccgaatctgagtctaccacagccgagtctgagtcgacctcagagactgaacagtccgcttccgaatccacttccggatctggaactgacgagactgacgagcctgctgctaccgttactctctatgttaccgagactgaggctgagacccagactcagactcaaactcagaccgagaccatatatcagaccgctactcagacagcaactcagacaacctcggtctttattactgagactgctgcactacctacgatgactctaggtcttattcctgtcgagcaatctaacggaccgttcgcatactcaatctcgcggtcttctgtttcaacttcctcctcagtcgacatcgctcccaccccgacggcgtatgttagcactgtgacgggtacggcgactggcaaagacacaattcctcccacgttgaccgatttgtccgtgatcgcttcactcttgcccaccagcattcccgcgtttacctacactcttcccggtgttaatgataccatcacaatcggagcacccctgtcatccgcctttgcctcggcttccgccgccccctccgcctcagcttctgctcttcccgattggacatccgccgctaatggaacccttgctaaaaacgagtcctcggttgtttccacagtgtctggagggaagaacgtaacggtcggtatcgtcattcccgctggttctaattggacagagcctgccgaaagctacgcaagcgatgctgccctgttgaacatcccattggcgagtatggttggttctgcccgaacttcgaccgagactgctgctgctacttcctcggatgcagttactcgaaggtctcaccgcacatctccttgggctagggtccgaagattccgaaattagatccgtcttgtcgctggttcgactgatcggatcgttctgatttctctctaatttactcctttccctctcttctcttcctccccttgatctgttgtatacaacacaacgctcgaccgtatccatctaggaccgtatcttttgaaaattaaacgtatctactgtgtcatctaaaaatatacacctatatatgttcattttgtagatcaccttcgcataagaccaagctagagcaagggaacgaacagttaacattcaagctgaaacttgcgcgcagccaattccattccccttttccccttattccttgttcctggttttttggttcaatctcctcgtgtttcctttctcgaggtagaaagaacggatgaacaacaaaggtgttttgagactttttgacccatagcaagacactcccttgagccagaatctcatcagtctttggtttacgtgctcagataccctcatccacactcgaaatttcgtcagaaggaaccgacatggatgaacaaggaaacctgttgaacaaatcactcatggccttgtcaacgcctccaaggaagacaggtccggcagaagggaaaaagaagaagaagaaaaaaacagagatttcggattttgagttaatgagagtcttggggaaaggttgcgctggcaaggtcagtcggatctctttctcgcaggttggttagattgcagagagcctaacagtttacggatctcgtttcgggatcgaaggtcttgttggttcgaagtaaggctacgccaggaggaaaggtctttgctttggtgagtattgctcgtcactcttttaatttgactgatctgcttctcgcaacccttggttgatgctggatctcattattgattatcagaaatctatcgttaagcgttcgtcctatcctatttcaaccaattccagtcctgttctacaggaaaactgaagctgcattctgctgtctacggaatttatgggaaaacacacacacaaaatagaccatgttctggtacatcaagagcttcagcatacgttgacagagcaatctgtgttgaaacgaatgtcgaaggagattcggaaccctttcgttgttcacctccatcactcattccacgatgctcacaatctattccttgttatggtcagtcagctcctgccgtcttcgttctcaggcaacaatcgaagattctttgttttcgagacagagtcagaatattctaatgtcctaattgtctaatattcatgtttcatcaggattttcatccaggaggagatttagccactcagttaggtagatggggcagatttgagaaagatcgtatgtaccttctgttctcgcgctcctttccgaggaggctacaatgaaactgtactgatctggatcaactcggtctgctccgatctcttctcacaggcgcacgcttttatgctgcagaaatcgtatgtcgtatttctagatcttctagatatcgtggacctcgcatacacaccactttcttctgacgtagtaattgaaaaggtcgaaggcgtccaagggctacatgcatcaggcgtacgtctctcttctccatcaaaccctttcacaagacaagtttggagttgataggtagatcttgtcttcatctatttttctccgttttgttggcacctctagatcatatatagagacctcaagccggagaacatcctgctcgaccaagctggacatcttgttttgactgattttggattgtcgaaaggtcggttctttctcaacgctcctttggatgttttggaacaaactggatgactgatgtgatcttgctttctttggtccaacttaaatgacaactcactctactagatttttccaggaaacccatttcgatctctcctgttaccctgggcgacggaactcttccacagttcgaactcaagagcgatttcaagtcgagtaggaaaagaccgagtggtgaggaacattatgtgggcgatggagcgctcgactcgaccaatactttctgtggtaagatacctggttttctctttctttgacgaccgttcggaaaagactcatgctgttctgatcggcgctgcgctgatttttatcgccatatcatgattgatgataccttaggcacagcagagtatctagtgagtcctacaaattgcatctgctcaagtttttcttatcaagaccggatgaataatgagtctgatcggttggattcggtaatcacaggctccggaagtcatccaaggattctcatacacgtataacatagactggtggtcgtttgggacagtactttacgaggtaagcgttcccttcctttgacttagattcagatggctgaacataatctcatgacacatattatccaactgatctgctcagatgcttgtaggaatagtaagttcgcctatgaattttggagatagaacggatgtgaggtaagttgcatctgacgaaatttcttgctgatcgtcttatgttgtgtccctttaagacacctttctacgctcctaatcatgtaaggcagaaaattgtttccataaacctttaccatcgtttgttctaaaaatggacttgtctttttgtgttgatcccgacaaaggcgaatatgtatcaccaagtgttgcatgacaagctgctctttccggaagatcgaccgtttgatcaggatacaaagagtctacttcgtggggtgagtccaaacccacatagagcttggttgaacctcttaatgacgctatcctttatgaccatcgctctttcggtactagcttttgcaacgtaatccagcgcttcgtcttgaagaacctcgaagtatgatttttggatttgtttctaatgaacgcgcgatttgagctctgacatctgttcgattgtcttgaagttaaaaatcatccatacttttcgatgatcgattgggaccacgtttatcataaacgttatatccctccttatgcccctccgacagatgtacgcacctttgtcgagtcttcttgagccaaattgcttgtctgattcgtagatctagctcagttgtcactgactctatcctttctttcctcttaataaggagaatgagaaggatcttcagaactttgatgagtcattcctagacatgataccctccgtagaggccgaagaaggtggcggtaagatttgaagcatgtatccatatacccgtctgataaagcgattgatacggtgtgattttataccctcaggtctcgccgccgctccgtcttctcagagtgcagcggccgctgctgctgcatgccttgacgatcgacaaagtcttttcgatggctactcttatcgagatctggacaccgccagtattgttcacgaagaagatggactcgtgaatccgtttaatcagtccagcacgtacatatcccgaacggatttcgatatagagtataacccggtatccgataaaggtgcccatatacccaccgatctgcaatccgtcatctgtaatcatggtcatattctggacgatcctacttcgcctactggttcttcatttttgtcaagtgaacagaggaaaggaggtatgccgttcgatcgttctgtcactctgtcagcaattggcttggttgcgctggctccatctgctgtcgacggactttgcaagtatcctgtttcttcagtcgaaggtgaggtcaatatgcctcgtgatattctcgtcggagaggatggtgatgaagataacgatgacgatgatgacgacgacgatgattgggacctgattgaaactcccaggccaggtctggcggagaagaatggaacgaaaggatccaccctattatctcgaggtgtagtggaccgatatcggtttggtctcatcaaaaggagaacttctgagtctctatctagaagcgaaaatgttaagaattttagccgagacggatctgataagttaaaaagctctcgaacgatcttacgtcgaaccaataatcctgagccggtaacaccttcctacctaggcactcctgcgccatcaaaggatttgttgtccgttgattcaagttcatctcgccgaggccttagctttcgaacaagctcattcaatcgtcaaacctctagctcgaccaacagaaacttatcggcgaccacagatcgtccacatagcttgatcatctcgacctcgtcattccgttcggatttcaatagatcgtcgagcccgagagggacacctttttccacgtcgaactcatctcgatttctaccgcaaagatctacctcgggcttatcgttgaagcgacgggtagacggcagaagcaccgttacgttgagtgtggatgaaaacgatcctttcggcatggcctcgccaaccagaatatcgagtggccaaaagatcaaaaagtattcgaaagctggatcagagaaggtgaagaacttgtttaacaagaattagacaagacgtgctttcgacgagcttgtcttgctcgtttggtcgttgtgtgtcttatgtaataggattaccacagatctgatcagtcttttagcccgcttcatgagatttcctctatgacaggtttcttttttcctacacacgcataccttatttcattcttggatccaccattgtatctattttataccttgttatgatccatatcatatcttaatgaccccattgaacctcatccttagaccgtttcctgtaccacatagcataccgtcttgttctttacgacgatagtaccctcttttcgtaggtaccttcgtttggtagtgaataagactattgttctcatgaaagtcagcgacacctgtcctgcaaatatccaaacgtatctgccagttcgcaatatgtctaccaaaacccgtatgtcggtactaagtaagagcaaagtcgagggcagtacctctcgacgaccagaatgaattagcaacgaagatgaagtggccgagtcctgtctttaattgagacatgtagagatctcaacagaaaatgagtttcaaccagcaataactagtcaagagataggcaaggttgggtgtaccaagtgataaaatacactggaggtgagttgagatccaagatttttgggaagtatgtcccattcctcttttttgtcgctttctcgttctctacattatttgttcaaggaagactggggagtcaatcaagttagtttggaggaaagagacggttagccagattctggtagtgagccgttagcctgtaaacggatcctaatgacttgtctgggatattgtattctcctagtggttcgcagggcgtcccttcccctttaggtctccgcaataccagtagctcccacagaatcctttctcaagatttgtgatagttccacctctctttcgctctttgtttctgctcgttgaggaagaggtaattgagaacagaagatcgtgattccataatccataatactccatccgcacaacccacacccaatccaaatgatgttttccatccctactttgattttctcgatcaatgttggttgaatcaagaaacagagagtgaaacccatcctgaagtagggcgatccgcttagtgggctcgtcgggactcctggataacggcctggagctcctcgatctttcgcttggatcggagaagcgtaccaagctgaggggagagaaagagaagtggcagagcgggtttggcgatagataacggatgggtttacacaaaagaatgaggggcagagtcggagataatttgaaagatagttgagatgagagtaaggaaagatagacgacagaggacaagaggggaaaagatcgaatcagttctgcaagctttcacatgtaccactgtctcgagtccgacaacgaaagaaacgcttggatttaacatactcgcttcttggtgagctttcgggccttcttgtccttggagtttcggaggagctccataactcgcttctcgtaaggagagaatccggcaacctgggaggtaaaaaattcattgggtcagatgttgtgtcctcaatcttccttccagtcccttccttctgtctctcttgtttcatttgtttttctgaacattcagggagaaaaatttccaaaaagtcgtaatcctctcctttctccattacaacactcctcccaatatgccccaactttgttctctcaaaaagacatagaactgaaaagaccaggaaaatgacaaaagcttacctctcggatgacggatcgaacgacgacattcttctggctctgggccccctttcgctgggaaggtcgggcaaccttggggatctgagcaagctctcggccagggaactggccgtatcggagaccggacttagtaggagccatctttacttacttgaggaggtggacaagagaggaaaagtatagcggcggaagacacagcggccagagctgaccaccgccctcgccggcatgggaattttttttcgacagaaacgggccctgatcaacgcatgataaatgaattatagctatattcaaatatagccacaactaagtctattattctcactactcgaatagtatctattcagcgcatcatcttcgtctagatcatctatagctcatctatagcgagcgaggggtttcagatacccaagcggatgttctgcagcgctctcggagaaacggctttgtgctagaatatattgagtatctgtgtgttatcatgactatcagctcgagggacattaaggagatagaaagatatacttccggcctatgacatccttgcccaggttcacacatcgtgcttgtttcgctcttaatgtcatgatccatacttcgctcttcataacctcgatcaatcgcattgtcagaatggaagatgtatcgaagataaagctgaaccgcttgatttagtcacattcgtacattctgatgttggatcaggacaactgtcgaacgtctgtgattgtgtgttgtgatactttgaacgaaaagcgtcgacagccttggatgctcattctcgaactaccactcccccacgctgcatcggcagagatgatgtccatcacattctcatgtttctgacgagcaccttcctttgcattttaaaagcaactcaattgtatcataacaagaatctcaattttcgtcttgtgcaactagctttccaccatcttcgctttctttcctctaatctcccgtatgtcttctctttgacatgtcaatacattcaagatgaatggaagaacttaagctgacattgaaggaggaaaaaagagattagatagatcaaaagacaccacaacaacagctatatcaaacccaaatttactgtgctactcaagccgccgtacccactcttctctgggaaccgagcgtcgaagagaacgcaccccggccacctctgccacctctgcctccccttcctcttgatgcacctcgcctctctcctcggccacgtccaccatcagcggcatctcctcgctcacctcctcgctctcctcgctctccggcggtaccgagcttgatctcgagcgccttttggttgttgtcgttcaagagcttagccttgtcagccaagttctgagcgagctgctgtacccgggtctgttctactcggtagaagacaacgactcggtcgatctgatcaagcgacgcaggtagaactccgttgtgaatcatcttggaaacgatcgaggtcacgcttcgcatcgagagcgagaatgtcgaagaaagcagggagagagaaagtgtgtcgtagaagggagcaaaagtgttgaggtaagttcggagaccctcctcctggatcttcttggcaagcatctcgttgatgacagcggcatcgccaagcaaagaccagaccttgatctgaaggatcaaatccctgcaaccctcccagtcggcgttctgcaaagctttgctggcttgctcgatacagttcctggtcgtctccggggcacccataaaggtctgcctgtcggcctgctcaagaagcttcttgaaaggcctcgaaggcaagcttcgaccgctctcgtcctcgcttcccttagcgagcatagggatttcgcaaagcatgcacgacaccaagaaagcggcctcggccaactcgaggttgatgtgcatgtggaaaggaagcgttcggagcttgtccgctcgctcctgttcgggagtggtctgggaaaacttctgagtggggaaaccctgggcgaggagctccttaggtcgttgggacgcgaagagctcaagaagaatcgatcggcactcggagatcaagcccattcggaaagcggccaaaccgagctgtacgatcgctcggttgtaaagaatttgggaaccctggtcggcatgctgaatagctccctggaggtgggacatcaaaagcatgtctcgggcctcgtagtatcggccactgagtccgtggtggtagatatgagagagcatggcccgggtccgggtcaaaccatcaccagacttgtaaaggtacacacacagcgtgtgaataagcgcagaaggcgaggcatcagctggcttgatggtggatgaagtgacagaggggatggcctgctcggcggcctgctcaaggtagaggacaactgggtcgggcttgaggtaaacgtgctccaatcgtcggaggacgactcgggatacgttctgctcaagcttgaccttctcaaaccactgctgagagagacccaagacagcataaagggcagactcatccttaagcctctcgacgtactccatgccgtgggcgtcaatccactggagggatttggtgaattcttcgtccaatcggtcaacaagagcgatcaagcttcccctgatccaaacagtctcgccctctccgttctgtccagcggccctctcgacccactcgtccttctcaagctcactttcaggaagaatttcaaccacctggtaagcaccgttctccttcactaaaagctcaaggagctcggtcaattcggctcgagcgctagtccagtcctcaatgggcatgtaagcatggatggaagggttgaagtcgaatcgggcggaaagaaggataaggagaattcggatggtagcgtaggagttactggcaacagatcggagagagttgaggatggaaacctgctctcgtcggtcggtgttctgataaagagaaaccccagaagacaagtatggaaatgaataaactgaaaagagaccaaggggtatcatagcgcccgagggctcttaccttctttcctctagcctcctgaatagtcttgagggtcttgaagacaccctccttggaaagatccagagactttccgccctttccaacagtcatgaattcctcatcatctccatcttcaccactggcagccttcttgctcttcttggccttgggtgctgggggctcatccgaggtcgtgccacgggtcgagagaaggtactgctgggtgtaggcctcggtatcctgaatgacagaagtacatgaaatgcacaaaccaggaagaaatgcagtgtatcagtttagatgattcgccttggaattgtaaagtaacggtagagtgacgaacctgcttgtagaggttgatcatatcctcattctccttgatggccttcttgaccttctgtttcataccgttgagagccttagcattggcctgcgagctcttcttggcagccgtcttctcagccttgagagaagcgtccacatcttcagggagagcgaccaaggcagtgatgaactggggagggaggtagttggtggttccgggaagagtggatacagcgagtcgctgaagaagtcggaggatcttgtcgaactctgttggttacagaccaaggagtgaggggacgtaaggcaaaagaagcaagctctgggtataaataagcatgaccaatatgattgaagagaaacttacccgtggcaatgacaacccagttcttcttgtcaccagtttttccggcattctcaatgctcctgagagactcgttaagctcgtcctctctataattgatacagaaaacaatgggcagttaatatcgttgttgtcatcggaatttggagaataatagcactgtcaacagccattgcgccgtctttcattcttcttagtaggtcgaaagacaagtctttttttttccttcgtgttgggtggcaacaacaaaaacaactggaaagaagtacaaagaaaagaaagagaaaaaaacagagaaaaatagaacgaaccgcttgtcctgagcacttttgacaaccttgacaccatcttcatcgtcatcatcatcactgctatcatcgctgctatctcctcctctcaagaaagcattggccttgctcttcgcagcgggcttcttctcattatcctcatcactcatctcttcctcctcttcagaacttgaatccgagtcgctgtcttcctcggaagactcgtcctcggagtcggtgtcaccagtggcaaacataccacctcctcctccggatttcttaatgcccgtagacttcttaggcttggtagaagaggaggaggaggcgagagactcagcctcggattcggagtcggatccaggtccagaagcgaagaaagacatctttgcttttttttcagttcgttgggatagagtttttcggcggaattgaatgagataggtctgtgagaaaacctggaggtgcctacgatatataaatcgaacgaggcagagagaaccgaacgggtggaaagcgaagagtttggggggggattgtgaccgtcgaccttgtctgaataaaaaaggtaaggaaaaacgaaaatcgtcaactttcctgaatcttggttaagtattcaaatttgtttggcctaaggttgtactaggtagccaccaccttcatactcccatgcctactctcatgcctactcttatacatacatctatactctcttgcgcacatacgaagcgagaagattctgatggcttgtgatattcttcatagactgaatttcagttcacttcctcagtacgcgcaatgagtagagatgggaatcagccatatagattgaagtttgagctgagaaaagcctattctttgcgttttgttgactacaactttgtcagattcttctctatgtcagagaacttggccagagagttcgctcatcctatccgcatactctgtccatcatataaccctcaagtcagaacgtccttcgtcgtttgatgggaagagtagtgaattctctacacgtgactgaaaagcggtgcaggtcaattcaagtcaccgttcattgatagacaactcaacatctcatcctcctccctcctctatccagccggccaccaaagagaggaacgacatcggcctggaggcacacagtcagactagctccttgtactcttttctactcaaacagattcggttttgtctcctcaagaagttcgatagattgctcctgcactggcccccttccttcctgttcaagacgatttctttctcatacaggcagatacagctctaccttttaggagcgtggtggtaatctgacacaaaaaactgtccttaccagaattcggtaactcttttcctgtgtatactcagtcgttatattctcctgaatcccaggctttgatctacaatcgtgagttgcgtcaaggtaacccgactgaaagaaaacaagacagaatataggagttaacaatccttcagggcgatctcgtccggttctatatctttccaagaaatatcactatcatgaactctgctagctcttcctcatcatcatcttcactcccatctatctctgtcaacttgagcaatgaggctcgtttccgaaactctggtcatatcaccggtcaaccgctctcgagcgctcctgaacccataagctctgaacgtatgggtgtttcttcaagtgagactgcaaatggctcatccgcccggtcaaaaactcgagagacctcgaaaaggttgtcgctcgtccagccctcttctttccttcctgttctgtccggttaaatctaaaccgccctgaagtctctgcctaacctctactctttctctgctgttcagttcaccctcaggccttctccccatctttcggtcctttctctctcgctctctcccaagatcatctcttcatatagccaagcttcagcgaacgctccgtacaccttggctcgaccaatggttcctcttgacatctttcttgggtgcaactacgttcttcatgatatttctccctatcttcttcttcttcggacagccagctgtaggaagagagcttgtcctcgtcctagcagcgggtatctacttctccagcttggtcaaggatttagtccaggttcctaggccgtcctgtccaccggctacaagattatctctgtcagtttttttctgtcagtcttgatgatctcttttgaggatggagaagccctaactttcattcgcaacgccttgggggatggactgcatgcgctgatagggaataccatgcgctcgaatatggattccctagtagtcattgcacaagcacaacgtcgttggcgatctactactttatcttcttgtcaagattcgaggtcgagagttcatggctgtggtttggaggaggatctggtgcgtccctatctcttcatttacatcatatatgcacaaggaagaatggacgttaacggtcttctcaatctttcttttattccagtcattgtgttcatttggtcgaacgtctgctttggtcgaatttattgcggcatgcactcgtcaattgattgtctcttcggaatctcccttggtcttcttctagcgtatctgaccgagctattccatccttttttggaagcctatctggtccaacccacagctcttgtcccattcacgttaatactcggaacgactgtcttggccggaatcagacctgaaccggagcttccttgtccttgctttggggacgccatcgcgttcttctcggttgcggtaggaacaagcctggcgagatggttggaaaccaaaatctcaggtgatcagtgggataccatcgggactgtagaccgttggagtgaggtcaaaagaggagatggaagtggaaggttgagtggatgggaagggtggctggtttgggggttgctgattggtgggaagtatatgtttggttcgtgtctcctttctgccttgtttttctagttcgtgatcaagaaaagccgcacagcaagcgtggtgaaaattaaaaagagtttctttcggttaccaggaatcgctgttatcattctctatcgactctttgccaaactgtctctgcctttagtctaccgtgctctcctcggcccatcgtccgactctgcccccgttcagcacaaactcctcacgactccgagcacaagtgccagctcaagtctgagcttgagttcaaacccgaccttaaatagaccatcaatccctagtcctgcaaggacgctatcgaccgaatcgaattcttcacatccagacattaatcttatcccttctgtcgttgatctcggagcattgaacgagcctgtggtgaagagtgaaccgaaagatcatatgcgaggtaggaccagtagaagagaatcaggtgtcagtggaggagcagacatcgtagtcgagggagaggatggggaggaggtgaagtggcagggaagccggtcgacaggaagccagggcgaaggtgaattcttgaaatctactcgcgaaggtccgtttccatattcttcctcttcctccctcttcttcttcttcttcgctttctctaaagtgaacgtgagaatcagtcctgacaagaaaaccaaccttcatttttatacatcgaaagttgtcacgaaggttatcgtctactctggtataggtttctttgccgctttcatcattccgttgatctttatcacttcagggatcggtctccattcgacttgatgtatatgtatattataccttgactctgtcgttatctgaatgattgttgtttcatcttaccaaatattcctttcttaaatctccgtacccctctctgtttggctcgactacgcttgtgccctcacagcagatcaagagaaacattcatgacgatcatgagtcaaacaacaacggacaattggaaacagagagcgagaagaacaaagtatatgatatagcatgtataggaaaccgttatttaattatcaaggaaaatgaagaacgacatcacgacgtcaagatttgacaagatgaaagaatagagacgcaaacaacgaagaaagaaagaaagaaagaaagatgtggcagaataagaaggatgagctattcctagctaattaagccttgtctcctttgacaaagtgcttgagcttctctccgatgctcatcttcttgaagtttccgccgctagtggacgaagacgggctagaagggacatcctcgtgtcgagtaccagacgagactcctcgagtagttccggtagtagcggagacagaagaaggagatgcggtcgtatccgtagcggcagcggaagtggaagaggttccgagaggagcttgagcgtggtgctcctcaggtggagcggtgaaaccagccgaagggaggttggacgtagcggtagcgggcagatccttggactcggatcggatgtcggagctagaggatgaaactgaatcctttggaacggaaccggttccaacttcggactttacttcctcgtcgcgctggggagaagagtaagaatgctgtaccggggtagacttggcatcagtgctcacgtactcggacccagagaagggcacagtagtcctggtagagacgtaagcctgagattcaggacccgtagtggtcttagtcgcaaacttgtctaaagaagagaaccaagaagaggccatgagactggatgaataaagtattcaagacgaaggatgaaataacagaaaagacagaagaaacttaccagagccgaggtctccgagaggttgacctagaccaaggtccaaagtgccagcagtgtagctctgagagatggaagaagactgcacagtctgcggctgctgctcgtactctcggctctgcgtggcctgagtctgataagagtgggagctagattgttggtggtggtgagcgtgctcgttctcccttcgactctcatcaaacttgagagagtctagtcgaggctcatctccagcgacattgacagggtgaccggtagcggtagagttcttggcggcggcggcgacttcagaagcaatcgttccggctaaaccaccgatatcggccaaagcccctgcaactctgggctgatcgccttggacgttgacagggtgtccagtggcggaagagttcttggcggcggcggcgacttcagaaccgatgccggagagaccaccctgaggctgacttcgggaagtggactgtgaatattcagaagaggaagacaggccggtagagttgtctctaggaagagagatcttgggctcatccccggtaacggaaactgggtgaccagtggcagaagaggtctgagcggcaacagcaacctcatcagcgatcgtagcagctaaacctccggctccttccaaggtgcctcggtctgcctgttcgggcgaaatctcgtttcggtatacgtcctgagtagatgcagaagcagcagaagaggatgggacagttcccgacgggttagcagcagagaatggggcgtttcgctctccatctttaggaacaacagctgtagcattgcctgatcaaacaaaagagacggaaaggatcattagaagaagctcattcggtcgaaggctataggaagcttaacaacgcgacgctgaacttactagtctgttcttccccaaagatgaggcctttcaagttttgcacaagctcacccacggtctcctcggctccttgcctgatccctgcgacagagggaatctcggtagtagccagacttcttccatcggtcttggttgtacctgtagggatgatctggtcagccgaaggagcttgctggtaagcttcggaagcttgggcttggatgtttcgagtagtgtcggctgtattctgagtcgcggatgatgtgatgtcctgggcgacagaagaggtagtctgtgctcctcgactcacggattcagtcgcagtgttcagccctcgctgggcggcgttacttgcatcctgagcaaactgctgggtggtagcggcagcaacctgagctcctcgatttgcagaagtagcggcagagctgaggctctcttgggctgcgacactagtatcctgggcgacctgttttgtttgagtggtggcagcttcaatgtgaggctgagcggcgtgaaagaggttctgtacagcatgaataccagtggagagagcagactgagcggttactgaagcggtgtggacggcagattgagcttgggttgcgagatcagctccggcggtggtggtggtagtggtggtgtcctgatggggaacggtgttagtcgtggtctgaataggatgttcagtagaagaggtagtgttggaggtattggtgtgaaggttctgtgttaatgatacggggacagcgtcttttaaacgacgtagggggaagagtgtgagtcataagaggatggatagaattgagatgctctcgctgaaatggaatatagtcactgtaagcagcctgcccaacctgagaaagagcacttgagatatcctggtagatagtggtttctgggacagcaggtgtagtgctggtaggaccccatcctccgggcaactcctttccaggagtgatgacggctataaatagggtgaagggaatgaaatgcatggtccggcagtcttagcgcacaagcatacacagagtagatcggcgaagaagacaagcgatctttcagatagcgcacgactcacaatcctgcctgaagtttccgggtcggtcgagagcttcaatatctgatgaatggctgatgggctgcgcgggtgcctgaccgcctacaccttcaccggaaagcgtcattccggtgaaggaagccgtgccagcactgatggaaggggccgatccagtgctggtagtggcatgtgccgcgctggaggtcgaggttgtgctgttgctagtggtctcaaaggcagaggtaggaggaatcacatcgggtactcccttctctccagtggcagcgaacggaccagggatgggacgagcagagtcaaactcggcctgagtgtctgccaacctggatgaaggtgctgattgtgtggggatagacatgtatatatgtgcgtgtgtgagaggaaatactaagggctgtagcaaggagaaacttggtgagatcagtgatggaagctggagatgaaggttcaagatgaagatgggaattcagagatggaaaagaaaagaagaactggaggcccaagcgtcgggaagatattaagggtgcctggctggcgtatgtgcctgacgttctcgccatctgctcgggtatgacgtaacgcgagaacggcccgacgtcactcgtcatatgtgttcggctggagctgtcagggatgtgacctgagtgttacacctcggtaaccttcttttggttctgttgtttctcctgcctcggt

SEQ ID NO: 1163 - DNA, 10796 bp, Xanthophyllomyces dendrorhous
aacccggaccctgacaggagctgcagtctcgtcacgtgaatacacagcttcgtgagaaccctaacaaaccattaacattttctccttctccgtactcactttaatacttctctcgcttgtttcctctataatctttattggctctgtctcgatactctgcctctctttgtctgtatgcacactttcaacttttggacatccttctggtcggtctccaagagctgacgtatccttatgttacttctcttttcagcacaccatgtccaccgtcgcttctggatccgctccggaacccacttctgagcccacaccaacgatcgcgctatttgcccgaggagtctggtcactctttcttctctggcctgcactccgactagctgtcgctcaggaatggggaggaccggaatcaaaggagaaacgactttggttcgcttctaccatcgtcgatgagtttgaatccagacacttgaagcattcgacctcaacccctgccctcactcctccttctgctactgccactaccagcatagcccctgtatcgagcgtggtgtcctctgagtcgatcaccgccgaactagcagccacctcactttccactctcgtccctcctccatttggactcgacctagacacgctgagtgacctgttgtttgacatccttctcgaagaatttgagacggataccgaagatggatcgaccgaacaaatcgcgaaacagctcctcgtcctctggtcggctgctgtcaacttggacgaatcactcgtcaagcaactggagattgaggctgagaaagtttccaagagcaaagttcaagcctcccagggagcgggtggagatgatgaggacgacgatgaggacggcagtgatgattatagtgatatgagtgagggagaggacgagagaccaccaacgttggtccctgcagctgtcaaggaagaaccagagatagatgaggacgggttcaccatggtcaagggaaaaggaaagaatagatgatgggccggctcggtgttgatagaaaaaagaattgttataaacatcatttatctcctgaaaacacacgcacacacatatatatatatccgcctcttcttatttttcttcaagactaacgacacatcgtattatagacccgaaagcttaccagacccgacattccttgaccaattccataacctttccgaatctttccctttccctttcccaatccggtctatcacttccactcagacttgacggcttgaatcccaacccaactactaccggtctctttcctccgccaccaccgggaccattgtcacgttgttcatcatcccaaacgatggccgccaactgagacacatacatctcatagactggttggagatcagccgtaggcgccgtccccatcagagggagcaacgttgttgccgggtgaggttgaggtaaagcagggagtagacctgtaggagtcgacagaccggtcggaggcagggagaccgttgatggaagtgaggcttgggtctgatatgagcgggaaaagtatgcgtgaaagagaagaagagtgaaaagaaaaggaaggacgagcggaaatgagtaagagagcaggtatattcagaaaagaaagaacatacaagagacccaatctttcctaactgagtgaccaagatcaagactctatccatgaaagcttctactacgatctccgttgctaaaccttgaatgacgaccgaggcctgccgagttcgtatcggagatggtaccgcttgggttgatgccatgttcttttctttcggcgttcaaagacgaggaaaggagaagagtgcgatgaaggtatgtgtgagaggttagatgacaagtgagaaaccaaacaaagcacgcatgcatcaaacatcccacccctgcgaacttctccaatttgtcttccatgattttgtttggaaagagaacaaacgtaatatatgatcaaatattcatagttcgtttttatcttctctcaatgaaaagaagaactgtatatagtataagtacatactgacgaagaacagtagattaaagtaaaaatgtatagatcttttatgttttaaattgagaaagagataataacccatagtattacaaagacaacagatttgagctcgaaaagaaccggaaaagaaagaacaaagagacaagatcgagattaaagatactagaaaggaaatacgaacaaacgagagaacgaacagaaaacataccaaacgaacagacaaaaaaaaccgaaataaatcagagaaagtggaagaaagaaagaaagaaatcaatgatctgtccagccttgagcctccgcccaagctctcacagctctcattgaccctcttcgctcaacgactgggtccagcattcgcctcaaaactcttcgcatgccctcgctgacctcatgagctgagtacagcgttgaacaagggtagaacatcggaactcctcctagaggcttttcgacctcgatctcgccttccaccgccgtcgacggcgctgacaacggcggcgagggcggtaaggacggaaagcaagtctggatgggaggcaccgcagtgttcggtcgaggagacgaaggatgtacatgggatgacgaaccgaacgggaggaaagtgggcgcagaagacaagagttcaacgatgggattcttggacgaaggttgagtacctgagggtatatggccatcaccgtcaccgtcaccaagaacgccaggttctgctgactcctcttcaggatgaatcttgactatctctgtctcttgagcctttctcaccgcccgcttaccaaacaggtcgcccagcctgaccttcccacctccactgccatcagctgccaagtcccacccaaccctttttccgtcggctgccacatctgccatgtacgccgcggctgctcccttaccgtgttctcttaaactacctcctctcctgaatgacgtgctcgatccgaatccgaacaaacttccttctccaaacgaagccgcccggtttcgttcttcccaatcccagaatccaccccgagcgacccagaaacagagctctcttgtcccgctcaccccttgatatggttttcgacccccgttgaggataacgtagagtgaggcccctagagagaaaacatcggacgggaaggatacctctgttgttcggagaagaagttcgggtgaagaataggatgtcgtgcctcctccgctggcaggaccgtctgctaaggtgtgaaacatcgagttgtccgattgggtctcgagagtagaatggaagagtgcgcttccaaaatctgtcagtcgaggccggagggtggcggtgagaagaatgttttggggcttgatatctcggtctatagggtgtgtttgagtttcacaaaacgtggtcaacaagacatacacggaaagaaagataaaccaaggagagcaagacttacggacgacccctcgggcctccaaccattctcctccgtatgccaactcgccaacccacttgaggaataactcctcagtgatcaattccggatgagatcgaacaaagccatcgattgtaccgaacgagcagtattctagtagtaacaccggtctgaccgatggagaatacatgtctgccgatgaaaacgtttcattgaccatctgccccgaatctatcgagtatgtcggaaactcggtgattgtggtcggatttgaggagcctgctgttgtcgccgccgatgacgttttcacagcaaacactgcacgttcgtcaaatccgtctagaatgttgacagcaccataacaactgacaagtcccatctttcccgaaccgatccacctgagaacctgtccttcttttctgagaactgcccgaccatcaacgccattctcagcgatcggaacttttgccgctgctaacgtccattcccgttctttgcccttactggaagaggatgggcatggccggaaagcagagagatacacgttcgagtttgcgccttgaccaagatgatagctagccgaatgagccagtcgaacagaatggattaccggctgatcctcaggttcgctcaggtcgagagcggcatatgggtagggagcatcccatggggcaagaggataactcgatgagtcgagtggcggcggcgagggagtactaagtactttcgggatagaaggacaggatgatgtacgttggttgaacttcggacgagcgaggaacgtggttccttgtttgcctgtagcgaaagagctgtcagtggctgccaagaatgatgatgatgatgacgacgtcttgagagacgcggacgcaggcggaggaggaggcgggggtgtaggggagaacattggtgtatcaaagaaagaagatgttcgggaggatgttgatgagccagacgcggtcttttggtgaccctttggttttgccgagggtgtgagagtgattgatggcttgaaggtgtttttggtatgggtggtgctagtgttagggctgctggtagtgctactgctgctgggactggaccacgtggcaggattggtccacggtttgtagtcggctttcgcgtgttccgggatgggaccacacgtcgagacatgatcgaccgtagaaatacttccatctagctctggactaatctcagaagaggacacatctgaccaagatgggaccaaacgcagaggaggtggtgcattcgacgcgggaacaactttccattgagagctaaagatatcgttccgggaagagggtgtgttgaccaagggttcaaagtcgatgccattcgactcaaaatctggactggacaagcctccagatgaagacgagcatccaaactgagagggaacgataggaggtggtgaggatggaggcgaggctggacgtgcggaggacatcgaagggtgtacggcgatggagagcggagacatttgtagggtgtctgagctagttgatgtacgataaacccgaaactctctgctctaaagatctatcctcagagaaatcaagcaccgaaccagacagaatctgcttaggatatcgtgcttgaatagaacggctgacgctatgtctttcctgggttgataaggatggtcgatggtcagtagaacgagagttaattaacgaatgaacgaagaatgaagaggccgggacggagtgtggcgggttacgggcttggctcacgtgtgtgcgtaaccccggccggcctcttcgttcagcctcttaacaaacgttttgttcaatgttcaaggaaatgagaacgggattgaagcgagaatgtgcgctgctgatatgagcacatcgtatgtcatccgggatcttcatcactgtcatacaagtggatcgttcaagaagtcagccaagaaaggatagactgtgtgctgatgtagatcacgtgaggtctctgtgaccaggttactctgtccatcgcgaatcccttcgagcgactacctgtacgtatctccacagcgtcgagacgatagagctgcacccatcatccatcagcacaaccatacctatacatattgtgtttctttctagatggatacagaggaagcaggaccatcagctagaatttttgccgctggcagatcagctcgtcaagtagatgatgacgacgatctcgaatatccctccgagcctctctttggccagccaaacgagagccaggaggtcaaacaggacgaagatctttagtacgtgtttctatctggcgatctgttctaattcttgtcagaaggtagatcaaatgcttatgtactctaaaagttgttcactcaatcgctcagctcgatcctcaatgtttccaaggatgcttcggtggacgtgatctctcaaagatgttcgtatacattaattgcccgctctcctcgacgtactcttcatcttaattgacactctgattgatacttcttaccttacttttttccagatcggtccctagtcgtgctccttcatccggacaaacaacgcaatccttcggcaaaattcgcagcagagacccaattcagacggatccaacgggcgtacgaaattcttgtggacgaacagaagcgcgcgctgtacgacactctgggagaggaaggactcaaaggaagctgggaggttgggttcaagttgaagacgccggaagaggtgacttacgttttcttcagtgctaaacttgtttgagcccttagagtatgcttgtacgttcgtactatgctcacatcccactttatattcttttcagatgagagccgagttcactcgacaggcaaatgaaaagaagtttctcacccaacagcgacttgtcagccccaaaggtaagagtcggctcccctcctgtggcgcttatcttgtgcacctttgctctgtatctgatacttgacatgtaacaaacttgcaggcgacttcaacgttcaaataaatgccgaatctctccttgctcctaagagcgcattctacggaccaagaggaccaaagaacgacggcctgctgactcgacttcgattcgttcatgcaagagggctgacgttggctcattctttccaggtcagtagtcttcctaccctgttcggatactcgtgttagatctgatcgaattttaactatgaattttcttctctcacttgttcactaccatcaatcaacaggttggcttagggcagagcacgatgcttgacatcgcgggaaccatgactcagcgtatcggacagaagcgagcggcaaatagactaggcggaacgatggtcggtacaatcaagcaccaattttcacccaggctttacaccgaggtccgtatattttcatcttgcgaaaggaggattctctgtaagctgtttggctcacgctcctgacttaatctttaggttagcgcatccgtcttgaaccccaaattattagctgttcgaaccatatacgaaatcgacgatgaaacgtacgacttgtttgacctttctttctctgtctttatcttcgttgctggactcatgttgactttttgtttattggtttcaaaaataccaacccctcaccagtgctcttgatatctctgcccgagcttttagccctctgacgccaccaaacattgacctcacacttacccgacttatctatcctactttgaaatcctatctcacccttcggtccgggtctttcggctatcgaggcgatgaatcctctctcactatcggtcttacttctcacctaggagatactttacctaccaacggatggacggccgagattgagtgtggaccaggagatgtgggcacaaatctggattggtcaaaggttgtttgggctggctgggagtttaaggtcggaggctcagctgcgctcagtggaggaaaggttcatctaagctgggcgagaaagatcacaaagttcatcaaggccacactgagtgtcgaaggtgcgttacatctttctcttctcttccctctgccgagtctatttgccaaatctcacaatctggctcgtcttctcataacgtgtaatgtacagctgaaaccaccgctggattaactctcaaactgcggtaagtcagatcattctcatctactttaaaaaaaaaagttcaaaggactttagcactaaaccattcatctcgactgaccatgctacaggctcttccgactcggtcaacgagtgactatcccgatcttgatcacaaggacacaatcccaatggctcgtcggtgcttttttggcaccttgtgtggctgttggggtagctcattatgcctggcttggacctaggaaacgaagattggcggcatcgtgagcggatctttcttctgttcgatcaccgtattcttgtttactaacatagatcttcctttgttttcttcttcttcttcttcaacagtcgatggaagcaactgcaagaggataaccaagagttgatcgagcaaatgaagcaagaggctgaacagacggtcgagatgcttcaacctgttgttgaaagaagaattgctgaagaagaaaaggccgatggttcgttcctctctccattgattccttctaaaacttgtattgtttcctttcttgggttcgattaatgataagagaaaaaccctttgatgtgtctatccatagggctcattatccttgaagcccaatacggcgcacttcagacgttctctgcccgttcgatgccttcctcctcccctctttcctcaacatccccagccccatcgtcaaaagacagcacctccacctctgcagactatattgacgtatcaatccctctccaagcactcatcacagattctcagcttgtgattcctcgatcaaagaccaaagctggtctactagggttctgggatccttgcttaggcgcgaagaaatcccttagggtcagataccttttcaagggcaggctgcatgaggtagtcatcaaagacagagaacctctggtactgcctcttcgaggtacgcttttcttttcctttctctccttgcttggctttttgtgcctcctgaccttgaaatgatcggggttctctctttttacagaacacgcaatagaagaacgataagttgatatcaaaatataacaatcacacaaacaacccataattatgaacaagataattctcatcacagactactcaatcaagatatctcgtaaacggaggtggagagatttggagaagttgaggagaaccgtggtcggagacatacacacgcgcaaacacggcaaagatagcaaagacaacacaaaaacagaaacaaaaacacagaggaaagtgtttggatgttcaccctcgacgatcttggtgatatttttactcttcctctttctttacttttctcatcggacgtgaaactggggtttcctcttcttcttcatcctcagcttcaagtttgaccttggactctgccttgaccttccctgagcccttttgtgtaggcttggtcttgggagctgctttcttagctttcttccgaggaggaggaggtgtcgaagatgcctctgactcctctgaagacgtttcttgagcggactcttcggtgtcctcttcgtcactcaattcagattcagattcagattccttcttgacagtctatgatcaaatatcaacccgttgagtttccccaaagaatgtgtgaaggagaaagagagagttgtaatcaacgatgagagccggtaaaatacatgtatgtacatgagatgctctatcatgaacagagggacgtactcttttcttcgatttcggcgcgggtttctgttgaggcttggccttggctttaggtttggtggaatcggattcgtcttctgatttaacggcctttttgtcgatatccagtgttatccacagatacacaaacaaacaaaaggctcagcaagtcaagagcctgtatcgaacaaagaaacataacagagacaaacggcgcgttttcgctctttcttgacaggttttcgatcttcatcgtcgctttctgtgatcttcctcttctacagagaatgagaatgcatagttgtcaagaaatgtaacctccctgtgtcttagcaaaacgaactcaaatcgatcaaaatggacggctactcacagtcccgctctcctcgccggtcttagcagtctccccgtcttcagtctctacaggtccgtagtgttctctaaggcgagcgactaatgcagtcttcgacccactcttggagatctgggcttcatccgctttctatgtatgtgaaaacaagaactctgaacagtattagaggttgttttgtcatgcaagactcgaggggctcttctctggtaagaggatcgcagaaaaacacgaacgtctttgagctcagccactgtgtatgaatccaatgggtcctatatacccgtggtaacagaagagcatcccgaggtacttggtgagccagctattattctttcaggctataaaatgtagccgggcatctgagaacgatcagaacaacttgcgagacatacaggtgctccaaagatcttgaaacctggaagaggaccgtaatgctctctgagccgagcgactagctcagtttttgaacctgttgttggtagatcttcttctttgcatttctatttgcatcatacaatgataccgtattgtaagaggtaaaacacacatgcggtttataatatgacagtcagatcagatatgttaatagtagcagaggtggaagaagggaaccaaggacccacagctttagcttcaggagtcgtcagctcattcaggggatcctgtggtcgttgaaaacgacgagaaaagaagcatgtcagacgatcatacgaggaagctcaagatgtgggatgacgagatgaagacgaacatgacctctagaagcagcgtcagcttccgcaactgagaacgcgccagaaagaggagaggagaagcagtgaagagagtgagaaaaaccacgctattgaatgaagactcaattatacacttcttactatggccgtctttccaggccttgtcgatttttgcttgatcctctggcctgttgaatacaaacagccatacgcgcaacaagactacgtcagcacgagaagaaaaaagaaggacaagggaagaagagacatcggagagggctcaccttaggtcctcatagccgtcgagatctgaaggctagattatacagaggttagtaatgtttagtgggtgatcacatactagccgaaccatcctgtgtagtcccctatcgacgtacctcgtctaattctatcggccggagatcaaacaacaaagagagacaatgtaagctcaagttggttgaatgagtacatggagacacaacagacgaacccttcttgatattggctatggttcttggcgagacacaactatttccgttaaagaaatatgttgtgtgtgtgtgtgtgtgtg

SEQ ID NO: 1164 - DNA, 6993 bp, Xanthophyllomyces dendrorhous
tgtgtgtgtgtgagagagagagagatatcagcgatcaggtcatctttacaggacaatatgatcggcgtcattgttagtctagtcaggatcaagattcatgaggacatacccccagtgcctgtaatagatatagaaaagagaaggaagagaaagagaagagcacacgttgatttaatttcaagcgaaagatatgaggagacaaagaagttcggagggagaaaatgatcaagattctgcttacttccaagccatgcccgtatggtccataatctaacattggagatacgttccggaatgatggacgaagcaagaacagatcaaccatctaagtatcatcctgatccaacttgttccataccgggtggtttcgaactaacctctacaaccgtctgtcatgtttcaagtccgacaccgagtgaaaagaacgccagagaaaggaagggatcaacatagatcggccttgttgaagatctcgccctatcaacgggagctactgaaaccaacatacgccaagcctgatctctcctttatcgatctttgagcctgttccattttgacagaagaaggagaaagggtttcaaccatcattgaaacaagttattctatcgcatcggacacgtttgcgggatcctacctgaacatggtttggggcctagtgagtaagacaaatattccacaaacaaacagcaaggccagagaagttgattgttaaggtggtcatgttcgaaaagatagcgaaataaagacatggagtcaaacctttgcaacttgatcggccagtagaggcataatcgattctacgaggagatcaaaccaattttgaactcgggtgaggtaggtctaacgcggaatggatggaacaaccaagaaacatgaacagagctttacctgtaaggcattctcttcttttttctacgaatgagtgagtatgtgtgatctaactttgctttcttttcacgagtcggacgttcgttgaaatcagatcgttcagatttccatcaaacgactcaatcgaaagacgcgtcaagaatgtttgaacgcgttagatgagcgcgtgtcgtcatattgtgcatagctcacgtgtcatcacgtgcgttttttccgccacagaatccacaaagtagtctgccatctgaacgagcgagctcttcgttcaatggaacaaaacaagctcaccctcacaaggaagaggaaggagagataagatggaccagcagtccaagagtagtctgaattgagtttggttgaacctggtctgctccccgagagaaccagcacaggaaaacaaccagctgcagattgcactcaagtgtgatcttgccatcccttcggtttctttctcaacttagtcgttcgttgacgagcgcaaaacaagtaaatagagaaaggaaacacagaagggatgtagccagaatgtgaacaagagacgcgaggtttgactcccacgccaaattctttctgcctccagcgttttccataaagaagacagccagatggatagattgcacacggtccccgcgacgcttccaagacgaacacccccgcctaaagtcccgagagactttttccctccttcaactcgcccaaaggaaagtgagatcttggggaggcttaagcgagacgggagccgtcggttttcgggtgcgtcactgcatcccactttgcccttctcgcgagaaacgggaaaggcaaatgatcagagatgaactcggctagagtctttctggttttttaacataaaaaacatgggggcactagaatactcagaccttatcccgctcgggagaggactcaaagacccgggtgaggggttttggatagtaggtgacgagctttgcagcctttggactaaatgagaggtgatgcggaagggtctgttaggatcgaaacccaaagacatcatctgatgagagaaataggacggtctgaacgaacctgctggcggtgaagaggaaaagaaaaaacagagctggaaaaaaaatcaagaaaactgatagacaattcaaaattggggctccctctaggccggagtttgaatagtcacggcaaaagaacatgggcgcatccgagatgagaaagagtgagagtgagagtgaaggtgaacctatgcaaaaggtagacagtactaactgaagactgatcgggtcagtttgtttgcgtgcgctcatagatacaccaagaaaacgaacattgtccgggaggcgagaggatgaagagtgcgggttcgaacgtgtgaccgattgagaaacgtgttcttttttttctttttctttttttgtaatagctttgtgtctttttgtagtcccactctctagttcctccttggtctttcctcaagccgtctcgtagtctttctcgtagtctcttttgtagtcggctgtcgtacattctgtagtcgaatatagagcgaccgggtttgtagtgtttcctgacgaaactctgtagtgtttggctaacgagttctctattgaatgtcctagagcttttcaatagaacgcattgtagtctccattacaaaaagcctataggaaatgcttgatgaatatcactctttcgccacactctgctggccttccttcttttccaacattcactcacttctctgccatcttcatctctatcttcatctttgtcgttgactcgttacctgctttgacaatctcctttagatctccttttatgaaccagcccctcggtctagatagcccacaggaaaatctctctgcatcatcgatctcctcaggtcatacaccacatacacacagcttggatccagccgatcaacatgataccctagtcccacatcgttcaaaaggcaaagcgagagaacctcacccgactattaattcaaggaaggaaaatccgaggagaacatggggcgaccacacagctagctcggatgacggtagtcaggatggggagatcttaggcggaccaatcgtgcagacttcgtgagtctctgtagttcaatcagcgttgtctctatccagccgctgatctggccgtattcgaccgatgtccattgatagcccgctcctgaatctaccttcagaaaccctccttcatattgtttcttttcttcctccatcatccttgttggacatccttcggacatgtcgcgcgctcaacgccgcaatctctgatgaggcttcgtggaaggctagctttgaacggacatttgtaaggccgggtctagccggtctaacccgaagctgtcttcccggaggtggcagcggccaagggtggagaaaagaggccctagcccgggagagactgatagagtatgtatcttgagcgctttcctgtgctttgtatcctcgtatcgaatgctcattcatcttcctcacgttcacttcgtacgcgtcagtgtggtctccaactcaaacactgcctccttgctgtatgatccccgactatcctacattcattcgtttgcagtaggctaccctctgcctgctcccaagacaccgtcctaccagttccgagcgccgactctattgagcgcaagtatcgccatgggtgtctgtaccagaaggtccgtctctcacgcgtaccaagctcaaggaccgttcatcttctcttcatcattgaacatcttctatcgttttttcttttatatcatcatagtaacccgatgactggcacacttgtcaaaggctacttggattctcaaggctcaaacggtaaggtgtcgtgattgttcagtagaaatctagaaatgataaagctcatgacgtcaggaaactatttgcttctctcatcagaccataccttatggagcattcctcagactcgtccaactgccctcctcttgtctccaagagatccctctaccgtcctttggggatttcaagacggacaggtcgcacagacctctatcatcgccggaagcggtcgaacgcccacgctgaccgctcgatccagaggagtcataggccatgatggaccagtgtggtccttggtatttggcccgcccgggttcttcatcagtggtggccaggatggacgcgtcaagctctgggcagaaagcacaggagatcacctgatctgtctctggacgagtgagcaaccggtccgaaagaaagaaacatcaaccgatggagcgcctcctcgtccatctcttgggccagagtatcgagctgtctctcatgtttgctgggacgctgcatcgggtgttgtggcgagtgtaacggaggctgggcttgtcagagtatggagaggcgtattcgctccttcagaaggaaacgcccatgcctcgacatcaatccagccttcgtctatcacgtcttggcaagaagaccgagaccgattctcgcctgggcagaccccgatgagcttttgtttggacgtcgtggatccttgtctgattgacaaaagagaccaaggcaagataccgttgactgtcaatgtcctcctccggatatccggtcgaccgtccttccaacgaatcaccttccaatattctcttcccttgacggacggtggtatcgataaagcttccgaggctgcctcgaccaccctgaccactttctcaccctcttccgccgagggctttccagagttgaccacactatttgccgagttcaaggttcccccaccaccctcacttccgtttcacagtacgccctcagtgacaccgtccgaaccgtcaacaccgtctggtgtgcctgacccaatgaaaccccaggtgtttcacctagcgacgagtactatacttgagaagagagtgaatacaaggggatccctcgcgagcaacaagtttgtggtagcaggtgatgcagaaggcatggttcgaatctgggactgggatgttgatgagaaaaacacagaggtcttgccgttgagatcgtggagagcggcggatgggaaggtcaccgctttagagtgtcaacagggtttggtcgtggtcggaaggtgagttaaagattttaaggatacttgccattttcgccggttgactgatccatgtgtgtgtgtgtgtgtgtgtgtgtttttctcattcttctttgcttgaaattagcttggaaggaatcgtgaagatctgggacccactccaggagatccctttactccttcatgagttaagtgaatgcgcgcctgccaaccgacgaatcgcccatcatcttcaagccggggcgcttgatcctgatctcttccgagtgtccaacgtcgttctcgagcgagatctgttgatatgcagtattggaacaaaaattcttagctggaggattggtagacggatcaggaggaacggaaaaagcccattcgtcggaaagatcattggtcgaagtgggaacggctgggagggaaggctcacacctgggaaagcaggtcatcaatgtttgtcgctcctctgtttttctctctgtgtaccatgatcaaacgctgactacatctgtttcttccatctctcttcctcctcaagccccgagcgacctgaagcacgagatcgccaacgcacaagcagaacatagcgcagaatccaggaatctccgggaaacgatcgagagggaacgtgctcagaaagagaagtttatgggtcaactaggtttgacagatgaagaagtcgtggcatatgcgttgatgcttagccaggaggaagaggaacagcagtcttctcgtgcccgtgatcgttccgaaaaaaatggtgaagagggttacgtgaatgttgaggaggaagaggaagaggagaatgacaggttgcttgacgagatggatacgactgtcgactccgacgccgaggcagaagatctccgattagcactcgaacgaagtctcctagacggaccaactacaccggactttgatccggttccttcctcgacttcgtctgttcctttctcaacggaccgatacgatagttcgttagattattcatctcctcgaccattcttaatccctgccgctaccgccgccgctgccagtatgaccagacatgcccacagcacggtcgataatgaggatgaatggccagcgatgacaccgtcgtctgtctcgcctacgaaatcattgctctcttcctccaagggcaagaagtctactgctctctccatcccttccctcaattccaaccacagctccaactctactcaagcaggagaagggagagaaaaccgtggtcgatggggaggaagagagaaggatggtcaacgagtacttacagctgccgaggtcttgtctgggaaacctcggtccagtcctcttgttagtcccatcccaagtcccgatttcaattcagcctatagctctggctccaacatgaatggaaagaccagagctggagctgagaacggggatgggaaagtgaaaacattgacaagagaagaaagagaagaagaagaactgaggctggtattggagatgagtcttgttgatcaatagtagtagtgatagtaaacaacgttgaagcccaaagatcgaaattatatagaatgtagattgcaagatacggaaatgaacgatatcagtttcgccgtttctcttccatcgtagatttctgttcttgttcaccacgcgtcgtcgcacacttcactctttcctctccagctaaataaaatgagaagagaaaacaagaactcttatcattctaaagatcctatataagagacgataataaagaaggagggggttagaaaaagaaagaaagggagtatgacaacaaacttcgacttcagcttggacttccgattcagcagattggcattcaaagttgggcaatgagcttgtcctcctctcgttaacttcttgatcgacttgataatcctctatcaacctttccacaaggtatctatgcaacatgacatgaaacgacacaaaaaaaaacatggaatataatgggagagaataaggaaagaagaagacacccaatccccgagttccaagacctgattctccgttttaataagggacgtgaggaaatacgaggagagaggaaggggaaaaaggaaaagggcgagggtgggagggaaacgagagattggactgggaatatgt

SEQ ID NO: 1165 - DNA, 13024 bp, Xanthophyllomyces dendrorhous
gggacgatcggggagggttgtaaactgttataggcggagaagaagcgagcgtaaacgaaaaacacaagatagatgagaatctcgtcatgtctaaggaaaagcagatccaagaaaaaaaatcggacgtacggatcttcctggacttgatcggggcccacttgtatcgcttgatccagatactcaaagcccacatggcggacaagatgacggaagcctggagtcccaacttgtgtcgctcatccaactcgggctcggcagcccagctgaggaaggtggtcacatccttagccatctgggaagtagtagcaggggttcctatttcgatcgatttgataaatatccaagtggtgtacagcttgtcagcaaccatgtgaggtaggaagaaagaagaccaaaaagggtactaaccatcctcgtactcaatcaaaccatcgtacaacactcgacccataccaattcctcctccggggaagtaagggttgtagtgcatacctagatggagtggaacataatttaccattagccatgaatactggagatatctcggtgggacagaggaaaggagagaaatcgaagctcaccctctcgaatctcaataccagccggggcatcgacgtatccggtaaggagggagaagacgtagtcaacgtttccgtgtcgggccttggtgatcaaactgagatcaggaggaagggcaccggcgttggaggctcgggaagcctgatcgttagggtaggggctgggcatgtaatcggcgagctttccaggtcgcatgaacatctctccctcatcattgggcccatcctcgtactcggcatcagcagcgaaagcctgttgcgggtaacggatttatttgttggtgatgatgaaaagagaaaacataaaagttttcgttcgatggatcatgatagggtggaggataggaatgagtatgtgggctttctttctttgtaacctcttctttttttctcgtgctcgcagtactggagatgacgaaagatgaagaactaaacgtaccttaacctcatcgacggtatgactgacaccgaccaagtttcgccaggcgattcgcttcaaggagtggcaagcggagcagacctccttgtagacctggtatcctcgtcggatactaagaatcgagacaaacgacgaccaggttagcagttgctcacagtgattttaatatgggtgtatgggtgcatgtgaggttgtgaggttgtgtgattctatccgttctctgtgttcgactcggtcgcccaatccaactgcatcatttgtccacccagatggagggcataaaaaagacagggaggagagaacgaaagagaagaaaaaaaggcggaatgaagacatagagaatccgaggaggacttacgagtcgtgctcgaaggtgttaagaaatcccttgtggtagaaaggaaggttggctgggtggaaaccatcctcaccgacagtgttggcggaagcctcggccaagagaccgtccaatccggggaggccgtattgatagccgtaaagggagacggttcccacagtggccaaggtggcaccggcagcgtgaagtcgggaaggaacccacttggcggactagtatgaatcatagatcggacaacacagatgagcattcagaagggatcggcaagaacgagacaagagggaaacatacaggagtgctagaagcgaatcgggcctgagggaaaagacgagagaaaaaaaaacggccaaagagaacgagccaacgtcagaatcggcaattgacttctttcctgttttcattcttctcatgtccttaacatcctgtcgatagggatgtcatagacagatgaaccgccatcgagccagagtcgaaaagataacaacgagaggccgaggagagatgatccgacgattttttccctccgtttctctctaatcctcgaagagctcaaagacgacatcgctgcttgtggtacgggcgtacgattctaatggaaacacttactccagatcggactgccggggtagccttgaaggactgggtagcgagcctggcgaaagacatgctggtgtattggacgatgtgaggatgggtggggtgggttgaggaggagaaaagaggagacggtcgaagggaaagagatcgggcaggccaaaagcggaaaaaaacgggcgtgcggctttgggatttttttttctaatgagttaccgcgttttcctaatgaacactacaaatatattcctaatgtttttccctccctgtcacgccagccagctgcgaaaaaaaaaacggccaatcaaagccgccccgtttttttctttgttttcaaggcgcattcagtcgactttcaccttctgcctttctagcttccatcgacgatggttaatcgtaacgatcgtggacacggctacactgactctgttggaaacagactgacctttgacttattaactattggatagattgatcgcggatactgaagaaatagtggacgagtgagctttgttcaaagaaacctagatttcatagtttacctaaaccaatgaggcagtatacaatcgcctgatagcgcgtcgtgggaataatcgaacgcctcggttctggatgtctttgttctgataggtgatctatggagatatatgtctgtcctcaagatgtatcatatatcggacgatctgtccactcggatcactcaggtgcagggcgacaggttcaagaggagaaggccgggggagagttcagaggaacgggcgcaagacacctcaacggaaacaaacagctcttccgagctccttctgcctgtgagaagtagatgtgagcagctctacctctctgtctgacttggttgctgaagagtcgaggactgtaggtcacacgacggtagaggtacacgctaatgtcctgtaacactcctcgcggagcagctcggatgaccactttctcttcgcctggcaaagcaagccttggatcaatgacgatacttcgatcttcctcgtctgatcagcgcatgagagatacttctgtgacagagttggataaggagggaaggtaatgagtgtctgtcgtacccttattagcccgaaagacaggttttgcgctagatgagtagaaggtgtcagtaactcttacttttcgttctccttcaatctatcgttctgttgcccatgtatctacgtatgtccaacaccaggctttcaataggctcctgtgctgagaaatctttacgaggactgcgaccacgaatctcttcctagagaaaccccagttctggtctctgcatcaggagtcatcccttagatattcgacttggctcatcatgctttcagcgagtctgctagcaaaggaatcactagcaacatagttcaggctatggccaacaccaatgtttcaaacactttgagcagtatgtttcaccatgaccaacctcagaggcaagaatgcaaagaactccatggaagctctccggctcattggtacatatccactttatcgatactgtccaacagatatcagcacacatgtatcgaacccagtcgatcgtctacaaactgaacgtgaacataacctctatcgatgtcaatgtcgatggtgatgtggatgcggatatgtgtccacgtgtgtctacacaagggatgggtatatgcgtcctcggacgttagggttaaggctcaaagcgtaacaaacatcataaccgcgacctggctagtaaccaggctacgcccatcgggcttatcaccgactccacccgatgggacacttccgctatctgaacgtttctccctctcccgttggaaaactggatggacccatcgtcttgatcataacaatcatcaaccaaccgttctctagctctgtcctcgttcataaggatactcactcgaacgcacccgtactagaatatacagttatccgctcagatatgcagactcctccgatcgatatcctttcgtcgtccagtggccgcccaggcccggttgctatcttgtccgaaacacctcgtttgaccacgtttccttcggtctcacccaccaactctgctccgtcggccagctatggtgctaccgcatcctcctgggaaattctactctccagctttgatgcagggacccacagcttctgtagagaagagcgtatcgaaggccatttcccctcgactgccaacatcacccagcccgcgcgtcgtacgtatattatccccgattaaatcctttatctttctttattttgttgctcccttcgatctgaaacctccacgactatgttcccttcttgtacgcgtactgtcccttctcacaggaccttcgttcaccttctcgtcctcttcctcttcctcgatgacgacctcgcgatcgggtccgtcgttgctctctcgtttacttctccatcaacctccggccacgccacaagtcgcactgggatcggtcatttcagctgatccaagcccgactttgcctcctcgtcgagcgcccaagtttgatcgtacgttatttcctagactctgtttctctctggtcgttgacagataagtgcataggtgactcaaccggactgtttcttttgatggtcgatagcctcgagtgaccctaggttgttgggtatttgattctggtctttacccgcgcgcttctctcgtctttcctcttctctatataccactcccacctcctaccttctcacccctcccccatagacatttcggtttggcttcttctttcttcctcgtcctgttcgttcctcatgatctattccggtccgtcttataagacgacttttgtatgtattaatactctcatatatatattcctctgaaatcatcactatccatttggcatccctctgttcctttgttctctccaaattatccttattggagtgtgaattcaggaataccggacgagactaagaagaaagacagtcatgatacattacagaacgaggaaaacatttcctggtatcagaaaattcaagtagaggatgactggagacccgtttcactgaataattgggaccctcggttcctcaactgaatgaatcctccttttgcgtcggtttcgtctattgatctgagaaatcaaaagtgaagaagtatgaacgaacgatcgaagaaggaacgtccgaccagattgtatggctcgatcaagagtcgacgaagaagcgcgcgactcagagaacagatgaacaggatggagacgaacaatttttgcattctatcactccatccgatcttttttaacgaggctgcatcttgaaggtgagccaacaggaagacaagcaaggcgagcgtagcttctgatttgatctgtacacccatccggtcagagcgaatcagatacgaagggaagggccgaccaaggaagaaaagaacagttcatcagacatcattactctcttgaaccaacagacgcgcaaagaagagaacagagacccaaaataggatggacaaactgagagaggaagcgttgtttccggtcgatcgagagctttcagatggcctaggtctatcaccgtatatccaagttcagagcagggcggaaggtgaaagacggtcagccaaaatacatcgaaagcactacagaccacatctgaggtaccctgtggatctgtagacctgttggatttgatccgaaagatcaacgagaaaggtcagagattaagaggacgacgggaaaaactgacattcataggcagagtaagcggctgagatccagatgggccatcggtcagctaaattccttgttgtatcaaacccagttgggaccaaggcgagaggcaaaagacgaaccatgggctgctacaattatagatgccaagatagcaagcctaagaaagtacatgacgacaaaagagacggtccgatagttgatgacgatggtgatggtgatggtcactgatctcctggcaaaagagaattaaagaaatttctggttcttacttcctttccttttgcccaacccccaccatccatcatctctaacccgccctttcgtcccttcctttggtacatacacacacacattctttcgggtcttcttgctcgacactatctcgtaatttaaactcaaatctactagtcccacgatggtctcaagaatcagggaagtctgggcagacaacctcgaggttgaacttgtcgcgttgagaaacgcgatcgattcgttccccgtggtatcaatgtacgtcccatttcttgtctttcttatcatcttttctctccagctacctatcgaaccagaacagagaatgtaggagaaaagaaaaacatcacgaaaaaacaaaaccggcttactggggtctcgtttatgggatgggcatgtttgatcggtctactatacaacagggttcgtgctctcctctcctctcttttaccttgttactttctatattctaatcctctgtaatctctttttgaacaggacactgaatttccaggtatcattgctaggccgatgggaaacttcaagacaggagcggattatcattatcaaaccatgcggtgcaacgtcgatctcctcaagctcatccagttgggagtcactctttcggatgaggacggaaatctgccggatgcttgtacctggcaattcaacttcaagtttagcttgaggttcgtgaaaaaaacaaaacaaaacattatttccctcttgttcttatctccacatatgaaagctctcgacgatcaacgatcaagggtctgaatcaagacttgatttgggctgacggaacgtttttgtctttaccctccccaatgactacaaacagtgaagacatgtatgcaccggattcgattgagcttctggagaaatcaggaatcgaatttaagctgcacgaagagcgaggtattgacgtagagtatcttggtgaactcctaacgacttccggacttgtattatttgaagacgttaaatggatttccttccataggtttgtctgatcattcttgtagaaccttctcttgattataaactaaactaatttattgtatattactttacattcaatttcacacttgtacatagtgggtatgactttggctatctcattaagatcctaacttccctcccgctccccgcaacggaagaaggctttttagaagttctcgagagatggttccccaatatctacgacatcaaacacatcatgcggagctgcaaaacgctcaagggcggtctccaggatgtagccgacagtttacaggttcgtctgttgtgcttctttaacgagaggagagggatgcgcgctttcaaaaagatcgcatagaatcttgcagcctaatcggtttactcttgaaacaaacacgaaacaggtgacgcgtataggcactcagcaccaggcagggagcgactcgcttctcactgctgctacgttcttcaagatgcgtaaagtgttctttgaggacaagatcgaggacgaattttaccggtccgtcttgtttttctgttgtttttgtcttcgctataactcgctcataatttttctggactgtttcgaatcgaacgagaaatcttttaggaatttcctgtatggtttcggaaacgctcgtcaaagagaatacaacggaaccccaagattcttgcctgcattgacgacggcttagacgtgaacaaccttccctcctctatcctttcccctcttctgatatcttcactcctctctcccaacacactcccaacactctcgtcctctcttgaggaggtcgagaatgaagagttatatatacacccagtctccagtctctactccgctatctctctcctactcaaacctccttacccctttaccccaatcactcctcttgcccgccattaatcaagtggcaagagttctgtctgtgctcccatagggttcttttcagaacgttgttgtaccatcaagtgtttatcagatcgattgggggacggtcggtcgctgtagacgtgtggcaaatgaattatgtggtcctctattaaaaatgtcttttcttctcatctcctttctgctttcaatgctcttgctttcactgttgccattgtttaggtatataaaatggtggtcggatgtcacagttaccatgacaacctggataatttgaatttccttcactcctttcccggatcaaggcccggacatacccatttactccttagaccacaacctacacccctatctcttataatccgacctaccttaaaaatcacagcccaacatggtcgcccacccatctcgaacgagaacctacgaggagcgattgccgctccatgtcaatcaggctgccaaggatctcctagagacgatgatcaggaaacagtcaaacttgtgtgtgagcgtggatgtgacgacgaaggaggagttgttggctattgttgaagccgtcggtgccagcagttgtgcaatcaaggttagcgttgcaaaacatactcttctggtctgatactctcttgacggagagcagtatgtgaagagaggctgactttgaaaggagagaatttccttttgttatggatatagacccactgcgacatcatctcggactttgacgatgatctggtcgacaggttgacggaactcagcaagaaacttgatttccagatttttgaggaccgaaagtttgcagatatcggttcgtttttctgtctctcatatgcgtgtgttacggaggaggatcctgtgtcttgtggtccaattctgtcagccagttattctcaaggctttgccaaacttactttgtgtttcttctgtctctatgaacgacttggcatgcgttcgcctcaaaggtaacaccgtgtcgcttcagtattcctctggtctccaccgaatagcctcatggtcccacttgacgaacgctcatgcccttcccggccccggaattgtcactggtctatccgccgtcggactcccccttaaccgaggacttctcctactcgcccagatgtcttccgtcgggatgttagccaacgagagctactcaagagaaaccgtccgtatggcggctgcccaccgagatttcgttgtcggtttcatcgctcagagcagagtggaggaactcttatcgaccgaatcggcggaagagcgagacgctgtggagaagggtgatttcttgatcctcagccccggggtaggacttggcgtcaagtcggacggaaaaggacagcaatacagaacgccagatcaggttattggagaaagtggatgcgacgtgatcatcgtcggtagaggaatctacaagggagctggaaaggacgagtggaagagtgaagcggagaggtataaggtagctggctggaaggcttacgaggatagagtccggaggtgagacttatctatgccataaaacaatttgttaatcctgcgtgtacatctgggtatagaagcaaggaacccttggtctttctgggatctaatatgttgatgtagatcataggcaaatttaagcatagattcatcaagaaggaaagaaaaaaccattcattttgttttacaagtattccatgagagaaggtaaaaattctccagataaagtgttatacagtaggttaggtgtcgacagacacctccaggacgcaacaaccccagagaaacggagagacaaaaccagagagtaagattgacggaggagtagagtagcatattgcagaaggccactcccagcgtaggacgaagagccgtatagagaaggaaacatagaagagagaagagctcaagaggcaaggaaagcatttagattttggacgcataaggtcgagacatgtcttcaatcatgtcctgttctccatcatacttttccttgttgagcgccggatcggacgagaggtttcgttcgagatgtcctggctcaacgtgtttgccagtcgcaattcctaagagtgagagatatccaatgtcaactacaaatttggcaagaaagagaagaaacaaggaatggaaagaggaaaacaaagaaaaataacgaacctcgtcggagctcatcctctcgtgtagttgctgagataggctcgtatttggccaaaggaacaatccagtgggtactctcaaagtagtgatccatctcttctaattttcttcctttagtctccgggacgaagagccagacgaagagagcgttggtaaagccacagatgccaaagacgagatagtatttccatccaatggcgctgaaagcgtaaggagtagcctgagcaatagcaaagttagcgatccaagcacccatggaggtgattgccgtagcctttgctcgcagtttggtgttaaagatctcgactggaacggcccaactgagagggcccaagcaactggagaatgcaaagttgaagatccaggtcatcatcacgaaagcccaagaagccgacacgttgtgagtgctatctggagggaaggaagccatgatggctgttccgacgcagaatgtcgaagaggacacaatgtttccgatgatcagaggccatcgacgaccaactttatcgatgcacataatacaagccgcctgtcctatcaaagccaatacagagttgattgattgcagcatcaatgtcttggaagcgccgaagccgatgtttaggaagatccgaggggcgtagtactgcaaaacggatactccggttgcctgcatagacatctgaaggaagacgccgatcaagactcgtcgtaaattggaaggaacggtgaacatctgggtataagctccaatggcaaccctgcgttcctcttcgatggcaagctgaagatctcgaagttcggtctgaacgaagatatcctcggtatttccattcgcatggagtcgggcaagcgcgacgagagcatcgtcttctctaccgacagcaaccagccaacgaggagattcggggaaaaggaaaatcaaagcagccaaaggaagtgcgggaaggactagagaggatataaagaagagacttgagatgagacgaagcataagagcgcgcagatgacaaacatataggacgcatactctgaattcctaatggcacccgccattggatctctcggccaggatagttggtgtagaaaccgtatcccatgaaggaagcgactgagaataagaagaagaaaatagcaaggaataatgaatactttttaatacagggatttcgatcactggattgatggcaagatagacttactgaacgctccaattcctaggaaaaactatagatgtaaagagtgcgagcgaaacaccctatgagattgttgtcaagattagacacggatttagactagaaatgacgcacctgttgaagagtcgtcagccgacctcggatagacggatgggctatctctgcctgataaagtggagcaaggaatgaaagcatcccgattccgacccctgcgagacctcgacctgccagcatttctcctaaaccttgggcagcggtctgcaatgaaccaccaatgatgaatatgatagatccaacaaagatagctttctttcgaccaaacttgtcagctaccaacgacgacgggatacaactacgaatgaaaaagaggaggaggatatatgtcaatcaatcgagcgcggggtgtacatgtggttcaagaaagcaaaaccaacccaacaaacgctccaaggagcatcatggacgtgatgaatccgatgacggtgtcattagggtggttcatggtctcgaggaaatttgtggaaggcaagacagatccgatgatgcccagatcatatcctatgtttattcaagagcgcaacatccgacgagcgatcccagagtcagttatctcgaacaaaaaattcgggatttatcgaactaaccgaacaggatggaccccagcgcggcgaaacatccacagaggaaagctgtagaggataacgcattaggcagaagttcggtcagcgtagtacaggtggaaattgttgaacctatgagacttactgtatagttttggtgacatcaccatgttggacaaaggatagagggtgtgttacaagacgaagccgggatgagcaaagattcaaaccaaaggtaaactgtcgatgtgttcacgttcggtcgtcggagggagcttctgaagccgcgcgcgagggatattcgaaggatgtgtcaaaagagaatggacgaaaaggacggaggggaaagcgaaacgagagaaaccaccactttataacgaaacaccaacaagagaaacgatctgatgggaagtaagatgtccggaagtaagcgcatggtgtcgttcatacgaggtgcgagtaatgccataatctccttatggccgtgtttcaaccttctcatctcctcgtttctgttgtcctccaccccgctcctccattcctcacaaccgtccgtgaatgattgggtattcaactaccggtcggattaagttctgctcgctcatacaaaaggtctcctaaagtagacatcttgtccggacagacatcatctgacttgaactttgtctgcacataagactgtctgtcacctgatacggacatctccatcgtttcttcttgctcgtcggtgaaacttttcaagcttcgctcttattacatccaatcgcatctctttagatcatatcggccttggcgaatgggcaaaatttatagagagcgtcggtgagcgaaagcagagaagagagagagctttacataacgtaaggctttgtattcttgtgtgttcagatgaaattttctgagaaaagacgggcatacaatttcgaagagagtacgcggatccgacaatattcctatcgagacctctgacacgctcctctttctcaaaatgaaccatgaaacaacccgaatccagttcaggctcatccatacatcttcccttacgtccttcgtcggtccgtccgtttcctcgacgtgtgttccgccggaccgccacttattccgatctagctatcggcccgctaagattcaacgacaacttgtgggtctcttgaactccggctctcggctctcggagtcggcaagctccgacatggcgttcgcgaatcaaaaaatcatccggcccttatgtttttctttcttgcttatttcatcttgtattttgttctccatcccaaaaacaaaaaaaaaagtccgcggttcttgccacaacatggtgcacccat

SEQ ID NO: 1166 - DNA, 4089 bp, Xanthophyllomyces dendrorhous
ccacaacatggtgcacccatacggttatacagatggaagtgatcgtattaaatcagagcaatcaaatagaaatcgattagggtatagaatttacaacgcagacgccttagattagcccgtgaattcctttgcctcctgatctccgcggagacgacggagacgacaatgacgacattggcgatggtggtagtggtggaacaggtggcgagatcaatgctggcccagcagctcctggtttacctctaacacaatcgaacgattcaaatctaggaacatgcgttccactgtctgctaaaccgatattcatcagtctatttaatcggcggaaaccaatagacgtgataaccagtgccaaggtggatgcgcctgtcatcactatccaaaatgcatatgggtgggattcaagatgactttgcagctgtttgccatttgaaaaaaaaaaaggggggggggttaaacgagataatcagttatagatcttgatcataaggaatgccggtcccttcaaatcaacatagataaaccatctcacattcatacctgaatatcaagccgaagaagaataaaagggagcagattagtctttgctgattattacggacatatttaaggaagaaggataacaaaccaaataggccagctagtaaagcagacgttcctattcccatcgtccctatcgacaccttcatattagcgcccgagtggagaagacagaaacacgaagaacagagtcagaaagacacagaagaagaaaaggagaagaagaagaagaaaaggaggggcctactcgaagatccatcgcgagtagcttgttcctgtttgcatctagaatgagttcaacgatatcttgggttgattggacgttttgcttttcagaaggttcccgcacatgccacccagtccagtcgagtgagtcaatttctctactaaatccgagcttgacgaaatacaaccaacgagaatagactcacgacggtgttctccacttcattcacaattccttcaacttgcttctgaatgctttctagtaatacctcgacttctttatggtctttctcgttcctcggctcgggtgttaactggtttgatgtcaagtacattgccgccatgtcctcatctagaaacatctccgaggaacacatcattagttatgagttctatatatcgaaaaaagtatgagtaaaaagaggatggtttaccgttctccaaaacttcctcaatggcttccatcacacctgtcgctcggtttttgaacgcagtgagtcttcgagaatgctgaagtaacgatcgtagattttctcttgacagcgtattctctagatgattcagtagttcatttacaatttttcttttgttttgcaggaacatgaaccagaaaaagacaagaatattgtcaaatgagggactcgagcggaagtacttgtatgtggacatactgagtgtagtcagattcagcctctagtgctccacaggcagagaccaagatggcttccaaagcccggaactcatacggtattccagtattcttcattcctaaatttgtctgtaagtcgaaacgtgtgtaaggaaaaagaagcgaacacagatacgaacacatgcgcgcgcgatatatcagtttaaacgcgtctacgaaaagaacaatcgttaagaacgatgggacaaactgagaggtgatgcatgaagtctttttggagtgttgaatattgacttccttgaacgtcaaatacgagtacggaatccgccttgacgagggctcgaatgtgaaggatagttattaagatggcttgttttctgacgaggattgtcggtacaagtgatggagtgaaagatttctcgatccgacgaagatctcggggctgagtgtttcaacagggagaacacgagatttgccattttatttattagaggggcatcttggctgaggtgaagaggagctctttcgcgttcaaagaaggtgcttacgtctagaccatgcatcctacacaatactgatttcttggtttcgttccttgttggctgcccgttctgatcgaacgtgacacctgtatagtgcgaatatccagttgtcgaccaagagagtgttaaggaaagagatacatgtcttagtatcgctgcagacttcgaccttgattggaaaaaggaggacatacatcgaagaatgatttccccgtcgaacctcgctccaggaggagctctctgaacacgttgatattcaaagttagcagcctctgcatctgtctcggtctgttgcttctcggattttgtttgttctgatcctgaagagttcactcgaggaaagaaggataatggaagaaatcgggatttggatgaatgacttggagcggagctggcgggcgtagaagaagtagaagaagaagactgaggttgagaaggtaagttgggtgctgtgggagatgagaaggatgatttagataaaccgttgtccgctttttctagccgtgagcttgacgaaaaggaccgaacataactcgaaagagagacctgggcacgagaaggtagtaggcgtggcggttgaaaaggcttgtaggagacgttcagcaggccgattggaaacgggcttagcctgaatggtggcattcaaggttctttccgagtgagaggtataacagaggacgcctgatatgttgatattaacggtgatagcgtcaactgtgttctatggtatgatgttctctgttcaatcttctcctgtttcctctgggttctgtctttggtagagttcttacagagggagtgttcaatggaacggaggctcattagtctagtcccgactttgcccagacgatccccaaatttgcccatatgatgacgaagtgcttacctaatctagcgcttctcggcaacctccgtctctgttataccttgagcccactcatagcgtcttctcgagtggacatgttgagggagtgcaagagagacacgtcggagaattgaagattggtggaggagagaaaacatggtcaaataaaacattcaaaacattctcattcatacctcatggacgtccgtcagctcggacggagttaacttccagtttgggaaccatgctaaacatttggccggcccgggtataagacaagacccaagacccaggactctgttgactcctccgagaacttgctctttctcataagccggttttcatcttcatctttcaagctcactcatctcaaaataatcaaacatggccggaatcaacccttacgatgcccctctcaccacggcttcccggaccgtagccagtgacgaagatataacgactctcaaaaaccatccaaaataccttccaaggacccccatcgtagtcaattcgagcgcgattgctcatgacgagttggtctctcctttgctatactctggtttcgttgagcacttggtaaatcttgtcgaacatgtttctcctagaaaactctctcggtgaactaacaagcgctgtgatttgtttcatcctctcagggtcgagggatctacggagggattgttgacaacccagaagctccttctcctgacgatcttcttataaagcaagatggaccaggagtcaaaagcggaagactcggatggagaaaggatgtgatgaaagtcatcgggaaggatggagagcttcaaatggagatgttgagatggcctggaggtaagtgtcgcggctcagagtatcatttgatcacacccccatttatcctaaattctgtgaaccttcaggaaactttgtatcgaactaccattggcaggacggtattggaccaatcgagaatcgacctgttgtacgcatcacggccttttctagattcatagacagacatgtgcttacctgccttcgaatttactatctctagcgaatggaactagcctggctctctaccgagtccaacaagtttggaacagatgaattcattgattacgcccgcgcgctcggggtagagccttacctttgcttgaatagtttgtcttgtcttctctccttcctttctaggctcctatctagcgcttcaggactgacgatatttgaatctcgttttgggacggttgccatcctagtgggaactggaacgtacgaagagtctttgg

SEQ ID NO: 1167 - DNA, 4793 bp, Xanthophyllomyces dendrorhous
  misc_feature (4728)..(4737): n is a, c, g, or t
gtacgaagagtctttggtgagtatctcttgtttgctgacatccctttatttccagagcaccaggattgatgagtgttcgttcctgtttgttcgaacttcataggcctggctggaatactgcaatggaactggaaacacctagtatgttttctctcttctctttccagtctaacccgtctcaattctagctcactcgagagatgttcttatcgaaaaagctgggcaaacctccgaaggaaaaacaccggaaggaatgaaccccacaatgtcaagctttggggattaggcaacgagatgcacggtgaatggcaagtcggaaaactctccgcaacagactacactaagcaggccgctaggtgggcacatggactgaaattggtagacccaaccatcaaacttgtctcttgtggaaaccaggttagagagtctacaggggttcttctatcactctcttgttggccttcgttacacgattgtcttatccatggagtgcatctctcgatttgttctactttctagggtaattcggaatgggacagggaagtcctagctggccttgtcgatctggttgattatcattcgattcacttttattccatgttgggctacaacaaggaatctgtcgtggctgggtttgagtatgagaagaatgtgtttggccctgctgtgagttctgctatttcgttacagatcgcagagcgcaaagctttcataacaagatagactgttatatcgtatggtacttatgttgatcgttgtcttctctctttcaggccgctgagagaggaattgaaatctgctcatctctcatcgtatgtcttattcttcactctctttctcactattgaacattgagcgcagatcgattgcaccccgtaaatgaggtggtttgttcatgaacattgattagcatccatcttatttgtcaaaaccctcttgataccaaggatttggcaaagatcacgaaaaccccgttgaagaccatcgatccttttaatccggagccaagcgctacaaccaagcgggtgaagatttgctatgacgaggtatgtccttccactcatctgttcgctcttctgtgtcaactaatgactatatgtatcatggggtttcatctattatgaaagtggaatgtgtaagctctctcgcattctgatatcgtatgcgcttcattttgcgcgatacctaaagacaaattctcttccggcgtcgtctttactagttgggatgaaatcaaagctccaggatcatacggccttgagcaaacatatgactacacagatgcattgggcgtggctgcttggttgaacgtactggtgaggaagagtagagaggttgggatcgcttgtatagctcaaagcgtcaatgtcgtatgtcccttttctatgtgggtttctcatctgcgaacatttggattgatcctacgtccgttgtttgcagatatcacctttgatgacgtcccctacaggactactatatcaaacagcctactttccgtatgtacactctgcttcatacacttctcaggtctgttggttccctttcttgatggacccatctgaatgattctctcctgatggacacagtctcaagctatttgcccggtatatgagtaagccctctaactttccttctctctcatgaccaaaatcaattttctttgtctaacgttccacgtttctcgctcgcgcgttatcgagcagaagacggacatcttttagacctgtccttttcttcgcctttatataaaggtccaagttacccgcactggatccgttcgttcctcttgttctttcttttcaacaccgcatcttcgcgctaaactatttctgtgtctatcttcattctcttggggggttttttttggtgacgggtaattggatgattgaagctcaccttggacaggcagcttacgtagatacagcagctgtgatcgtccggtctggtgaaacacagagtatcaggattagtgtgttgaaccgacatccagagttggagtggaccggtggtttcatgtttgttgatttcggttcgtcttttcttcttcttttccgtcgttttaatttaagtgtagcgtcgaaacgagcgatgattgaacgataattctgtctcaatcgatcggtatccattcgattcgatagaacctacgtccgtggagattcatgagttgtatcatgatgacctatctgcttccgttcgtcctctcctaagtttctattctctcctctttctcttaagcaacattcgctaaacttctttcggcttttctcctccttggtccgaaaaatacaccaaactttatagaacacgttcgataatccaacgatggtccagccgaaagtgacgcatctctctggatcagaatgggtgaagaaagactgggtcgttaagaagcactcttgggccttctttattttcattgggcctgtccgaagtgcttaagagggggatatgagcagattcggtcagtgagcgctcaaaagctaggtcgaagttagcagtcgagatactcggtacacgtatcctccgatctctttttctttcttagaacgataggatacatgtagcgtactcataagcaaacatcgcattaaatccatatatcaatcctcagagaagacaaggcaagaaggaacaagggagatgaagaagaaatcattttccatcgaaagaattcttgatcttcgtttttccagaatttatgctcgtgaacgcacggttttttatcaacgtgggttcgttgttccacgaggtcgtcccaaatctcgtccctgacaccgtcacggccggtgatattggtgataggggagaagatgatgaaggaggagaagaagtataagaagaatgaggtatactcgacgaaacaccagtcccgcgctcgtccgctcgtctcatcagttctttgttccgaatttcgatggtcttccttcgtccttccgacagaggctttccaggtttgaagaaatctcgatgtatgacgggtggtggagagagagttgtaggtgttgtaattagtgaagcggatgatactgaagccaatgatgcagatttcgagagggagggagaagcagatgggccagtcgaactacttgagagcggtgaggttaaatagaagttcggttcggacatgggtatggtattggtagtcgaatcgcttggagaagaaggctcagctatttcagatacgttcttgaaagatgaacctctaggcgacgaagcaggaagaggagaatgaagaagacggccatcacgtttcgaagagagatatttcacagctgccaaacatccagcaattgtcagagcgcacacagcttgatcttctctaccttctaagttggaagtattcggaggtccggcgctccattggaggacgcttatccctgcaatggctgaccaagtatctgccaatcggacccacgaatctaggtgaccattggtgaacatactaggtgtctgaagggtccactctgaatcagacaaacggaacaaggagacgagtgctcgaccaccggaaacgttgattgcactaagaataggtccagccaacgggttcaatccaattggactgtctgaacggccggttaggttggtgtggatcgatagaagagaaaaggaccgatagagcgagtcgaaaacggttagaagggtggttaaagctgtaggaggaaagagacgtatggccgtaggcaatacgttctctagcaagaggtaaagtgtggtgtagagtatgagaatcgtaggtgaggtcaaccaagctgatggttcacgaaggaggatggcgactaatgtagatcctccaactaggcgagacaaacgaagattggcggcaaacaaaaaaaattgagttacattcttgagatataataacaggaatgcaacaattgacatacaagctagcacccaatatccgaaaagatcttgtagaacgcttcctctcgatccagtttgtggggatcgcagatgatgccacgagacggatgtcctaatcgcatgaaggacaagaaggacaggcaaggtggagacagaaggatagaaaggctgagccaaagtatgtagtaaagagcagatgtggctctgcatcgtcgataagacaaaggagaagaggtagaggccgatgtagatcaactttgcggcatgctcgaaagacggatggtagtagctgaaagaaagatcgcgtacaacgtcatacggatataagctttaggcttggtgagagcaaccctaaccaatggtagtcgatgcgtggccctttcggacgtgggtgtccttagaccacaaaccatcaagattccatcggtcaagggtttgatccgcccccatcgatggagacagcatcagtatcagccttagcactaacgaccagtgcaacggcagcagctatatcaaatatcaatattctcgcttcctcgtcctcctcctgttgaagagccgggtgcagcatgttgcggaacgcattgacatccccgttccacagagtctgagagagagcagagagaagaacgagcacttgagatactattccgagacataacgctagtgatggctctacagtccatagaaaaagacatggtcagacagagagatcatcagacgaacaaacaaaagaacagagaggtgaagttgagattgatcgtttggtcgagtcacgtgcaatcaataaaacgacgttgtcaggtgtcagggatacggattaattaacacgtgttgcgcagcttgtgttactaccannnnnnnnnncaagctgtttcctcctactgtctatcattcatatatctcctgtcagggtccgggtt

SEQ ID NO: 1168 - DNA, 51616 bp, Xanthophyllomyces dendrorhous
cccgtcttatatatcatccttagactccaacgattatgcataatagaacaggtcatagaaggtgctagaagcacctgcgctggaaggtcatatacctgcatgttgatgtaatgagagagcataaggaataccgaggcaggagaaacaacagaaccaaaagaaggttaccgaggtgtaacactcaggtcacatccctgacatctcctctgcttctctctatgcagtcctcgtgatcacgaatgtctatagtctcttcatatgtatacacctacttgcagaccagatgcgcgaggcgtcccgacatataaggggacgctctcgcgccttcttgatgagagttttcttcaagctgaagttcttgtcgaatcctcttatcaaagaaggttgaataacatcgggtctacattagtcttgagaagcctaagtttcctcggtggttacagtttacaatccgtgccctacaagggatgtaacccgagttacaatctgctcgtaagccgtaacccatggaccgtccactcttatcactcctccctcttctagttcagtgtattctatacggtgttcatgatgtctgggaaccgtacatgagacgagcgttctcgaccagtcgtagatataaacgctaagcatggatcattcgtgactctctacctctgtcattccttcttcttctgtccttgttccctagtggtcctatcaatcctatctctgttccaagagcctgaacttctccgaaaccccaaaccccgttgcatgattacgtcactcgtagcccttccgttaccagctcagcttccacccctaacatttgtggtctgacacccaagtccagcagggccacgtgtcaatcgtcttcgattcaggttgctctcttccatcatccaactcccatcacctttcctatcaccaccttcgactcaaacacagcctttatcaaacacagtcaaaccatgcggtagggtaagtctgctgtagatgttgatttgtcttgacttgttctatcgtgtatagacaagtcccacttgactcatccatctatttaccttctgcatatgcccacacagtcctcgacggtccgccactcgaaccttgaccaatatagatggcagagactgaccatcgacttttcatatctcaactagagcctccgatgttgttctttgtttggtggccattttgttcccccctgctgccgctgcgtttgtgaccggctgctcatgtggtaagtgactctgtgatacgactgcggacacagcattcaataacgtcgaggactgatctcgactgctctcttctctaaaccaaacgtcataaaaagatctcttgatcgtgcgtcctcttcatcattcagagtgttgttcttctgaggtgagggttcatgagttaactgaatcgcctttgtatctttctctcctctcagaacattctcctcacagctgtaagcatctcggctctctatcctttcgtcgttatcctgaataaggcggctgacgctcattttgatggacatacttgtgcacctgagtagcttggatacattccaggtaagtttatatggtggttctcatcactaatcgttagatgattcgctgatcagacagccccctctcttccgttttttaaatgatcacctcttcaggtcacatccatgttcgtatacttttctttgttgtcttcatcattgcagactcttcttgaagtttgtctactaaaacaagagtctcttctgtttttgtgtgtgtcgaatgctacaggctttctggctcatctacaagaagatggccgccgaagaaaagtacggaccccaaggatacatctacatcggtaacggaacgtacgaggtacgatcactgcctctttctggctctacgcctttttgtgcctattcattttgaacaaggcaacattcagttacctgtaaggttacatatcgggattactaatcgtctatccctttctggggcttcttttctctctttcatgcagccttcgtcgggtgcgccagctcatggacacgcagccgtacacccctcctacggagccgtcagccaaggttaagctagcggtcgataaacagacagaccgattaaccgaccaaacttgtcccgatagataagctagctcgtcgcttgttcgacccttcatagtatcacctctcgtgggacgctctactgtcaactttctctacgtatacttgattgccttcttaatgatcttactatcatgctcccctctcttctccttggactttcaccttgattgagacaatggattcaatccggaaacgactggttcgaacatgtgtttttgtaggtacagagagcagcacagccgccaccagcaaacaaacgaagaaaacgagaaagtaaagggcgcaggggatacaaagggtatcaaagttgtaagtggtcccaaggtgacggaaagaaagaaaaaacaggcaagaagggaggggaatggagataagtaagaagaaggaaactgaaaaaaaaaaatcagaacgagctgccttcgactctgaacgtcgacccgaacttgagataggtctgcatgatgccaaggattccttccggtaggttctgtaacaaaacaacgtaatttatgaaggaagaggaaaacagagagtcagatacaagcagaatgacagtctgattccaattggaagaaagaatagattaagaaatgagaaacaaaccatgctaagtagagtatatgcaatcttcgaatgaccatgcacctggccgaccttgaagatctcatgagctgttgtcgtcaacacgtcatcggagcaatggtagatatcaagacgaagaagagcgagtaagagacatgtttataagaacatcgagagaaaagaacagagtcgacgaaccaatgctagtggggtagcaactctcggtgtaccatctgtcaattttgtttccacgaacaagatgaattcaatgcaatcagacgacttccatattcctctatgcttcgacatcaagaaagcgcaagtgtaatcagaccaacctccagttatatgtcgtcaacctcgtcgctgcgttcaacgtcttttgaagatcgccctcgtccgcataattctcgagaagtttttgccatgcttttgaggagaatttagaatcgaggcatctttggtaggcatctttggcttcctctttgtgttggaggcggagtgcgagatctccaaggatttcccactgaagtcgaagtaagacccaaaatgaacgtcagaagaggaaaaaaaaaatctatgagatgaagaataaaacacacctcagtgccagttttacggtaagacatgtctgtttgtagataaaagaccgaacggaaagttagaaaattctctcacggcatataagaatagagcaggacatgtcagatggacgtacgttgagtcttaaaatgagaaatctcggcgcgccatatagtgtacacacgcaagtcctgtgtggattcatttgaccagtgagcttctatgttggaccttaacaaagtatttatcataggacacacctcatagagaaccatgaacaggttgtccaaccatcgttcgcagagtcgtttggtagagaacgatgatcctccgtcatcctctggatccaataactcgtcctctcttgggatcccactgacttcatccccgccttccccctctccgggatgttgagctaactccggcttctccaaccccgccgtctcgcccgcgtcgaaacctgcattttcatcgccgttagccttgctctcctcctcttgaatcgtcgaccccttcatagcttcctcgacagattttatctttgattcctcgatctcttcggcatctcgatcagattctgatgagatcgtgatcgttgggatatcgtgttgctcgttaggttcttgttccagcctcttggatggagataatgatggcgaaccagattcaaactcaacgaccgaagacgaaggtgaatgttcacttgattgcttgttatgcacagcacgggttgaagatggagtggctgccccttctccggaagtattcttgacatctcgagatgatttggcccgatggccgttcgaggtggcttcaggcttttgcttttgtaaccgatattcttcctccatcacgaacaccgccgatcgagatcgaaggagctcgtcccagccgatctgagcgacaagcctagtgagaagtgcataggccttggcaaacgttcctcggagtgaaggcgcaggcaacctcagaagggcaatgtcggcctgtaagaaagagaaagacaaatcaagccgagatgttaaatatggagcatgtatattctgactttcctctcggcctagagaaggaaggctgtcttacctcgttatcccgagcactatcttcatcgaggatatttgactcggcgatgaacggccggacgggcaggtgggtcctcatcggtgtcggcattcgatgcaaatccctctcgttatacgtgaacatcgggcacgagtttagcgtcaaaagcgcctatagaccgaggaagagaaacactccgtgagtgtaagtcaagactgcgaatagatattcaacaaactcacactctcatactctccctgttctatgtacacctctgtcaactttgcccatgtgacgaactcactaggcgcacaattaactgcctccctagctagctgcaacgcccagtcgagtttgccttttgatcttaagaagtcacattgcacgtgcaatagaggatacgattgtgggttctcctgtagaccatgatgaatgatttgaacagctttgacctcctcatctgaaatgaatggaggtgaaaaagattaacaagtgatgacacaagaatagtgttgattaatataggacacactcattccgaagtaagatgtagctagaagggctgccacttctggctggtgaggcagtaatcgttcaaacagattgaccgttttatcaaaccggaacgagtcaccaaagtacttgagcagccctgccgttagatggtttgagacaactgatgcaacttgaatctcgggatctgagcctagttgccatcctaccaatcgaaaggtgtaatcaagaggaaacggtcagaacaaatcaaaccggctgaggtagatgtataatcataaaggaagacaaacctttgaagaagaggctctcagctgcctgaagaaatcgtatttctccatcgagcgtggttatcggatcaatctttcggtaactgttcatgaccaccagaaagaacgagccaagtggaagcagttgagcgaacgacatacttcttcctgaaagagtctaagaacaagcttaccctgcgagtctataatttgggtcatctgcgtatcgaatagcccttagcaacgcagacacgtaagtttcttgccagatatcaggagttgcttcgtgtcttttaggacggaagtatggagagaacgtgcatgaatgattagcctcgagctggacagtagtagataaagaaaagatatttcagacatacctctcgccgcgtagatcaaccacgtaagctgtttggacgtgtccgacttgatgagtacacgaagacagtcagagaaagaagagcagaaaaaaactctaaccatctacaccccctgggattttaacgtctacccgaacatctacccttgagaaggcgttgaaacaactgcaaacattcacgcacacgcatctgttgagatcgagttttctttgatccggtacagcaagcaggcaatcaatcgcagaatcctttcttaccagtacgttccactcctgactttccatgtcggtcctttagagaaccaagcggcttgttcttcgaccgcgaattgtaagctgtttaagtaagccgccagagaggctgaggaggatgcttctactcccgaacagtaatggtaggatccaacctttagatttcgttcaagcgtgcgtaatcggacaggaggaagcacaagaattcagcagaaattttaacgtctagatcaaagaaacagtacacagttggaagggaacgtaatggacaaacatctttctgggcagactttccggtcgatttcatgacatggcatagatctggccctcctaattctctgaagctagctacatatatcatcagaaacgtttccacaccgggcagacccaatcagttagcataatggtatcctccaaagagaagatagcatgtatatactatcaactgatgatgtgagaaacaaggaggagtgaacatacataacacctccgttcgggaagctatagactctccgatatcaccctgtgggagcacacgtaggaggggttagagacgaaacgttagccacactactcacccgtgcatcaagtctgcgttcgagtccaacaagatcttcgtgttctctggttcggcttcaggtatgccgaattcattcttctgataataggtatcttcctggtcaatagacgccatctcttacgtccgaatcggctgaatcattgaatgaatgctatccagcgctctacccctctttgtgatgcatctcgagagggatcctgaattcagacaacgggaaaaggaataaacgaagcggaaaactgacctcaataaattctggaacatccttgaacaactcggacatggcaagtcggatatatagatgagcttcgttttaggaagaggatgagtacaaagaaggcgagatggtatatatgttctcgaagggttacgtccgtggaaataagatctcgaaggggctgcgctgagcttaggtaagcatagcatcacagatattaacggtggtcaatttcattttggtacccaacatgacccgcctagaagtggagaatctccaagctatgcgtcactctgaggtgtttggatttagaatcgggtgcgattgccttcgatgaggaagaccgatgacctcttctttcttctcgcattgatacagagagaagagatacgaactaatgattgggtgcacgtcaatttctgagggattcactcatcctgtttctatactgattggtttatcgaatgtatattcactcttcgcagataatttctttaatagattccaaccatccctctggccaagcacactatgtagcatggttgtatcgcgtctgattacaccacaagactgattttcttcaaggtacatctggctatggaaaaaagaaaaaatagaagaagaatggatatctggaaactagttggatatctaacttgtaggctagaagatacaatgatcggaagtgatgtaagtcagccatcatcgtaaatatctggaggaatggaactaggaagcaaatcacttaccaaaacgtgcattctgtaggataggacgatggattgagcaaaggatatatgttagccataaattcatcgtttgacggaacatgataacctatcggttggagaaattcttactcgtcggaagcttaagaggaaaggagaaaataaaacaacaagtgagtggaaagacacttgagagataagcgaataggacagaagcggacacacatgtgtacaagtgtccttcggacaagaggaactcggtggcttcgctaattggccctcaaagtaacaaccgaaacaaaaggagtaggcaagatgatcaaaaagaatgatcaatcaagacaataaacgctgaacagaatgcaaactaaacgtacacaagagccgagttatcgtattcaaccaaattctgtgcgacgtgggcaatatggaacccatcttcaggaggattgtttgagcagaacttcataattgcccggtgaatcctatcagggtgtttacaggtagagacgagtagtaacaaaagaggggtgagttatcgccagctaaccgagacaggatcaatgatagaaagacggacggtgcaaggttggcgtattcgcctgatctatcgtctcctccaccagcgttgttgcccatgctgtagtccagcgtatttgatccactggtcgcatagaccccggtcggatcatttccggacccctaaataatgaatcaaatgacactttaggtgtattagagaatacatcatatgaaggatgaagatagaatgataataaactgtcaccaaccggcttgccccgtcttagctgcagactgacgagctgacattctaacaaatgataaaacacctcgttgtgatccgttactgggcgaatactctgagcagcaaaatgacgcttattggcaaagaccttgatcgtcccaatggctcgaacgtaaatgtcttgtctaggtgatgttgtcaaacaaagacgaaaaaaaagaaaagaaaacgcaagtgacgtggaaagactggatcagtatttaagaatgccagatgaaacagaattaagaagaatgaggctccaatgctgatgagatgcctaagaacatactgaattccaaccatcctgggatcctcctcatcactggttgcgagccatagcttggcctcacaagacccggttccatcctcgagagagagcgtgatgttagtggcctgggaggctacatttcgaacaacacccacgatggtgacctgtgcagtgataaatactgttacaaaaagagttctgcttcaaaaaagagccatatatgtactgactgaggcaacatcaacgtcgtccacagtaaattcagcatcaggatgagcctgagaagcttggttgaactgtttgatggtcaccggccgaagagactgatttccagaacgctgatgatgaagtgaccggcgaagaagtataaggagagagggagaaaaaagattcgaataagtttttctctgaccaggcaagatgagtagaacagctctggatgcaaaccttctgtgcctgcgaaccaccctggctgccaccggccatgaaacctcctccgccacctccaccgttatagtaaggatctaattcatagtgaggagaacgagaatatcagtcatatcaacataggaactgaaggcatgcgatgtttcccgacagagtagtgtccgtaccgctcatttttcaagatttgttttagaaggattcccggaagaagagtgaatggtcaagatgatcgatagctcagatgatgtgtgggtgtaagtgtgttgagaagtgaagacgcgtctctcatttagttggaagaaaagactgagacgcgtccgacgcgtccaaggacgaaagacgcgtcaacgatgaaaaagactatagaaattattaacgaaatcaacaagaaaattctcgtcttttcatattctaagtaacaaaatactaatacgtaaagacacgggcactgtctgactcctatagcgagcgcatacacccacaaactctcttcagcgactgtgatatattactattgcctcttctccataccttgatgtaaatcatttacctcgttggcaaacatgatccatacataaccagcatgttctgccgttgtccacaccgtcacagtgcgtacgcaggtcagtgggaagtaagtggatgacgtgtgccgaaccctagcggggcccattacataatcatatcccatgcattacgactgttccatcttttcctagattctgttttctagggaagaagcaaagagagagaccagtagagagtgaggagattggataccgagagctcgaagcatccatcccatcccatgagcacaactcgtgtctcttccatccattcatccttgcattaaatcgtgtaatcataatccatctggccctgttgtcgttgcttccactcctgccgccttcgccgtcggcatctcctttgtcatcaactcacgatcgtcttcagctcgtctggcaagcgaaaccataaccatgtcgattagagcacttctcacagctctcgcttttgtagcgagtacttactttcttcttcgtcggctcattcctctggtcacctccattttctctaagcaactttcgatcagaaccataagtctgacgagcgtgaagggcatccattggcagacaactcagtctactgacggcgtggatagagctgtcagtctgaaggttgggaggttggtcgtttcttcatgatttatatcgttgccatctacccaggctcatatggctgttgaaatttcaattcctgaagagtgggatacgtcttccattggtatgatcggtcccggcgagctcggtcatggctgacgttgacaatcgaagacgttgacgtgttcatagaagaaacaactgccgagccttctagctctgctccgccagcagcgagcgtacccggatctccgttctcctcacacccacttggagcccatgccactcctccaggctccattctgagttctcctcagatctttgactccccagatcaacggcggccttctggattgcttacccctcaattctctccgtcaccagaagactcaagccgtccaccctctatatcgaatacttctcgaccctcactactctccgctgctactggtggttccgctatattctctccctacgcgttctcggagtcggccggaggttattttccagatccctctcaagctagcagtcccttctacacccagctcaaaagacgctctaaacggcttctccggaaagcacttgagaaatccctccgaagcgcatttaacgcgactccaggactcgccaagcttgtcgacgttgagattgtcggggacgtcaagctgaaattcttccagcgggtgcagcttgacagcgagaaggaagaggttgaccaaaacggagaaaccatcatccaaggattccttgcgtccctcaaaggaaagctgaggatcagtacgtcggttgatctgcaagcacctgatttcaaccctcatgtgtctggtcacaaatccatcgttagagaaggacgcgtccgccgagcacaaaaccaagcaagatggttcagagctattgtgaacaatgtctggaaaagaggaataggtaaatcggttggggttggtagaattgtgctagagatcccaaacgaagggggaattgagatcaaggcgatcgaagctcccagagggggacctccggacggtgtctcagagaagaggctcaaacgggcatcaacattcagctctcttgggccaaagacctctccaagcgcataccccgagaaattatcaccctctacaagccctacacctcgccgtcgacgtacctctacctcgacgtctttcgagctgcccttcaaaagatcgacttcctttgcgtcgcttccctctgcgctattaggatctttcgggtccaaatcgataggcgcatatacccttgattcgtctcttccgtcgattctaagatcgtcaaacgagccaactgtcaatgaggcctgtaggtctatgattaaccttcaaggcccgctcagtttaagtgttggacatcaattcggaccaggaattgagctcataggcgaacaaacagtgatcatcgaggctgggttcgatgggaaaatcgcggtcggactgaacgcggtcgaggcgttcgtggacgaaagaaagcgggcgaagcggctaagagagagtgaattcaaggctaggttagagaagatgagggaaaaagagaaaacagcggaggaatctgtcgagttcacgtcagagatcacgttggagaggaactcaaaggtagacgatgcgaataacaagaagaacgtcaagaagcaggttagtatatcttatttctgttgtgttcaccttatgatcttcgttctagagctcacaaagagcttccccacattagaattttatcaaagcatttcatctacttcaagttcgcatacctcttgtggtagtctcttatgccgaactgatactagagcagaatgagtcaccttcaactgtatttcctaacagacagtcattcaccgtcaatcatccattcgactctgaatccgattctgaaaatggatctcatattcacaattcatctcagacccgaatccttcctctcgaacttgctctcaaaggattcttgtcgacctatcgagtctctcatatagatacctgtgcgctgtatcgatcatatagaggtattcagagacctcacgactcggaatcgaaccgatcgataggctgtgaattacagtcagcaatcctctccatcggaccctggaagaagcatcatatctatccttggttcggaggccaaagcttgaagccgttgattcagatagaaggggcacggatcaatatgtatacgaatcttctaagattgaagaaaggatttggcagtggaaaaaagccggcattgtttgcggatgatccaaacgagcgattgatggtgtgtgagtcagagttgaaaaaattcaaggggacggcagagttggaggatttagaggcgcttgtactggcgaggaaagcgagaaggcagttggagaaagaacaaaaagcatttgatcgcgctacttcttctgactttggtcatacctatgaagagcccccatcagaccatatgccagaacctcccttgccgttgttctcgcttagtaggagtatagtctccaaatttcctcggtttgcatgcgctgcgagtctcggagaggtgaatttagtcttgtcggcagaaggaccagactccgtctgtcggcctgcctttgtatttgagtgtggcggaggatcatttgctgcaaacggagagcatcaaggttttgttcccaagaaatccaagaagtgagtgtactacagttgcatttcataagccttgttagaagacgatgctaatcaaacattcctctcgatcatctatatctctttctactgataggaataccagaccgaatagcggtcattcttcaatccgagctctgccgtacgcctctctgttcgtgtttgagtctgctgggtcgataaagtccatgcaaatatctcttcgagatacgaatccgcgcgcattagaactggacgccttccatgatctgcctattctcagtatcagctcgagccattcgacctgcaaaggaagactacatcaggtcttggagtcatcctcccttccagtcagcgatggtttagcgcttgatgatacgacgaccatgatcgatctgatatatacggtaggagaagtccgcggagatctttgggatccatcagcaattgagaacttgtctcagttcatgatccctgttgaagctttcaggcaacgcctcaaacgatattctactcctccccaagattcgtcaccccaggatgcaactgatgaagcttcactcttccggcgtcttcctgtgggtctttgtgcgcacgtctctattgagagtgtcaccttagtgatcgccgcactagatcccaatccttcttgccagaaaggtttgttgcgcgggttgttcgtgaaggcccgaccggtttgggagtactgctattatcagccccaacacgtcgagctcgcctcgatcaagtcgagtccaacccgaacagctttgcacctccctccagacattgctgtacaggctgccgcattcgctacagatggtgcatctaagaaaggaggtttggcggctcttatcgcaatgcagtcccatgatttctcgttccgaccaatcttcaatgctcgtagtttcgcatctggccattcaactaacaccaaactattcacaccatatgcggcgatgtttcctgttcctgagggtaaagatgctgggctcatcgcttgggattttcaacaagttcatcgagggcaggaattaaaaggagatgaagagagtgacggtgagaaaaaagagaagaaaaaaagtcacaccgactcgcatcctctaggatcggcagattcatcaatttccgatccgtttggtttgacggcagccgagaagtcgagcacacctctacgcattcctctagttgaaagtcgactgttgctccgaacaaagctggatacggatatcgcttcggaacatactttgtcaatcgaccttggaagtataagcgctaggatcaatctctctcacctctattgtgttatgtgtgctattgacgccatcaaaagccttaaaccgtcagcgtcatcttctctatctcaatcaactaaattatccttcagtgaatctacctcttcttgccctccctctcgctcaccgtcgccacaatcttctctcaaagctcttccattcacgcttcacgtggttcttagctctctccacctcgatgtagatcttcctcttggagagcgcatttttgttcgcctccggaatgttagcattggcctgtctcatccgggcgaagtctcttttgacctagataccgccctggctctcgtccctagcccgcgacaaaggaccaagtgggaagagttgttccgactgcggaaagtacgagtcgcgattactagaagaggcttccaatcagatattgcagccaatatcgatggaatgcgacttcgaattccttactcgtacaagctttcccagttgattctcaacatcaatatcaccataaaggccgtcaagcacattatcttgatgttcaaggagtcgaatatgagccttgttctggctcctaaagtcgagggaccgaaacacgtccctaatatccatttgaagtgtaacgtcgtcacctttgaagccaaggatgatccgatggaaaccaaattgaatctaatctggagggtaggcttagaggagcaacaggcgaggcttgagagagaagatgcgtttgaggctaaagtcagagctatcaggtcttcaaaagatcatcaaccggctctcgcagtaaatgagatgttgaatacttcaagatgggaatttacggacaagcactcggtttcgatcgaggacgcccgaaataggcttcacatgttcaattcgacaaactggattaggaggcatcgaaatgctgttcgggaacaggtttgtccatcttctgacggttgtactccttccgtgtataagacagtcagtttagtatagtcgtttcttatatcaccgaactttcgaatttattctcatagggccgccgagaggatgaagccctccgccgggtttatggaccttctcgtcctgaccctcggctacccattgacgttcttccacctgttcgttcagcacctatgttcaggataatgttttccggcgtagatctctccttgtctgcgctctctctaaagcctcaggagctcaaggacttcttgtacgagcgcggaaacaagttacctcattctacaaagttctcgcttttggtaccgcttcatatccattggctcttggatagcgcaaaatgggtcttgcgtgattgtgagtcttcattcttatctatgtcttctttccatctctaagccatgactcgagccaacagcttatgttgcaacatataatttattttgtcaacactctttccatcaagaccctatacctctgtttaatcttcctcctctagaaagttcccaacatggattgaagaaggcgtttgaatttgagaccgatctagttatcggagaagaactagcggaggaagggtcatacttctgggttccgacagttgtgattcctcctgatttaggggccgaaggagcttcttctttccagctctcggtggctaaaacagtcatgcctgttaaaacatatgctgcgcctgtaatcagagtcaacacttctagcgtaaccgacttttgttggggagcatcataccagccaggaattcaagatcttatgaaggttatagaggtaagtaagttattcggtttccaactcttccagcagtctacttactgtcacaacgatgtatccgcctattcttttactatcaatcgggggttttgttgctgccgaaactactcagacactctcgcatcctccccgagatccatcagaacggatgggattctgggacaaactacgcctcgtgttgcattggacaatcgatatctctttctttgggcctttgcacgtccatgccaaaggtcggcaatcaattttatgcgcattcatttcaacacctactgatcttgtttatgaaaattctgaacaggatcacggaatccgtacgatatcgttgagcatggcgctggtttcgtcttagcttggacaggcaaaccaagattgatgatcaaccaaccaaatgaagaacgagaactcgtacagattgaagcagattctctactgtttgccatcccagagtgagcaactttgccaacaaacatgatactctatatgttgctcatgcttctcttctctttcacgcgtatctgatagtttccgagatcttcaggatcaaaaggctatgggaaatcctgatcccgattccgatgacgatgttaatgtcgagagggaatatcaccccaggtcaaaaaagattcttcggaagatttgtgcaaagtttaccaacggtgcccgggttggttggggatttatgatagaggtgagttgagattcgaattcagacagcttatctcagccagaaacttatacattctactttgatggtcacatcccagcgcacttgcggggatgaatgcgagtcatgttcaggtcctccgttacaacgcaaatgtagaatgtttgacttcaaacctcattatactgtcgtcatgaaaacccctgaagcgattgcaaagcatcacgaccctgtgagtcttatctgcatcctagtggctacctttattacacttcttaccccgagctccctgtttctccgatacagaagacgtatgactctttccgaggattcagatcgaattatatacatgcgtcaatgtctgttgtatctcccattcgcagacggggaatagataaaggcgaacccggtttcttagatgggtacaattcttttcacttctctccgaaaggatttgcccacttctttgcatggtggaggtaagcggttctgctctatacatgtgcaaatgtaatacatttacggaaagtgatgttttctgtgtggttctcagactgtttggaggcaacatgacactgcctattcgacaagggcgcctgtttccaaattctccaccaccatccaagaaatttgggaaagctatggcgactttcaaggtatgaatgtttcgttcaacatggtttcttcgcgacataatgctaaccatcaaggttttgcttgtccgttcgatgccatcagtatcgctttgatttatctccgcttttcatcagccacttataccgctatgagagcaaagccgattgggagtctggagaaggctctcttttggggttgaaagttcaactcgctcattttcaggccgacttacaccagagagaagaacagcgaacggttactaatgcaaagctcaaccgaactaagaaggtccttcacaagcccttctatgcggccgatgtagttgtaagcaaaaactgtcagcaactctggggtttctcgaatcgttctcactctgatttttttgacatcatcttttagctcgataatcttgaccttcgagctttgttcgctcacatcaaagaaccagaaaactcaaatgtgaagttggatgagagcacgtttttagacgacaagttctcgacccaaggcgctcctctctccgatccgatatggttcgactttgacgattatgtagagaccgactggcggcctagtgatcgaaaacccaaagtcgaacttcatcctctagcattatgccctcgttttacgtacacaaagcgagcaggtgactgttgtttgcctcgtaaagacagtgaagacagcaatcaacgttctgactcggatcctagacaagcatcgaagttcggtaaagagccttcacatttggttagttgtgtactgttttcctattttgaagatacggctcgcaattttagttataacttcttacctttgcttctatttacggaatacagtgttttcttggccaattcaaaagtatgtcccgctatctttctcctcagctatcatcttgggatatattgtccttcgtatgcatatgtgctttccgtactttcagtcacagttgcatactgactggcttgaaaaaatgtctctgaatctacttcaggtacactgggtgtgcaaaccgactttgctgagcatcgcagaaaaaatttacaggatatattggatcagtatcaaggcgacgatgctacaaaaggccgggattttatggcggatggggtctctgctgaggtgagtcgacgctatccatgccctagtagtacatcactccgataaatacttactgctttgccatcgacataaaacatcaatagagcgaagtctcagtacaggactcactaaaacaaaaaattgcagttcttgaccgtcacatccatgaacttcgcgagtctgacaaggatgaagatttcgacgaaaagcctacattccatgtgtcgggacacaaccggcaagaatctgccccccttgacgctgcctctcctagacacgctcgcttcggaaattcatatcaagctcactttcctagagtcacatggagtaatcatagtcggaatgtaagttgggtttcgaacatcacttatttccgcgttgtcgtgccacactcatggcttctacggggtttttagattgttctcaagtattactatcatgcgagagcatggcgtggatttgagtatcatatgagtagtttgtgagtgtcattttagactcgtcatttttcagctcttcgtgttgatcacgtttccttctctgaattttcttcagagccgtcaagtttatccgtgagatgacatctacatcctccaagcatccggatcaaccggctgccaacgaacctcacaagaaaccggccgcacctccatctccacctccagccatgaaaatacctaccacacaagcagccggagcagccctcaccaagggaatcctcaacatgatctctaaggaaatactgacaggtagtcgttcagaagaagaagaattaggacctcaacaaggacaatcacaaagaactttcattcaccgagacggcgtcgcacccacacctgatccctggacgggtcttacagacgacttcgaaattgagcaaagtcatcatctctcactcatcaagccacagattgccctctgtagcgttgtcgatgatgactcggctgtagttttggcggctctatcaacggaggtacagatgtatacagtctttgataagcaggatatggacgatccagtgaatgctaaggttatgcgaaggtgagcctccaaaataggatcaattaacttcttgtgcagggcttagatcaaaccgctttttttgctatatgatagaacatataccaacatgtcctctctccaagcattctatccgacaaagctatctgctctttccaatcagaaccgaagctctggttttgttcctttggagattctgttagactcacgtctgcacaatactgatgacttcgaaagagttgtgtctcacacggatgccgcaattcaatacgacaagttcaaccttcttcgattgcgaaacacaacagccaaggtcctctcgaaagctgatctcggagccgaacatcttcaaagtcataccgttcgtccatttgcttttttcatgatgcataggcattgagtaggaatacgttctcactatttgacccatatattccctcctacctaaccttaggatcttgtcgcagtacatgtccctcgctttggtgttatcgcaactccagagcagtttgcttccttctataatgttgtcaacaacttgctactctaccaagatcctatgtaagtgatgtctgagtttatcagcttatgtgcctacctgctcatcatttatcgtatactgctgtcctgctgtgttctagccaacaagcgaagaataaaaagcttcagaatttcgtctactctttcgaccattcaaatctctccgggactgccgatgtggttcagatcctccagcatcggattcgggaatgccagcgaatgaaagccgactatcaagcccaccatgacgatactgagaacagttccttccaggctcaacttaaagctcaagctggacaacttgccgaggagctcagtctcgtattcgaggcgatcgctgctacccaacaagtgaaggatgatcaacaaaggaacaataaatcggctgtcagatttgaagcgacatcgacagagatcggctggcatctcctttcgtcggagaagaatcttctagccaagctcactttgaaatctcctcaatatcaaaacttgagtcgagtcgatggctccactgttaatgaatttacggttctggatcttcaaggtatgttttacatatttcgttttcagagtaaacacctctatgtgttggatcttaatgatactgtctgtattcctagccctcaatggacatcctgaagcagtcttcccagaggcgctttctcgatggtttgtcgatggaaagtatcactcagtcagagtaagcattcaagtatcacctatgatgctagtggatcaaagttatctcatgtcgtcttatcgttatatcctttttaatcaagatgtccccgttcatcgtcgctgaatggactattcttgccccggtgagttttcgactaagacgctttgttgcaggaatcacacaactgaatcagtccttctgcaccctaggttggtggcatcagtatcgtccagcactttggtgagtatctctgttattttgaatcctactatcaaggaagacgctgattctatgttacataacgcttccaaatacataggtctccgacttcatcctgttcgtcttcaaattgaacggaagacgggtcgagagatgttgaactacttcttccaggagaagactcatcccaaggggtatgataacacgaccgagaccgagcagcccatggcccactcaaacccctcgatgtcgtctttcgctagcgaaacttccactgatctggccgccttgaattctcacactgcccctcgtttcagcatgcaccgaacatcaccggatgggtcctctacagttttgagtgcgcctggagagaacataagttcaatttcactggcctcctcgaatactggggtctctcaccctcggcccttcagatcaaattccatggcgagtctgacatctcagaatgaaagctctagcctagcatcgttgagccgagccgatatgcctgtatcgctgaccccttcggggtcacaaaagctgagtcggccaaggtcaagccagagccttcaaaagattgcgaccgagagagaaaagcacgagcagactcaggctgaggaaatgcgaggtaagagaactccaacgagagtttagaacttttagatctatcttgacttatgatctttgaggttcggtagtgcgagcttctagaaaccggacgttcatcgccattcacatagagagcacgtcttttgttctgagctacaaggtgcggctccttcctgctgtttttcttaatcaaggagtgtcctcaagattaaacggttctctttttggatgcttactatggttcgctacagggtgacaaggccaagaacatcaccgatctgagggatttccggataacctctcccgcgctaacattccagaacaagacggctagctttgaggacctggtacacgagttcaaaaatcaactgatcaaagccgcttggaagcagaaaggacagctcgtccaacagatctttacaaagacaggaaactcggcgcggtctccgccgtcgaaggggtccaccaaaaagcagtcactgaaggataagaggtcccttccgactcgactgtcagataatctaggcaatggttccttccttgtaggctttccctcttgttttatttttctcttagactgtcgataaaagtatgcgggctcactaaccgagctgaaacccaacctcaaatccacaggatcaacccatccttcgggtgtcttctccggtctcgatatcttcttcttcagtagagagtgaaccaggtcaagatcaagaaagcccaagttcgaattcggattcttcatctgcttactctggatcgggttcagtagatcacagtggtctcggtagtggtgacagtggcgggggaaataaaacgaaagcgaagtttggtggattgttgagacaggcattacatttacctcaagatcgcaagagagttcccaatctaaatttcgcttctgtaagttctttcccaattttcagtcattaactgtcctgcgatgcggtgtctgggaaagaggtgattgacgcaatatctctgggaatgtgaattctatagacaacatcctttacgtcgaacgtccagggcggctccggctagaccaatcatctcccttctcgcctttgtctttcttggtccattatagactctaaactcttttcttcctattcctttaactcctctcattcatgcatgccaatcttagtgtttcctcgtctgatacacatgctaatacacaactcaatacgacatatgttttctcttcaccctctacatatgacttttttttttcttttgccataacgacccctattttctttgccccatatatcatgatctcttttttgtctccttattcctcttggtttctcattcgagagaaaaaaaaactcttacccgaactccgaccttcaggtacagagaatgaacgaaaggagatatcagaagaatagaagagaaatcaacagaaccttcaatccacaagctccccatctatatttcattatcagcaatctatgaaacaacatccaacatctcctctactgtactgatcttctccgatcctgtccgtcctttcgcaagccctctctccaattcagcctgttcgatctttttccaagattcgtacgagatgacagattggcctgccgaagatatttgagaaggtaggccctggaggggcggagtttgaagtccgagcgaggtcttgatcggcatcaaggtagaggtctcggaggaagagggagacggaagagggagaagagaatgatcggacaaaagaagatccatagttgaataagcgtcgtacatggtggacgcgatgacacctatcggtcccctagagacccaacctgaagagtaaacgttggggatctttaattgtcatgaagaattacgatcgaagattagcttttcttcgtttgaaagcgtgcaagggagagaagaaaggcaataatggctgacaagcaagcaaaaaaaggagaaaaggggaaaaagaaaaagtcgactgacgggcactccatcctgatcgaccactctgcctgacatgtttctgattcttcccttgacttcatcaaacggaacatcttctagaccttctgatcgatagccaacactctcgataacaaggtccgtctctgtagtaatttcctctgccgtcggcattgccagtgcttgttgaggactcgtaaggtctggcgaatgaggtggactagggctaggattggaattaggcgcggttgtcgcgacaggtggaacgggtggactgagcagtgcgttctttgtccaagtgatggaaccaatcttgtcgggtgactctggagatggatcgaatgatttaggtgatcgcagaaatcttaatttgaatgtcccagtctttaaagaagaggtcgagggctggacgggaccgtttcccttggcgatgagacccagcagccgttttctcatcctggcgtccggagtaggtgtctgatcaacgtcgtgaatggcccgctcgatcacgtctttctcgattggctcgaaagcacatccatcgaggttcatcatctctctaaattcttttgtagtgaacgcaacctgaccggcacctcttctaccgacaacctcgacggtgtggacggatgattttttaagaatatcaagcacgctatctggaatgtcggtatcctttaaatcgtccactctcttaagcaagatcctcgcgcaatcgagcgcgacgttgccttgaccgatgatggtgacatgtctgacgttttcgagatctggtcgaatatgtcgggagctgggatgaccattataccagccgacaaactcgagcgcggtaaagacgttacgaagcctgccttttggcgaacccgaggagccagatacatttctgagtgaagaggagagtgaggaaccgtaggaaagcaacaagtgggtgtagtggggagtcagagagcgaagcggtagtgttgtcgtccgttcggccgaggccgagctgtcggctggaggaggtccgatatggacgttgccgaagaatcggaatcgattatctgactgaagaaggtcaaatttgtgttgaacgttctacgactccagagagacagacgggaagcgcaaaaaggggtaagctagggtacagtaagggtgagaagatagggtaaagagagaatcctaccttcacttccgggtgatccggagcaacgccatacctaactagcccatggggagcgggcaaccgttcgtacacatgaacctcgacatctttgccttgaggcgaatcttttgggagctgggccagcagacgggatgccgagtagagagctgacggtccggcaccaatgatggctagcttgagtggagagcgtgttgcgatggcggaggccatgatgttgatgggtggtggttcgatgtgtgagggatcggaaagatgatatgcaacaagactgacaacagacgtaatgcattcctttgctgactaaccaagtttgcattgtacattgctttgctattcattgaatgtctcaaatgtcctcaatgtcctcagttgtctcttgatgagttgaacagattgaaaaaaacattgcattgaggagaaaatggaacatctaaggtaggaaatgattgtactcgatgactccaactggctctgcctggaagagcttgagccagcctagagaatagaccggacgcctgtaagagctagtcatcgagagtttgcggtacgttctccccctactttcccagaaaaacaacagtctttgggatctgagcagtgtcttggatagagtaagggtgcttggatggagcgagcataaagtatggagaagaaggacgatgtggtatatgttgtacaaaaaaaattgggatagagcccgagaactactaaaggttagtacagtaccctctatctcggtttctccatcctttctccctgtttgccttcctcctgtccctgtgtcctcttctcgactacagagagaagagaacccagaaagagaagagagcagaggaggaagaaagaatggagaaggatggagaaggtaatctgttcaggatacaaggatcagtcagggcatcggaagccaggaacggcaacaggaacaggaacgattccccaggcacgtcgaacgcagcgtgttcttcggatggggatcattgggggtgacgaaggaacggagtggacaaacgctgacaggaacaggccttttgtgtccctgaaatttcccgtcagggatgaagctggccctgatgaaaatcgacgccccgactgcgccaaattttttcactgccctcgtgcctggttgcgtccctggtgtctcctttttttttttccttctccccttttcttctttccccccatcccgtcaagcctcaagactgtaagagtcaagtttcgtgatagaacagcatacagagcatacgctcaccttcttgttctactctcgcttcattcatcatcagtttcccggcacactctttaggttagatcctcctttttttctcacttaagtgggctcagttcaatagaaggaaggggagaagaggagagaagcaggaaagcaaagaggaggatggaaaccaagacgactcaaacagcatagagctctcttcctagacatctccaatggccccagtccactttcttgttccccagcaacttgtgattggagaagcaactgtcaaacaacacttggtggcgaaacatcgatcgatcgactaacattcgaaatttgactttttccagaaatggcttcccgacccaccgtcaccttctactccgaggctggagaggcttccggctccctcccccttcctgccgtcctcaccgcccccatcaggcttgatgtcgtgcagcaggttcacagtacgtttacgttccttcgactccttttgtccaaatccttactcacgctcttttctccgttcacctatctttctttcagagagcatggccaagaacaagcgacaggcttactccgtcgcttccaacgccggtgagcagacctctgccgagtcttggggaactggtcgagccgtcgcccgaattcctcgagtcggaggatccggtacccaccgatccggacaggccgccttcggaaacatgtgccgaggaggacgaatgttcgccccgaccaagatctggcgaaagtggcacgtcaaggtgaaccagaaccagaagcgatacgccgtcgtctctgctcttgccgcctccgcccttccttccctcgtccttgcccgaggtcaccgaatcgagcagatcgaggaggttcccctcgtcgtctctgacgccgctgagtcttacaccaagaccaaggaggccgtcgctctcctcaaggccaccaacgcctacgccgatgttgccaaggtttccaactcccgaaagctccgagccggtcagggcaagctccgaggacgacgacaccgacagcgacgaggacccctcgttgtctacaacgaggacaagggtatcgtcaaggccttccgaaacatccccggagtcgagctcatcaacgtccgacgactcaacttgctctccctcgctcctggaggacatctcggtcgatttgtcatctggaccgagggtgctttcggtcttctcgacgaggtctacggaaccttcgacaaggcttccaccctcaagaaggactacttcctccccaccgccaagatctccaaccctgatgtcacccgactcatcaactctgatgagatccagtccgtcctccgagctgctggtcccaagatcgccaagcgacctttcacccagaagaagaaccctctccgaaaccccgccaagttggcttccctcaacccttacgccgcctccgtcaagcgagcggccatcaaggtccaggagaagcgaaccaagaggactggagccgccaagaaggctgttgccggtggcaaggccggagagtccttcctctctacccttcactctgcttaagcgagcgctttccatgtttcattgcgtttctcttgtgctgtagttttaggacccccttccccatcaatttttttctttttgggatggaattttatgacccattaatgatcattttcttccaaccaaaatattgtgtctactctccctgcgacgaaaacgcgagacaattgttcctccaagaaagcttcttattcccagaaacaaatatcgaatcaactggagaaagaacttatggaaaacaaataaaattgccagagaaaaaaacatttgttggctgtctacgtactgatggtaccagctagttggtatccgtttgtggttgtgtataagcttaagagttcatgacgttcatggggtctccctcctctttgtatctgcttcggccggtcctttgatcaatcgtcaacggacagaaagaaaacacccacacacatatggaggtaaagagcatacagtcatgggaattgttatagaagacgcattggagaaataagctaattgctccgaaccgagacgtgaaaagaaccacaatcagagaccaagacaaaggaaaggaggagggggggagcgggagaatggagagtcgaaaatgagaggagaggaaaggaaaatggtgataggatggtacttcgccacgaaagcaacgaatcgaggtagagggtaggtgaaagaggaagaagagaatacagcgagcgaatttgttcataaccccaagtttgggtcatcgatcgttatcagacttttccgaagaattataagtaagacagataatccccaggaagggccgtcagagttcagctttctttacgtcaaacgtcatgaagaagcgataaagaagggctctacctaaattctttcatcaacacgcattctcctccattctcaagatcgatactgtaggcgtgaaacaagccggacgcagaaataacaaacacctgaggcgtagtgctgtatggtgcagaaagtgtagaccgaaatatctgcttagtagcgcgtctcttcttctcttctttcttacttatccttcagtgaataacagtttaaaacatagaaaaacggtcagactaacccgcttaaagcaaccacacacctcactccaccacccctaagcttgacatgcgcaaaatctctctggggctcccacatctccgttaccgcgctcggcagataaccacccacgcttcctgcaaggtgtttcccaaggtacatcgatctccttcggaagctggccgtcgcggatgaggaaggcacaatggcgttctctgtcgatcttccatttccattcccccgatcaactccatatgatccagacgggtctgtcagagatgaatacgaggatttcgctccggcagacgtgtcccctatgacaggcggcttgggcaattgaaatatatggattgtatccgagtcactgctcacagcaagaagcgtgctcatcaggttaaagttgatgctccagatctttgccggataacttccccgtctgaactgggcgactttctccgcgccaggaacggtccacactctgataacagttcccttatcggaggcggttgccaggagagtgccggccgagttgagaacaaggaacgagatcggggacttgtgggcttggatcacgttcgaagccgatagagaggttgtatcaaacaggttgacatcaccaggttgggtcgacggctggggatgaggcggttgggatggggaggccaggggagacgtcaatgtcggaacaggagcagggtacgcgacgtaagagtttgtggacgagggcgacaaggcgcatatagctaaacgagtacaaacacgaattcctcatatcagcttttcgagaccaatgaaatcttttaagaatcaaattcaacaaagagaagctcctcaagacgaaccattcggatttggacttgtttctatggtatgcatcagcttcatcgtgcttacgtcgtagatatagatttccacttccaacacaacgaccatccgtttcctgttcagcttgactgccaagatggatgtcggaaagagaagctcgcagattgtggattcgcgctggtagaggattcgaaattccagtacaacccccgaccaaagatagaatagggtgaatcagtgattggtctattgtacagggcaagaatcgaaagggagaccaggagaaacttgacacggcctaccttggtattgacgatgtgcaaccttcgagggctttctttgggttgatctgccgctcctaccagagcgaccagggatgtgcagaacaacatctcagcaatccctgtggctccttgttctaccagtgcccagaacgagttcattgtaaccagacggacggataacccgttgatccctgttcagtattgaacttgacactgatcgatgcgagatgtcttatcatgacgcgtaccttttgaatgaatcttcccatacggatcacagttgatgatcgtgtacccgttcttcgttcctatcgagatacatctaccaccctcaatgtgatcacaccagagtaagaagccatcccgtgcagctaggccgatggaattaccaaaactacgcgacaacacgttcagatagacttacgagtaatcctgattgaatcctgcaaagctaaagactcgaagaagagaggcagaaagaggagttacgagctcagtaatgtctctgactaaacgctagagaggtgaaacaaagcctttgaaacgtttcccggaagagaccgagctgtgaagctatactacaacgacgtacagtagatctggattctgcttggtaggggccatagatgacgagacagattagaggaggagattgagagtgttgaggatgtgtgaggtgagcgagagagagatgagggtatggactgattggatgttggtggatggattaaagaactgacgacgaaggctgatgaatcatctctagaacagcaccttcagcgcaccgccgccgtcagtccatcttctttctttcttctttctttccttcggttcttcgtgtgctcgttcgaagtgttctttcatcattaaaggcatcaactgttttggtacaagaaagcagagagaacaatgaggtctgtgttgattaaagtttagccatgaatcatgtttttcttttcttttcattctctattctacaaacgcactacaccgacttttctctgtcttctctttatatttaaccgatacaatctgaacgggaaagaatcaaaagaaacacaacaacagaacagagagcctcaaggaccgtctaaaccacttcagccgtgtatttattcctgagtagcatcggcgttgtaagcgctctcgtgaatcttgactgctcgaccggacggatccgaactcataccccaatcggctcgaggaatccatcggacggcggtcttggcagcagcttcggacgggaagtgcttctcaaagacctctcgaatccagtaagcctccttggtatcaggagtatcgaccgaccatctctcaccagccttagcgagctgctcatcagtaatgtgagactcggcgtgggccttcatgccatcgatccaagagtaaccgactccgtccgagaactgctccttctgtcgccagagaatgcttttcggaaggtagggctttccgccatcgggggagcagtcgaacgcctttcggatgatgtacttctccattcgggggcaaccatcttcgtccacggtctggtgagcacccttgctgaactccttgtgcttcgcgtcgatctgcatagcgacctccaagaacttcttgtcgaggaaaggaactcgagcctcaagaccccaagccatggtggacctagaagtagatacccaaacgagaactagtcagcttctttatctttcccaaaagtctattatcaatggaaaaaaagacgttgaaagaaaattctcacttgttggctcggaggcagtcagcggtgtgaaggttcttgattcgcttgacgagttcctggtggaaagatttagaatcgggcgcggcgtggaagtagaggtaacctatacaagaaaacaagaagacggttgatgagaacacagttgagcaacctgcacataaaccggtatgctaacataccaccgaagatctcgtcacttccctctccactgagcaccatcttgacacccatagccttgatcttccggctgagaaggtacataggggtactagctcgacaggtcgtcacatcgtaagtctcaaggtggtagatgacatcctcgatagcgtccaaaccctcctggacggtgaaggtgtactcgtggtgaacggtaccgaggtaagcagcggcctttcgggcagccaaaagatcaggagagttgggaagtccaatggagaacgaatgaagctgaggccaggtggccagggaagcctcggcttgaacagagctatcgggggtagcggttccggacggtcctctcctaagagcctgctcccgagccttgtgttgggcctgggcgaccttttcggtttccctggcggcgatggcagcaataagactggagtcgagaccaccagagagcaacactccgtacggaacctcactcatcaatcgcttcttcacagccatctcgagggtttcccttaaagccttgtagtcgacgtccccagtgggaacctcgccgacatcgctgtcccaccaagtcggcttgtagtatcgcttgatctcaccggtggcagagtcgtagaagtgaccaggggggaaggcaatcaccttgtcgcactgatcgtggatagccttaagctcggaagagaagaacacggtttctggcgagcttgacttccatccctggtagagagtagtgattccgatagggtctcgggcggcgattaatcgagcgggcgagacagaggtgtcaatcaaagtgaaagaaaacattccatccaagctggcgcagagctgttccggctcggtctccttgtactatttgacataagttgaacatatgatggaaggaaaccatactcgttcagatttcgagttagagagaaagtgtaagggtaagaatatcttcctgctgaccatgtgcatgatgacctcgcaatcagagtgagtcttgaaggtagcaggcttagtgagcgactttcgcaagtcgaggtggttatagatctctccgttgacgcaaaggaagatagtctcatcctcgctcacaaggggctgggctccggtatctaatttgaaaaacaaaaaatccaagaaagttcagcggttataaaggaatgaaaagaggagcccaactccgtctacaccctctcatggagtctacaataagtctgttccgagagtaaagttgagccagccggaaaaagaggtaaagagaacaaaactcaccaacaccacagatagccagtcgctcgtggcagagaagacaatctgcctatccggtccgagagaggaagaggagaaagcagggagaaaagagaagaaacccgaaagaaaggtggcgcacgataagaagagacatgaactgtcagtaaatcaagaccttaccagaagaaagatagtttctaaggccttcgagtcactccgaagagaagagacgactctacaggctgatgagcagaagaaagaagcatcatcacccacagaaggaatctgaacaaggccggtccaatcgggtcctcggtgttgctgtcgcttagagagagcgacggcctgtgctcgagtgatcgagctgttgttcttgaagcagcagaagataccacacattctaatgatttacctgcgtacttgtatgagtgagtgatgtagagattgatgaagttgaacagaaagaaggagaatgagcggaaaaaaaagatgcggcttcttttttatttgacttgggctgaacgaaaaatcagtgactcgggcgatttttgaaattatttccgctcaattcatgtttcttcgttttcgagtttttctttccgatcgttatctttcagctgatatttacacacacacacacacacacacttacgtacatatgcatggtatcgaatattggtagagagagaagcagacaaccagcttcacagatagatctaagagtctccatcttcatcagacgaatccatcagctcgtgaacttcgggcggctgcggtttgaatacaccaggctcgacatccattttgtcttcccggcgcggaatctctaaagaagtttctgttagcttccctttcaatgagaccacacctcccgagcgagtgaatttcttgtctggtaacgattgagtcggcccagacgagtctttcggaatgatctgtcggaggtttaccatcgacggagaggactcttcagcttgcgatacagacgagcttgtactcgcgggcacagatctaggactgggctgagaagtaatgttagggacagaagtgctggtcgtcgatttgtctgtgggtttcttcgcgcccgagattgcagtactagacggagcagaagccgtcactgatgagggtaaggcttcggtagatcccccgtcctctattccattttcttttctccactcggcttgcaaatcaagtaactggttcttgattgactctctctttgttggtaattccgactgccgccagaattcatttctatccgccgttctggtggccttgtttcgatttggaatagggtgctatgtgagaggatcaaataacacgcgtcacacgattagcagacgatcacttgatagacgcatctaagtgaaccagagagacccaccaaaattttctccagtgctgcttccgggtcatcaaagaagacttcgatgtagtggagcaagtacactccgcaggatgaatagtcaggttgtaatggaacctgtatcagaacgactcgaagtcagtatacgaacatctaggcagtcgaagagcagatcctctctcaaaacgatatcgatgaccagacgaacatcaactttctttgtttccagtggagtgacctctttctcaccccatgccttgtggaaccccgcttctgaccgcagatatttcgtcaacacttttctcggttccgaccggggcgttccgaacgaatcgaaaatgagcacatatggactgtgtccaaaccaggccacagacgtttaatgtaagctcaaatcgagaaaagtacgaaggatcagagtaaaataaaagaaagggaaagaagagcttacaccgacgatgcaggggcgtcggcacctgacatctcttgatcggctccatcattgccgtcagcaacagcaccagcggcctcaacgtcttttacctctggttgtacagcagggtctctcaagagggcggatggattgacgataacggcacaataccaatggtacctacggaacgatcaccaaaatccgacgacggtttattttgttcttctcagtcgctctcgccacaactgaaggcttgatgttgtaagaagcagaatccaaaaacttactcttcgttgattggcacgacaatatactttttcgaaaacagatcgaccttgccgttcgtccaacgcttgaccgtctcccaaggatctttcccagatttgataacactacgaggataggaagacacaagaaataagtcttcagcccagatccgtaatcaggttataagatggacagtggacttactttcgatcggtaagtttcatgtataggaaagagttgaaaatatgcacctcgtcggtaagttgcggtcgcttttcgacagctcgtctaaacgtttccctttgaagatcaacgccccgtttacaagcaaaacatcagtttaactcccgaaagaacagaacgaaacacatactcacttcagtccgaattcaatgatggtatcgttaaggtactcagcatcccatgtcgtccgatagaaatctccctttgtgatattgatctctcctcttccttttgctggccacatacacatcctaaatgaggaaagaatcagtcaaaggaccaacaaggttaagattaacaatcgttttcgctatagtgaagataagataacctgaaacgaaagaactaagacacgaacagagtttcaggatcaaccggtggtggtggacgactcaatgcgtgaagagcgggatcatcctccgcactcggttttggctccgatttctgtgcacgctccgctggcgcggccaaccgagtacccgatctggtggattgccttggtattctattttggttgatgagaggaatagaaattaaacagacaacaaaaaattagggaacaggacgggtagagtacacaagctatgcttggtcaatgaaacgaaggttttattgacttacgcgatagggatcggctccttatttggataaagtaattcccacatctcatgaaacctcgactctgtgttgtttctgtatttcgtcaaaaaaaattaaacaaaacacatgtcgagagaatgagaccaagaaccaagaggtgaggatcttatcaaaaggtcccctccgcaagcacatacacccaaagaggaacgttttctgaggacatacgcttgaaaactatacggaacattacgtccatcgacaccaacgaccagtaacgaaggaacccgttcccaatcgtccaccgctgacccatctattgaaatctcgaacaccgccttcttggtttctaccttgtcagctgttattgaaaacgaaaacatatgacatgtttagtaacgcgcatattctttcttatcatattttagtatatgaagaccaaccggatgtaactccgcttgctttctctctgtactcaacctgtagaagcagaggtttctcgtactcttccgataactgtacgcaattcgaaaaaacgaccgccggtcaagttgtcaattaaaaaatcaggaaaggactgctaaaggcaaattttgacaaaccatgacatgcgtgacatcagcgaaattgatcgtgaatgccacatgctgcatggaccgcacttgaaagctcgaactggtcacacaaagttttgtgacgcgcggttcgaggaatgatgatctctcgacaggaagagcaacgtctccgatatttatcggccgagtatcctgcgcttttagaaacgaagtttctatttttttcttcacctttggcactgtcgagcttgacggtttgattgattctccctgtcagagtcgagaaaagaaatcgaattcatcatatatgtggatgaaagaagaaataatcaatcaatcgaccaattatcataagcgaagatgcccttcagataaatgagaaatatcttgaaaggaaatctaagactgaccgatctggacttcagatttgaagcgagtctaggagagacgactgtcgagaattttagtaagctctgctgtgcgctggcacgatcattcgctgcctcttgttgttttctgacagactgccccatctccttgtctctatttcgaaccgttgccatatccttctcaatcggtcttctggatctctccggcgcaaatatcggacaaggctcaaagctttcgcgtaggggcgtatgtgttggtaatgaagggggaaggggatttgacgactgtttatatcttggtgcgggtgagaacgaattgattggatcatgcgagtcgtcgtccgagtcagggacatcaatgggtgttgtgctacaccctgtctgagcaatatcctgccaatgatctctctcgacctcgccgcttgtcatttgaccagattgatgatgcggtacttttgtcggtgaatcaaacctctgacgcttgatctgatgttgccgatagctttgattgtggttatagttgtggcgactaggatccattgaaggagagattctgacgtctacggagggctggtgcctctcgaccaatgcactatgagctgttgactgattaaatgagacagcaaggacgggagaccggctgatcgtcggtggcggacgggagagaggtgtggaggaagttgacaagctgtttcttcctagtgtgaacggctgttgattcacaatttcattcataagtatagtcagccagaaagaatgataggccattcgagctctattctacaaggaagcagaattcacttacactattaattgcgcttgaacgtttcttgatgattgtgaagatatcggagcgcaaaccacacacacacagatgaacaggtgagcctttagaagttgtggtcaaatgggtgaacaaacttggccttacaacaggttgcctatagcttagttgcgcgggcccacgctgtccaggttgaggggtgatgatcgggattggctttggttcggtctcgtaaattggagtctgcaatggtcctgtccgggaatcagccgattcaactctccgaggccgaggatttgtatcacttttggaaaggcccatgctattgatctcactactcacgaccaatcgtatagcaaaccaagtccgagtgagtttagagtacacaagaaggaaaccataagcgacacatactttgagagactcaaccgagccctggaactcccctcactgggaccagcgtcattaattggaagtcttgtgcgtttgatgattatcccgtttgatgatcgaggaatatcgagcacttgcaactcatcttcttcttcttcttcgtcgccatcatcagccatgtccatggtttgagaaccatcgagcattcggatggacatctttccattagaagagagagcgatcctgttcaagaggtttgtacgaggatgttcgggcgcgggacggttaacatgtccgggcgttgatgttccagcgacatttacattcgttgaactcgatgtggaaacgatagccatatgatcgttcggggcggcgaccgacggtcgcttccgttttgcaccgaagcctggaagtagatccgagagagctcgctgaaatgatctgaaaagacagaaagagttggcagagacagtgattcaacagaagatgaaagacatcagtcgttttctctaatgatgacactgtgacaggagattctctcaggatattcgaatactgtgtgcctgtccgacatccggtatagccattctacctggtgcaagtcatacggagaaagatagagaggacccacttagatttctgaatatgtggagctctttgtccagtagacggcgtgtagaaaggactggagtgatgatgatgattcggcatcacgagagatctccttcctctaaaagtagtgatcttgtgaaggagaggtgaccagcaaggcgggagagatagagcagggcgtcttgacgaatcactctatccgaggacgaaacgagcaaacccaagatggatctgactaagtattatatctctgcccaaatggcctatgctttgacaagaggactatgccacgattgatagaaggaacaagaggaaagatagacagagatagaagaatggaggattagctgggtgaacgatgaggaaggattaatagcccgtcagagtgagaagcagcttaggaggtatcacgttaagttgatgtataacagatacaggttaagaagtataacggcgaacatgctatgttttatctctcatatcatggtaagatgctactgcgtttcgctgtgttatattttacatacagcgctcaatataaatcttagtgcgtaatgtaggtcgatattttcatcaagatttgattcatttggcaagttttcgcgtcaaattcacacatgaaatcatacttccggctgccttctttccgtcagcacttgccgtcagcgaaccacggagtcgaccaagatcaagaacacatacgatgccggttgctccttcatcaatcaagaacgcatacaagcggtcggatgtgtaccgaaaacagaagagggagaaaagtcaggataagctgaggagacgattggaaaccaagaaagacgaggcttctgccgatggtggtgaggcgcgaaagaaggtttgttcagaccatccttgtgcttctcttggcttggttcactatggatagagatgctcagaggaaggtttgttttcgtatttggtagaaacgagtctcaacaaacatcccacgaacaatcgacaacacgagagagtttggacattcgtacttgacgtccgatcccacggccagcacctccacctctgcgttgaatattgatgataataactccaacgaggacgaagatggaaaagacgataacgaagccggtccgtcggcctcctctttccctcccgaagaagatcttgagggagggattggagcaattccttcgagcagaggaccgggaagggatcccagagtgctcttgacgacgagtccgaaagcaaccagggagacgtacacttttgccgaggagcttcgagggatcttcccgggtggcgaatttttcaagcgaccggtaggaaagtgagtacacagtttttccttcctcgttttcattccgtgtatgcaaatggacaagaaggaacttgagagtacacatgttcgctctggctgacgacttgtccggccgacgtccttattttgcattctctcttcacagaggatttgagctggggaggatctcgaggtgggctagtcagagagactacgacgcggtgattgtgatcaatgaggaccgaaagaaacttagtgagttcgactagaacgtcaagacatacatgtgggtcaaatttggggaatcaagtctttgttcgctaagtacacaaacttttggtatcgttcctttctcgcttctcttgcttttgaatagatgccatcacaatcatcaaccttccgaacgggccaacggcgtatttcaagctgacatccgtagagctctcaaagcagatctctgttcgttttactttttttatcaactctttgttgtcttcacactcacgcataattgcatattcatctgggcatccatagggacatgcccgaccgacccctcattcgcccgagttgatacttaacaacttttcgacccgattaggtttgtctatcggaaaactgtttggatccctcttcccgccgttgcctcagtttgaaggtcggcaggtcgtcacattgcataaccaaagagattttctctttttccgacggcatcggtgagtcttggtcttttgtttgaacctttttttcccttgcctgtcttttgctgttttgtgttttgtgttttctttttgctgacctgaaaggcaatatgtgcgttgggtagatacatgtttaagtcactagaaaagacggctctacaggagatcggaccgaggttcacactcaaacttcgatggttgaggaaagggctgcccgctgtcacagcaggaggtagtatggctgtggatgtcgctcctggagctgacgaggacgaggaggacgaggacgaggctgtcaacgtagaagatggggaggacaagataaacgatgagaacgaggctgaggctgaggacaacgaaaaggaacgcggctcggacgaagacgaagaagatgatgatgatgaagatgaagaagatgaagagaagaagacaacgaaaaagtccaaacgggcggttcctccgttgaatgcacagggcgagttcgagtggaaatggaaggttagtccgcatcgcgtaatgtctatcatttttgtgaaagctttctcacaaaactgactgaattgtctcttggtggtgggcgcgcacgtacgtttgtgtgtttgcgcaaaattgttacatcagccgaagatggaggtttcaagaaagatgtttttcctatgagcttccaggcccatttgttttttattatcgatgtgcttttcttcctgttcactcgctatgtggtgtttatgtgtgacccagatcaaaccgtggacaaccagtctaagcaacgaaagaataataataaggctacggccaaaataccaaaggatagattgactacaaaccggaacactgtgagccaaaaaagcatcgctggccgggattggcaaaaaaaagcggcgaaagaaaattgtgcaaaaagtttttttccttgttatctttctttcagtccggccggtctgactcgccgcctgttcattctctcgttgcttctacctcttcttcttcttgaccacaactctcacacacacccaactccataacctccatctcctccgcctttgcatgctctacacagaacgtgtatcagacgactacatctcggaccaaatttacaaaacagccaacctttaaagcgaaaaacaagaacaagcaatcacctacttacttttttttcccttatcaaacgccaatcttctcttatccatcttcactttttcttcgttcccttgagaagaaaaaaagtcccattctcctatcattcaagtacatcccatccagtaactaaaagaaaagaaaagaaaagaacaagatgtctgcctctatcctctcatctcttcgattcggctcagtccgatcactcgctttcgcccgaggactcgcttccgcttccccggcctctctcgtcaagggcgtgcctgctgcgttgcatctcaaatccggacaatccttctatggaaccagctttggaagcaagaagagtgtctggggagagactgtgttctcgaccagtatcactagctgtgagtgacccttttgtgtctgtagatggccttctgtgggtccaatcagttttgtttaatctctagatttttttccctcctccagacaccgaatccatgaccgatccttcctatctcggacagatcctggtgttcacaacgcctttgatcggaaactacggagtccctgataacactcctcttcctgaattccctggaattcctcagatggagtctgacggagtgaagtgcgccggtgtgattgtcaccgacgttgctctcaagcactcccactaccttgccgtcgagtctctccacgagtggtgcgaccgacacaatgttcctggaatctctggaatcgacacccgagcagtcaccaccatccttcgaaaccagggaaccactctcggccgaatcgctgttggtgaagaagaggttgcgaaagaggctcccaaggctgaggagtactgggacccagccggagagaacttgatcgctcaggtctcgactaaggagccctatgttctcaaccccgacggcgatgttcacattgccgttttggatcttggtaccaaggccaacattctccgaagtctcgtcaagaggaacgccaaggtcaccgtccttccctggaactatgacttcaactcggtccgagatgaggtcggtctcatttcttaacttttttttacatctaaaagtcatgctcaatctgattttttttccctttccctctacctagtttgacggattcttccttaccaacggacccggagacccgaagtcgatcatggacgttgctctcaacgttcgaaagaccttggacgagtggaagaagcccatctttggtatctgtatgggacaccaaatccttggtctggccgccggtatggaggcttaccgaatgactttcggtaatcgaggtcacaaccagcccgtcttggctcttgctagcagtggaagcatcaaggccggacgggtctacgttactgtatgtcctgttctttctcatttgggatcttcagaagtagtttgtgtgcagatagctgatctgttccatttctctcattagtcgcaaaaccaccaatacgccctcaaattgactgaagagttccccgaggactatgctcccttcttcatcaactgcaatggtgagcttcgtatcttgtagacctgttcgttggtcgatagactgggtgttaacatggcatggatatgtgttcctttctccttcctctacagattcctcggtcgaaggtatcatttctactcccgagtcgggcaagcaggtctggggttgccagttccaccccgagtctgccggaggtcctctcgacacaatcgaggtaagtatctcggacggaccctcctgatatggcctgtaagaacccctgattctgactgcaccgtaaaccgttatacttctttactagatgttcactgacttcctgaaagcctgccgaggaggcaaggatggatctgctacgttgacggctgaaggcaacaacgtcttgggcgaggttcagaaggtcgttgaggtttcagcttaagcgaaaagaaaataagattgtttagccggaccatgcagctcgttctgtgactctctgttctttcttcgtagcagatgagatgcatgttgtaatcatatctgtcaccatgagtatatgggtgtgcatctgcatatccagagcagcagcggcatcagtagccaggtttgttgttataccaattgaaataatcagccagtatcttctgcaaaccaagtgaaagttgagagtatctgacaatgagagaatgcgataaaggttgagcgagacccgaagtaagatacaccgagagtagaagagaaaagaacagaatgacaaacagacccaagacgatccctcgggacaaatctccatggagctaatcccgagagtgcgggcgggcaaacccaatatgtttgatcaccttcttcacctttaccttctattcacctccgaccgacaaactttctcttcttcctcctttgcttgtcttctttcttcatctttttgcttgttagttctcctctaattagggagattaatctctcaacgaagggattcatccgggccattaacgtcggctcatacccaagacatacttattcaaaataaagaaacctgcaatcgatagtatccccaagagaaagtgagaagaaccatgccagacatctcgtccagcacatttcagccaaaggctaggcagccatacattcatccttcgacatcgttctcaggctcgctatcccatcaaatccagcctcaagttcacggacccaatgcgtctcacagctggaaggacgtaccgttacacgtcgcaaatgggaatggaaatgggaatgcaaacggaactgcaaatgggcacggagttgggaacgggacttctgttacggatgggcaaggttcgatggatggcctgaatggaacgaacaatggtagaagggcatcgagtccttcactcagcacaggcagacggcctcctctgtcgtcgacgctgtcaaacgcgtcttcctcgactggttctcttggttcactcaaatcatcacccttgtcgtcgatgtttagattcgcctcggacttgctgccctcctcagtcaaatcatcttcagtaggcgtagcaggaaacgtcaagttcatcctactttgctccttgtggtacatgtcatctgccatatcttcaaacaccgggaaggccatttttaatgtcttcaaattcccggtcaccctgacccttgttcagttcatctttatcgcctttttctcttgggcatggacgagcccggtgattggaatgggcaagcttagaagaccgagtaggcagctcttgagaggcgttttgcccatggctgcttttcaggtaggaggacacgtgttttcgagtgtagcgacgagtagggtccctgtcagcaccgttcataccataaaggtttgtcctttttatttcatccttcgctctcttcccatctcagttgtgttcctcttcctatagcaaagatcgcagggattgaaatttaccaccttgtcatctgtttccttgcaggccttgtctcccttgtttaccgtgttgtcgtatcgatttctgttcaacgtgtcatactcatccgcaacttatatgtcacttgtcccgctcactttgggcgtgatgtttgcctgttcgttcgacgtttccgcttcgaatgtattcgggctggtttgcgctttcggctcgacgttggttttcgtttcatccaacatattcttcaaaaaaatcgtcccttcatcatctgcgccatccggttcttcaaaagacgacccaaacggaacgaatgcaaagttggacaagatcaacttgcttttctactcgtcctccctcgccttcttgtttatggttccactgtggctttactctgacgcgctcaacatcctggctgattccgctgaccgagccgccctcgtaccggccccaccgtcaaggacgaagacggttctctactactttgttctcaatggttcttcccactttctccagaacgtactcgctttcactattctttcttcgacctcaccagtaacgtactcgatcgcctcgctcgtcaaacgaatcgtcgtcattgtcatggctatcgtctggttcagacagaccgttcaccccattcaggccctcgggatcgggctcacgtttgttggtctctatatgtaccaaaacgcaaaaggcgaagtcgagaagatggaaaagaaggtccgaaagatcgaggccatcagggacggaagtttcttgccatcgagcaacggagatgcctatttgatgtcgaccgagaaaggctcgaaagtagctggtggcccgattggtggagatctcatcgcatccgcatttggcgctgtaagttgtttccgtcgtttcgttcttttcttcttaccgttcgattttcatgaatgaaggctattgatcagagactaatgctgtgaaatgtcttctttgctctcttggactatcaagacatcgtcgaacgacgtctctaggcagactggcccccaatttcttccaccaccaccatcgggcggattgaactcttcgttacggaatcaccatcctcatccgccaacaaggctttatgcggccggacctatcaaatcatagaatcatttcatcttttctcttcgctctagactcgtgtttctttcgttgcgtttgtccttgatttgtttcgaagtttgagatatcctttcttttctcttctctctttttttcgggacgttagtttgtctaccttatcatcatctgatccctttctcgtccatcgaaagaagacgacacatcttttcttcttcttccttttcgaatctgagcatttcttcaaagtctccattgggttctccctttctgctttcctccatatggcctctttgcctaaagaaaaatagcgacaaattgcgttcaatggggatttgggctagatatctctttccgccctcgtcggatgagttcccaagttctctgtctctctcagtatttctgttaatattttttctgtccactcttcaaatagaatataactttctgatcttgcctgctagcccatccaaagatgatcgcatgtagcgcatagaagtccatcggcacagctttctgtggcgtcttagctgaacagggtagcgatcccaaagcttgactgactgaccgcccgaccttcccttttctccaacttcgaggctcatccttagaatccctatcctttctagcttcttcaatcgcgaccgtttcggttcagggaagcacgttcagtttgttagcatcatggtctacataaggagctggcagcagttccaaatatcagttcaccaggttcgaccgtccatttgtgaagaatcattatctttcatccgtactcgtggtgatggagatctctccttccaagcggaaaagagcacgcgaacgaacatgctaataagcttcttattcaccttctgtcttcgttttacgataagttatatgaaaagagtcctcagagtgtgagtttgttcatgttctgaaggaggaaataattcttgatggaatacatcatgcactcctcattcaagacaagagattgtgtttgaactgacctccaagacatcccgcttctcttctggacttttctctctccctatatgtactcttatcacggttgaaaacacgaacgaaaccatgaaatagacaagatatagtatcaagtttcgagcggtcgatggggtgctagtccttaaagtgacggatgataacaaggttagtattctcttctttttcttctctttctcttttctctttcctcttccatttctaccctttctaggatgtttttttcccttcctgaagccatagggactcggacatcgattctgaactaatatcttgtattctttcgctctgaaatttctcatcttgctcttaaggtcatctctcacaagacaagatcttccgtcctcctgaataggttcgagcaactcaacaaaacgctcatggcacgaatgatgaacctccctttggctcctcccccttctctatctacgtctctaccgaatttcataaatccagcatcaaccaccaccaacctgctttcatctagtgcagctgggttggattcaacgcatatacccgaaagagcagaaggaactgaaggggctgagaaggtgacaagtgcgggtgcagggtcaaagaagaagaagaacaagggcaagaaaaagtagagatggatgtatgtacgtgtttgaaaatccaaacgtataccccgaagagaaagagattgaatccttggtaagatgactatcaagatgtggatactgtcgaccacctggatcctatcatcgtttctctctcctctttctttatcgtcctcttctccgccagaaagaatcttgaaattggagaaagaaagctgttcccgactgtgactatctttgagacttttctcgcgctgactgttctcgaccgttaacctcatcttgtctcaaccagccgggtcagttaggtcagagtggctttttgttttttactcatagtgatctggtttgtttgattgtgtctctctctcggagccagcgcatgaagatcaacggcattcggatatatagagccagattgacaaaaaagatatacgcaggcaaatatatggagtagttcaagatagaaaagaggggaagggggggccaagataaaaatacaggaccgtccaactatatatatgtccgatcaatcctttttctcaaggtatttcttctggggtcagcagaggacttgaaaagcgtaagtgagggagaagaggcaaggaaaagagagggaaatcaaggatgtgatggtgcataagaagagtgaagaggaaaagcgagaaccgcatgtgtacggagcactcaaaggtgagagtattatcagaagagtaaacaagttgacaagacagataggggagaaggatacgataagaagaatctgagtccagctctgggagttcttctacgatctatatgatcgtccgacagtatcttccaggttgtatctacgggttacgccagttgctgtagctgaagcggaagccgagatcgtagtctgagtagccgaagcggacgcccgagcggttgcttgggcgggggaaagacactggttgctcagtgcaatatcgctcggaacactgtggccactcgtcgagtttgtgtatgtggggctgtacacctcgatggcccagcttcctccgcaaagtgcggttgaaagaccaccacctgtgacgaggagggagaaaaaagatacggtgagcaacctggtcgaaaatagatacaagtccaaatggatgagacgtacaaggtgttgaacaaagtagactagtggtcgagatgatgttcaaggagcttccacagtagcactgggttccaccctccaccccggccatcgagtaaccagtggaagagcagtattgagtacagagcaagggcgtcatcaatgaatgagtcaatgtgtcgcctgagagggtcctatcccaattatcggtgtaacatcccgcgtccgaccaccctgtagtgacgaaagaacacgactggtcagcgacaggacgccggaacgaagtggaagagggtttgtgcacttaccagatattgagggaatattcacatttgtgaacaacgaggacttcgatacagtcatagcggaactaccaccgcacgactcggaagaatcaccgggacctatttaacatcaaagaaagataagtatacagaaacttttgaggatacaaacgtagatcgagaattggacgcaagacttacaggccgtggagcagagactagagctgacatcagaggatgaggataaagaacttccacactaaatcaacgagaagagtagcgcaaataatggaagaatgagaaaggcgtcagtctaatggtcgacggaattatgtacggatttacacatacgtagcatgtgttgcctgaagtaccggcgaatgcgtaacccgcactttcacatcgctttgtgcaaagagtttgagtcatgctagcgtatgtcgaagaaacaccattgaggactggcacatcaatcggagaggtaatccagcatccgacgtcagaccagacatcagtcgattcttcgctgctataaggaccaaacaccgtcatggcctggcttcctccacaagtctgggtggtgtttccagcacatgaagtggtgcaggacgagtcgagcaagatgttggacttggcgagggagttaccgcagaagcagtcgaaaccctctactccggcataagtaaatcctttcgaagaacagtattgcttgcaggtgtcctgggtcatcgttccgatagagtacgaagagccagtcagggccgtgtgatcagtggtatcggaccaacatccgactgggctgtacgcggtagtcgtttcgtttacgatgacagaagacgtgtctgtagctgatttctggtacagacttagagcccaatagccaccacagatcgacgaactgaaaccaccacctgtgaacgcaacatttcgaggatcagccagtgagcgttgatcagcattgaatacaagctaaactcacaagaataagtgcaactcgataacggaagataggtggaagattcaagaactgagtttccacaatagcactcagttccatcttccactccagcgtaagtgtagttggcgctatcgcatgtgcggatgcacaggtcgagagtcatggcgaagcttgaatacaaggtagacgcgtccaaggttctagtccaagagtcacttctgcaaccgagagacgtccaagtgttgcttgcaggaagtgagacggccgcggttgaggaacggtagacagacatcccgtaagctcctccacacgttttcgagctgtctcctgggcaagtagcatcgcagtacctggcatccacagctgtggatgtgctcaatgaatctccgcactgcatgtgaatcaatatttgatcaataaaacgaacacacggctcggcaggaaagcatattgacctacataacagttatattgaccaacaccagagaacgcaaatccaccgaaggcacatctagactggcaaagatctagggtcatcgacccgtcggatgtctgagaaccagacaaagcagaaacaccgttgatagtggtaagccagcagccgacatcggtccaggtggagttggcggcagctgctagttgttcaggtccatatacagtcagtgccaaatatcctccgcatagctcgaaatcgtcacctccgcctaaagtggtttaaataaaataagattgtgtcaaataaaatcacaaatagaaaacgaactactcagttacccacaagtggtggtgcacgaagagtcagcaaggaggttcgagtttttaagagagtctccacactgcgtataggcgattgcagtcaaatcagtgatatgtgatagaatacaaaatcaagagacagttataaagactaacgtagcagttgtaaccttgaagtccagcataggtggaaccctgagcggagcagcgctggaggcatatttcatgagtcatgacaccaacgctgtatactgatgcaccaagcgtctggtgatccgaagtgtccgaccaacaaccgagggacatgtattgtgatacagctgaaaggagagatgaaaccgaacaacagtgagtatatatcgaccaagagaaacgagtaatggatcactgactagcattagcgtaaacgggatcgttgttcgaggaaggagactggaacatggtgagggcgtacgctcctccacattgtttgcttcccagtcctggacaggtcttgtaacaagacgatgaagccaggtaggtcgatgtcgagctcatctcgttaccacagtagcactcgttaccgtcctccagaccagcgagcgtatagccgtgactttcacacgatcggatacaccaatcgtccgtcatccagctgctcacgacctgggtcgagtcaagcagtgttcggtcgctcgagtcgcttcggcaaccgagcgccgtccaaccaggagcagctggaagagcagccgccgccgccgaggttgatcgagagagtgacatcgtacccgagccaccgcagatatcggttgagctaccagaacactgccaggtacagtagctcgacaagagcacactcgacacgcccatcgtgttagcacagtagcagtagtcgccctgcagaccggcgaacgcatagcccccgaaatcacaccgcgatcggcagagcgactgagtcatcgcgctagacgacgtcgtcaagccagacagtgtggtcgtgtcgttaccattgaagacccagcaaccctcatcggtccacgtgctgttcgagctgtctgtgttctctaccgcttcggtactgtagatcgacagcgcggacggaccaccgcagatctcggtcgagttaccaccacatggtgacgtgcaagatgaagcagccaggagcaggcttgacgaggcgatcgtgttaccacagtagcagtagaagcttgcttccagtccagcgtagataaagccctgggtgctgcaagaggacacgcactgcgccgtcgtcatcaggccgagtgtcgaggacgaaccggtgagcactcggtcggtagctgagtcttgccagcagccggcggacgagaagttggcgaccgttgtcgggtcgactgtgacgacaggagtactggagaacatggtgagggcgtacgctcctccacattgtttgcttcccagtcctggacaggtcttgtaacaagacgatgaagccaggta

SEQ ID NO: 1169 - DNA, 34635 bp, Xanthophyllomyces dendrorhous
gaacatggtgagggcgtacgctcctccacatgtcgccgcggagtccaaatttcctgagcaagccttagagcaagacgatgaagccaggtaggtcgatgtcgagctcatctcgttaccacagtagcactcgttaccgtcctccagaccagcgagcgtatagccgtgactttcacacgatcggatacaccaatcgtccgtcatccagctgctcacgacctgggtcgagtcaagcagtgttcggtcgctcgagtcgcttcggcaaccgagcgccgtccaaccaggagcagctggaagagcagccgcggttgcagtggtcgattgaaaaagagacatggcgtaataaccaccacagaagtcggttccattaccagagcctgaacgataaaggggcaagtattagtcccattttgttaacttggctgaagatacctcatcgatggttgtaaggagcgcaaagaaggcaggtccgaacttacacggcgtgttgcagaaatccgatttgatcaaacttgatacgcccatcgagttgccacagtagcattcgttctcctgcacaccggcaaatgagtagccgtcgatagcacatcgagcctggcagagccctggtgtcatcgtgctcgacgaagaggacgaacccgatagggtggttgtaccgtttccgttcgagacccaacagccgacattagtgaaggagctagtggatccaattttggagccggatccataaagcgaagcgctattggttccaccacatatcttagtcgaatctcctccacctgtaagcgaacaaagtttaggttgtttaatatctcgctacccgctctctgtcgagataactcggtagccttctagatgagcataagacttacaagctgtagtgcacacagaatcgagctgcagctcgctagtagagtaaattgtgtttccgcactggaagtattacacacaaaaaaagttaggccgccttcatggttgatcttgagggaagaaaaaataacataaagaacgattcacatacctggcaagtgtatccaccattcaaggcggcatagacgtatccatcagtaccacacttggatatacattgatcgggtgtcatagttcccgacgagaatacctctccatccaaaattcgatttgttcctgacccttcagaccaacatccgagggatgtgaaattggagactatggttgaatcaactggtatctcggcggccttggaaaatacagatactcgataatctccaccacacttgtccgtcgagtttccccaaccttcgaaaggcgaaagaaaattaacgcaagtagaaattaacacgataaacaacttaaggaaagctcagagtgatgaaagaataacgtacaaggctggtagcaatcactagaagctgctacgaggccagtagcggcgatttcatttgaacactgtatgcacattgaaaaagtcgacattcagtgagtaacgtggtcaggcttaataaagcggtaggagactctaaaccactcacgaagcactggtacccagcttctgtaccagcgtatgtataacccgtgctgtcacatgcctcaatacatgccgcgtttgtcatcatgttattagtgatcgtactgccctccaaggttctggttgaactatcggtcatgcatcctacagaggaccaacctgaaagtagttgagaggaacaggaagagaaaaaacacaaaccattagcgttcagcaagatttaaaacaggaaggaaaagaaaatctctcagaatacttactgttcgaagcggcggacactgtcgcagtcaatccatgtttgagcgagaaggccgacagactgtaataactaccacaggcctcgctcgagtttccttggcctggatgtaatcaatttattagtcaagtttgattagatgaaagacagcggcttagaaaagaaaactactgacatggaacgttgcagagtgaatcgtcaactaccgacgaagcgggtatactatttgcgcactatataggagatgcaacagatagaaagaaaagcatcagaagcggttgaaggacgaccgatagaacttgataaacatgttcttggctcgacaactcacgaggcagatgtatccattttcaagaccggcgatgtcatagccatcgaaagcacactgcctcctgcaagcagcgtatgacatagtgcttgtctgagccacaggagttcccataagcctgccactaggatcaccaaaacatccaaggggttcccaaactaggtcggacagacgggcgaagacgatgagtatggcacatgaagatatttggacaattgaagagtcggtactgaccagtttgtgattcaggcaggttagcggtcaacgcccagatcccattggcgtatcctccaccacaagtctccgacgagttgcctgtgcctgtagagagaagattggatcaagaaaagatgatgaagaaatcattagcctgacgagtctttttaaatgatgttgatgatttcttaataggaaagaaattacaaggcgtctggcagctgctgtccgagagagagtttgagccttcaagggagtttccacactgcgcgtatcgatcaagaacaaaacggaatacagtcagtatagcacatatgaaaacagtgaggaaggtaaatacttacgtaacatgtgtctccatcttgaaaatttttttaacaagtaaaagggtcgataagatcagatatcgactatgatacctgatggagaaaagagaaagactgactttgagtaccggcgtatgtgtagtttgcaccggaacatcgaagagtacacaactcgggcgtcatgttgttcaatacgacatattccattccatccaacactctgtctggatcaggattgtccgaccaacagccaatgttctcatatcctaccgtggtgcccgcgtctgtgttattcgagacatccgcataaagatccgtctgggctccgtcctgcaaggaaatttgagagagtcaaagtgtactgttagaacgcaggatcgagaaaaaagaagagatccagtgggcaagtcgggcacataccatcattccgtctgtgggtatcaaggagggtagacatacatcgagtgagattcgagtcaatcttttagaagcggtacatcaacggagaatttacttacagtcttcattgtagtatggaggatcattactgttttgatagatgttgttcctctcaagttgagaccagtagtgaggttgctttggacctttcacgcagtatctggaagaaaaaggagatatgaagatgagacacaggctccatatgtggaaaagtaagtatacaaggaggaaaaaatgtatttactcgggcgcgcctacacatttccttgacactctgggagaaggaagtggcgcggtatttgttgctccggtgactttcgctcggaatggagagaggtactagaagggcaaagaatgaaagtcagtgtttcagcgattcagcgattcatactcaataaggttttgctgagcagagatgaaaaacgaaccatttggtacgactgtcctccatagtcaccagcttcatggatccaaagccaaaatctgtagttacccagaacgacatattgggaatttctgtttagcacaactcgacacaaaattgataagatggaattctgcatacgcattgcatcctccttcgggactgtcagtgcataccaggaaacgaagagcacagtcaggatacagagaagaagataaaagagtgaaagaacgagcttgaggcgcaccaagcagggagatcggacgggatctggaagtcggtaaaatgccagaagggctgcaaccaagaaacaagagacgataacaaagatcagagacgcccaagttgctcgtttgtacacatatacaggaggatggaagggatcagatgacaacgggtgaatcgaaaggcttaaattggaaagataaagaacctacacaagttctgttggtggagataattacgaagtcttcgggttgagttttgtactggtcagattcgtaggcgatggcaagggcgcatcctctggtgtgatacgttggaggtccagttggtgaaagaattgcgtcggcattgtggaggactggagtgaatatggagaggcgccaatatcgcttgaataagtatggattaaaaggagggctggatcatatgatgatgtagagaacacacctgcgggtgaatcacaagcaagcaaaggaatcgtaactccatcattaggttgccattgtgtttgagcctgatattgtaacgaggaaagagatggaaccccggattagagaacacaaactcaaaactgtaagcagaagggaaaagacaagaaagactgactttgttacatgcaagttccattgtgatagatcctccgacgggcaattcgataaattccccgtccgccgggggctgatccaagttaccgtggtaccaccatccttgacctttcgttcctccgaaagacagctgtgccaacggtctggtggtgcgagattaagaggcagaagacgatcagtgtctgatctcaactgtatgtatgcagtgtatatgcgagcgcgcaaaaccggggggacacagactcacgttacagggttggaagtattgatacagtagtcagatttaccattacctccgtcacagaagccgtacattgcgggatgccagaatctgtcggatgcaccatgaagtatcagtcaaccaagtcgattggtgggctaccgaatggaacgcagaacttttcaaacgacagaagacgtacgagatatgtgccgatgccataggggccaaaagcatcgaggtggcgaggactgccagccgatgcttaatgaaaaacatcgtggtggcgaatttgagattgttttgttttcacgagctagaaagcgaaagaggtgatagtagataccaggggtatgtaggtcaaggaggatcggtcgaaagaggcgtcgattaaagaacgttccacccgagaggtttataagtagttcgagaaggcagagtgggttttattaccacgtcttataacaagtctacaggaagagagatcgaaagagcgaggtggtttccagattcacagttaatttgaaccggagccggcttaaaaggaggaatgtgagtggccgaagaggaaataacaagggaagaaaagagaacaagtagacgtaaattcgtccacagggaatcaagcggaacatcccagcgaggcaaggcagatggaaagacacatatcggaaaaacatagagtgagacaatggacgatctttgttctttttgactctaagttcaagagcgaggtggagcctcggaggggaggacgaacctaagaatgccaaaaaaatcgcgcagaggaagaaagaaagagagagagaggggaaaattaaaggttcgatggaacagataatgttaaggtggcgctttgaaaaggtttcgcaagaggaacaaacgtcgacgagaccaaggtcgatgtgtgaattgtgtcgagaggagagggaggtatactggacaggacgaaggagaatgagaggagaagggtagaaagggatctgcaagacacgacgaagtgcgaggttcttaagagttcgagagtcgacgaaaaagaaacctctactcgaatcttatctgcctaggatcgccagatcgaccatgatcgcaaacggaaaatctatcttctctcattctctcgtcgaatcggactgccgtacattgggcctcggtcgttgttgacggcgttggtccagagaataaaatcaagacggcaaggagacagatgttacccgacagtgccagaatcggctacaaatgatgagtctcatccggcacgagaagagaacaaaacatgattatctaaatctgcacacgaatattctaaagaaagaatctaggacacagacagaaacatagagaacgagcgtgtgtggatgtgtatggatggatgcgccggaaggagaagaatgagaaagaacgcaaagaaggaaataatgtgggaaaacaatgtttcgaagaaaacaagaagcgcgtgttggtagatgtttcacccaacagggcaattatcttccagaccgcgtcgagttgccgctttgcgccgtcgggtgcggctcaaattatatccgcagtctgacgtttagtgttgtgatcggtaataaacaacgtcatcagacaagctgctcttgaagcttcttcgttcagtcactcgggccttcctgcacagccttgtttgtttgtccccgtttgatcgaaatgtcgtcctatttatttaccacacttttgttgatgtttcttctaatgagatttacgttcttacacacgatgtcttacatgacttactatatcttggctgccagagatacttgagaggaagcctgctactccccagctcggtcgaaccctgtagacaaatccattccccttctttccgtttgtgcgatgttcttccggcgtttggtacttcaacgactgtctcagagacacctgaaataaaggatctccagtcctggggtcacaagcttctcaaatcgttgagaaccatgatctttcttttcccgatttaaactctttctcttttcctttccttcctcttttcgttccttctcactgtttatgatctcagcccatacagatctaattcagtgtatgacgtcaagacgtctaaaaacaagccgatcaagccattcaattgttgtctttgactctctatctccctatctctgccttctttcacccgtctctctccctcctttaattactactggactgtgtaagcctgtgcgtgatccgtctggttaggtccacaagagccgcctttctcgataacgtgatctgcgatgcgttatctactaagattctgttatccgacttgatctagatgaagcaacatagagcgtttgttctttgagttataatcatcatcgggcttcgatcgaaaggacttgaaaaggaggttgaagataagactaacgcctatggcttccaatccggcacactgtttggcaacctctttcctcgaaccagtcgaaccaatcttctcgctagcattctttatctgagaagcaaccgatttgaggattgatctcgattgggcgaggatcgtcggatgtgcctatattgagtatgatgaagtcaacttcacgagcttgttctttccacgtggtcgctgataaagaatcaaatcacagccgacagactcacaacagatacgagtggttgtcgttttccgttcgaaccaagctgcgagcgtgaagctaacaaatccaaaaggacgtaaccctagtaggcccaaaccagagagagagggggaaggaaagttatcagaagagatcccagatatcgtcaacaaaggcatacagagacaaacgaaagaacagagaaaaagaagagagatgaccgacctcaagcgctaccgaacctagatgaagaatttcccaacccgtagttgccgcgatcgacgatggattcgtcagaagatcctgcaagcgggttcttctttcttcgaagaatttgatgaccttggcttcttcttcaggctttggcttacatccaacttcggaagaaaccaaagctcgggccagctcgagcaaagcttgctcgtctgccgtcagctttttcgatgaaagcaggttgtacacatctcggatgttatttatttgttcgaaggagatagatcgctcgcgatatagatagaagaaggaaaaggaatgactcaccggtccacaggtatcttcggggaacacctcactcgatgacgagccaatcgccttgcacagtacgtttcggtacacgctttgcatcgtcttcaaccattgcacctggaacggaaatggaagaaacccaagaaaatcccacggatatctcggccggttagagaaaatacccagccaaaaacgacaacaagaacttctcccgcgctcacatcaatctctggtcccgtaccagtcaacacttcaagagagcttagccctcgaggttgataacttggcatcaacccaaaatctctgttatctttgaatccgttcttgatggcagctccctcgaaagacttcatgtcttctctcatcagttcgtctgattgattgaatgaaagatgattccatcgggaggattcaagctggaggatttggtgttgaagcgaagtctgcaatgacacatggaattggacgaaatcctcgatctgccaaagccgacattattcagtaccaatatcaacatacatatcgtaagagagtatgcaagtagagcgtacctgaggataactctgccgttcaaacgcggtaatgatcgcgtccggtagctggaaaagagagtaggagactgagattagcataactgaatcccgcagaacaggtcgaagcgtatggggacagaagaactgtgcccacatcagtctctgaagcatcaaagtatcggagcacgtcttcaaacttcgaggagaagtctattccgtctgattctgtaccaaacgtcgcagctctagaaagtaacagatgagacatcgtgtcctgttgaataaatcccactttaatcgccgcgtatagagcatgtgtaaggataggcgcgcctgatgatccatcaaacatacacgaccaagtcagatacaaattcctagagaagataaggatcgcccggtggcacaacggacataccaagtagcctatagagcttgatcaatattagccggaagtaatgattcatcttgctcgccttctgagcgtgctcaaggatgactactgccttgtacagatgagatatatcacctgaaagtcgaaataacaaatgacacaacttagccatatggtcgaaactttgttatcatatgaaaaagacataaagacggacgactagtgtcccaggcgctgattagactgttcgcagcaataattgccagatcgtctactggctgaagctcggtatccactagctggtctcctgttttgcataagtcgccagatgaatgcgagaggaagtgtggatatagctggtttaatacaccttgagaagaaacggatgcaagtgaatgtagaacaactgaccaagatgaaggttttccttatagagactcatagaacgatccgccatttggatatcagtctgtacgctatcctcgtcgttcgaagaagacgaagagaggtatcggcgaattttgagggcattgatgtgtcgttgaaggtctttaacggatttctagcatcgatgtcgagaccgttccttgtcagctttccgccagcaggaacaagatatcagtagggatagagcactaaccggagggtctgtgtcttcgtccaagaaggccagaaaactgtctatagattcatgatccgtaggcagatacggcttcaaatcctcgtaacagcatgcctttccggcgaatgcttggaaatatgcccgaatcaatcttggcacatctgtccaatcacgcataagtagaatggatttgtgtttgatatatatgtctgtcgtttacgtttccctccaaacgagtctgaagtaacaagaaaggcgtaccatcatcctcttgggactttgtagtatccaatttctcatactgccaagccagttccaaacgagccagcagcggcccgcgatctatctgtccagcttcctcagctagcagcttgaatacctcgctagtctggactaataaatcaggtctcaatttatataacttgatagagagagttatcagacgcaaatatgtcaggtagttggtatctctgtgtgaggagacgacagacatatgagcatgattctatacggtatgatgaacataatgaagggcagatgacgagagatggtatgaactgactttgcatcagttccctctccaaggatgaatttctttaatctctcccactccaattcccacacttgatgagtcggctgttcatctcccaggagctctatgacctcccatctcaattcttccagttccaaatctcgattatctcccaacactttgtgaacctcttcgctctccaaataattcaacgcgtcctgtaaatacttgctcttagcaggtgttgcttctgttgaagacatttgagctagagagagtaagatgcgcgcagaaagccaaatctgagaaggcgaaggaggtgttttgatggaggttgtgaggcggtatgccaagtttagagaggcaatcgcattgtgaggaagatgtttcgggtttagtgtctaaaaagagaagcaaaggcccagagaaatcgtgtgtgagaatatatttagaaagctagtagagatgccgacaacagcaagaagatgacgacgggcacctgaagatagatacttgatgcagaccaccagatcatctttggatcatgaaacttcgaatacaacttgaaagagacctgtatgtttaaatccaaaaggaaattagatagaagaagacccaactgatcagatggtgcaccgaacttaccatctgaacgttcgcccagtctcgaattcggatatacgactcgcaggacagctgccagattgaggttgatcgacaaggaaggtatgaatcagaggatatatcttggagggatactcacagatactcaccacagcaagcccttgatcctctggacatttctcgtacgccttagctacaatctctgggaacatggtttctgaatgatacctcccccgatgaggtccaacattgaaatatcagtgtatgacggaagaaagagggctgaaacgatacgtgttgaccgacctcgtttaaagtattgcatcacaattcgcatatacttcaacgcaatctccgactcaggcaccatcttctccaaagatgagcatagcacatctgcctcagttgctcggccgagcttgatgaggaggaatgatttgagagcctgtgagaccaggatattcaagaaaccggtcggtcggaaaggtcagcaatggatggctattcagaatgaagcaataggtggacttgccaaaactgtatgataattttgtccagacttgattcgaagtagagcacgatcacaatgcctcaaaccggccgaagcattgcctgtatcgagagagtctacgaataaggaaatggaatgagagaatgacaaccaaaaatcaatatgtcggccggaccaagagcgcgtcattctaataggaccgatgaactgagcgaaccaaagatgggtctcaacagagctgtttgctgggctgcgagcgctgacatcctttagtgcagagttgtctacagaagggaaactatcaataaaaacgtgagtgatgatgatgatgatgatgacaatgagagagaagaaagaaggatgtgtagaaaatcgagaaaactcaaaaaaatacgtttctccatcttcttcggcctactccattcaacaaccgattgcaaccaacggcgaccgtgtctcccctcatctcccttctctccttgttacagttcatatatagcttccgaagatgtcacccaggatattcttattctctcgaccctggaagactcttcttgggaaacaactgcatcaaaactctatttctgcttcttgccgaacgtgctcttcaatcccttcttctttcttaccccctcgcttttctcgctcgggtgtctgtccaacccctcgaatttcctccataaaggctcttcttcctaaacggacgtatacatcctcttcatccccaccaccaccgctgaaacctcgggtgtctccaccgacaaagcgagagtcagactacacgattcatctcgttgtcctcgctgcggtccctctattttgtgcatacctcggatattggcagatccaacgactccaatggaagttggagttgattgatgagctagaagccaacttggccagaactccaatggtccttcctgatgtgcttgagtgagttctttcttcttccttttgatctttttgaaagaaaggtagaaagaaagtgttctgaaagccgctctttacacatgcatttgtggggggaaaagcatagacaccttgacgcaatataactatcggaagatcctcgtcacaggtcactacccttccatcaccgattccagctttccccgttgcgttctcatcggaccaagagtctaccagggtgataccggttatcagctcatcgtacctttcgttcgatcgtctaccgacccagaatccacctccccgcctacaccttttttgttgaatgctggttttgttcggaaggacatcgccgaacagggtcctcaggcgatcaaacttccacctcctgatgaggagattacagtggaagccatgctgaggaatgaaggacagggcaaactttggagttcgttaaagggacagaagccaacgaggttcacaccagacaacgactacagggctggactttggtactgggtggatgctgccggatttgcagattactattctcgcgaagccggacttggtcaaatcttgccagtcttggctgacgtcgtctacggcaagtcttttccctctttctccccagttgtcatcttcttctctgacaggatctctctttgattatgttttgtccactacagacggcgatgcgccaagagagatgttggttgaccaaggcgttcccaccgggcgaccggcgaggatcgaacttcgaaaccaacacgcggtctatgcgctcacttggttttccatcgccgccgtcacctcggtcctctgggtcaaagttttcaggcttggtcgaacaccgaaagcaaagatcggtcgaatgggacagtgatggatatgtggtttcatgcttgagcttggttctcactgaagaagagatacagaagcacaatttaggacgctgactaagccatcgctttgtggtcaatggtgtagcgagaaggataggatgtacagaacacaacgtcaaagctaaagacggggtattgttgaaacagtaaaatgagtggagggaatagggtatagtgagataaaagggtatatacgagccagccagttatgaactggtatggaggaaagagcagaaaaacaaaaggagggagagaagagaagcaagcaagcagacgatgaagaggacagaacctcaaagctttccagaagccaagtcgtctaaaagtgcatcgatcaagtaggtaagcgagagtctgtgggagcttcttgttgaagaaccggaagtgctccgggtggatcgtctagagagacgcatcggggccttcgcgatattggttgatttttagaaaaagtctcaattgagaaagcaagagacgagaaggtgctcacctctcgaacagatgtcgcggcttgcgacgttgatacactatgatccacttgaatacttagcctagcacctagcaccttgcccattagagcctatgagcgtaacatgagaaaacaaatagagattatcttgacactggccaaaaaagcgctcaaactatgtttatacaaattcacactcacccacatcaagcctgagccatctgccgcgagatgttctagttctgacgcgtaggtagcgagaggggttgtggaatctagatatcttgcctgacgattcgtgatttcgacttggtcatcggtacagagacagaacaaggaagagaaaaggggggggaagaactgacctgatctataaaatgacggaatttggcaggcagtccagctgactttgggacggctattggagacgcgttcggagccagcgggaaatgggtcctaaagcgtttggcttcgtcttctaaaagctgatcgaatagaggactatcagcgttaagattgattcggttcataaaatagtactccctacccatacaagctccgataaggcagaggcgacacgttcgagaacgatcggaggagccgaatcaatctcgatgggctgtgcctgaagagaagaagaggggcgggtgaggagacggataactatggattcaaaacaagtggaagccatcgagacaaaccagttggaggaaagcagagagtcttgtacgagcctctgaggcctggttgagtggattatcaaccgatgtggttagcatggggtgtagaaaggatacggatacccaggaacaggattcacaggagatttggtcagtctccgagaagacctggccgcttttgctagtggctttggggagcgaagaacagaacgaaatcacagatgagattagatagaaacaatcagcatgacattagcaggtagtcctctcctgagtatgcaagacggactgggacagacctgatctatcgagggaggactgatgttcctgggtcgtttccaactgaagaagctgtcgagtggctgagccgtctgccttttctgcttcgaccgacgttgaaggggaggaatagccagctgttttgatggcgcgttagaagaaacagacagcatgtgagtgtactaaggaggtttagggcggggagaaaggaaggaagggtaacgcggtgaagaagtcgaaggtgaatgcagaaagaagatgagatgagagaacgaacaaagtgattgacaggatcctcagcggaaggcgacaaccctaaccaaaacctaatacagccacattttcatataccttatctgatacttaactgaatcttattgctgcctactgactgtctcggctatcgtctgggcggagcatcccgaagagagtcgagcgaacgacaagaaggacgagtagatcagacgtctgacctaaatgtgagcgtgcgacgagtaggtatatcagtagtagcagtagtgatattagtagtagtgacatcagtggtagtaggatgaaaacagtgggcagatgatgtagcaatgtatgtatgagcagtaagtatggtgttgagtgttgttccatctgttgttctttcaatcccctaagctggactgggggcacacgaatctgttgagggattgtttttatccattcgttcattcgttctacttagactctctagtcaatccttctcttcttttctcgcactgccattatatacccacaacaagatggatgtgttgagagatatgacaaacgcacgaactaaagagaatcgaaggcaaaaggcaagaagacggaagaagagatgaagcgacatgcttaaatccagtttgtttgcaaggatgacgccgttgtcccggggtttttgcttttttgctttttttctctctcattctccagacgtcttccttcgtctctcgctctatttttgatcatcttgagtgttgtccttgtctctcaccctgctcaacgtatggtgaacccgttggtccgaactgtctgtgttatcaattctcttcttgtgtggtacccaccgtccatcgtccggtcgtttcgcttctcgttcctttgccccgccggctcccatcgtatcaacatctggactaaacccgaacaacaacgtgttctttgtttttttgtcttccgtctttttttcccctcgtgttcttccttttagtgaaatctcgttgattctgccctcctttccaatcttcatctcttcgccatcttcctcctgccattcgggtctccttcctctttccaccttgcccagtctctctccctttctatcttcctcttcgtaaaagatgagcgaccctcggtcggcgtttccgcatttgtttcctcaacaaagaccacctgtagaactctcacaacatcctgatcacagaacacacgagtcctcctcctcttcttccgccatgtcgtccactccttcgacatcctcagtctcgtctgaacacaaacccgatagctcaagttcgcaccattcctattctcaatcccaatcccaatcccatccatccagtcctccctcgagtcacccgccggatctacctctctcgccgacccaaccacggacgtcacctccttctaaagcagcggaattagcccgattcgaagtcctcgaaactttaggtaagattccaaccaaatctctcttgcttgttcttctttcctctctcctcttcttatcggcttctagctcgataacgattccttgtaccattttgacggcatctcctatcttaaggcaccggtacctttggccgagtcctccttgttcgtgtccgatcgccatcgaccccgatagatacccctcatccgatataccagaagcaggttgaacagaaacagcaacagcaccagcaccagcaccatcagtctggtgtaatgctcgctccaacatctaccggactgaccgcccaaaaaggaaagtccctgccgccccaatcgatgccccattttgcactcaaggtccttgcaaagacagaggttgtcagactccgtcaggtcgaacacattaacaatgaaagattcatcctaagcaaggtcaagcatccgttcattgtcgaattgtatgtacattactgtttctcttgtcttctcccctcattctcagttctatctctccatgcaagcctctgatcgcccttgtcgcgtctttatgtatcgttctcccagatatcaaacgtaccaagatccgatcaacgtgtacatgttgctttcctacgtgccgggcggggagctcttctctcacctgcgtcgggcaggtagattcactccggacgtcactcgattctatctctcatccatcattcttgccatcgcttgtcagtggtgtccttctctcacctctctaccgagcttcatatcaaatgtacacttatctctccaattttttttggcttgagggcgcgcagatctgcattcgcaggacatcatctatcgagacttgaaaccagagaacctgctcctagatcgggatggctatcttcggtaggtcgtcataccatccgacacgggaaacccataatcaggaaccatccatactgatccttaaagccattacattacgacatatagaatagcagatttcggatttgccaaggaggttaacgaccgaacattcacactatgtggaactcccgaagtacgtctcgtctcagaagttcttgtctcggatcaacgcgtgtccttgaacagatcgcatacgtatctcaaaagtctatgttgtgttgaccaaccgttcttccgtatgcaacgtatatttgtagtacctcgcaccggaaattgttctctcgaaaggtcacggaaaagcggtcgattggtgggcgatgggaatcttgtgtttcgagatgttggctggctatcctgtttgtttcttctctttcctcctgtctgtgtaagaatctgaattgaatcaagtgctagactatgctttctgacactgaaaaaaaaacactttgctcccaaattcattgcgtctcgaaatttccttctccactcttttatccgtgatctttagccattttttgatgataacccaatgggtatttatgaaaagatcctcgcagccaaagtcgcgttcccctcggtgattgacccatacgctaaagatctcattcgaaggcttctcactgttgatagatccaaacgacttggtaatctccgtgggggcgctatggacgtcatgatgcacccttggttctctggtgtcgattggggaagcttggaaaggaagcagatcagggcaccgatcattccaccggtgatgagcatgggtcggtcccttccttctctgttctatcattccatgcatctatcttgggagatactttgtcgatcaccaacagcagacatccacttgagctatatcttctgactttgaactatatttcttacttgtcgttataggtgatacacaaaacttccaaaaatatcctgtacctagagcggacgcgctccctgggttgttcccagattatcaaccatcgactacattggattcgttcagccatttattcgaggtcagctttccctccctctctctcttgtaccttgttcttcgttacaatcaattctgtatactgatagacgattgactctccttcctctctcgtttgctacggtgtcacagggtttttgattgattcttcagctttcttatcaaatgattctatatctccctttcatcctcattacttctcatctagccttgtccttaatattcagtcctctcccagtgtttggaggttggatctttcgttttgcatctttttctttatcattttgaattcataccttttggatctcttgggtcatcgtttctctcttcccgtgcttttatctcctccgtttcactcttaatcacaatttctttcctcctgccttttcacaaattttctacttccccaatgatgtagtgcccttctcctcttcctacgtcttatagctctttcacctgccgtgttttcttggtcgttctggaagataagaaagaaaaaagaaaagaaaaaaagaaaaagaaaaaactaaaacagacccaaaagaaaacaacgagagtcggaaagtttgacgttataggttgatataccatgaatcgagcgagacgtcgtgataggaaaagtcactaacccaaggttttcctccctaatattctgctctctttcgtgtctgtcgtaaagttctatgatttccatcgaaaaaatcatcaatcaactcaactcaaccaacgatcatccatctttccttatcctcttctatttacatttatctattcgctttgacccaatcagctttacaatctcaagtactttttatacaccctgttctccgtttcctccgaataggggtaccccaattcttccaagaacgtatcgaacgcttggtgatcgtgcgcaggcacctgaattccgatcaggactttaccgagatctgtgtaagacgcaatatcgattgaagccgaaagaaggtgagtgatgatgacaggttggatcggatgcgcttgagatataacctcgagggagaaaagaagacaaggaagaagacacgaaccggcgccgtggtttcggtagtggaacatcgagatgttccacggtttgtcggtttttgcgtcatgcatgttatgcaaaaatttgtgtaacgcattcggtcgctccggaaactctgatcatccataaccccaaaccgagagaacaatcgcataagtcagaatgctatgtctttcctccttcctctttcgcctctcaggtcactccaagaggaagaaaaaggaaaggagaggatgatcgagggacgaaccgaatcggaatactcgctcgttagcggcctcaactttaccaccgatgaggaatcgagcatgatctttgctcagctcgtcgttactcagatcccaagcatccatgtttccagccttgagatctttcacgatggtctctaccgcttgttttcgctcttccggagttgggccggtagtcgattttgaggagagtaagaaggaagtgaagatagaggcccttgcttcggacgtcgcctcggacgaaagacgataggaaaattcggtgacagctctaggatggatgacagaatagaacttgaggaagctgtacggattcagatcgaagggaagtaaaatgaatagtcagatatggaaataccatgaaaccaggaagtagtcaagacgataaggatgacgacagcaacgaaccttccaggtgtctcggggatagtaacactcatgagaacttctcttctctctcccaagtcagcccgctcagacacaaacctcaatcgaccaaagttgacattcgcgccagacaccacggctacaaagcgtttgccagctccttggagcttgtttttgacgatgtatgacttcagaccagccaagccgagagcaccagaaggctctggtaccgcccgggtctctatgaatagtatggacgaacatatggagttttcgataagcattgttcttcggccacacacacatgaaagaaagactaaaaagcaaaaccagaacataccttcaaagatatccttcatagccgcacagatctcgtcattatcacaaagctcgacagagtccaaaaggttcttgcagatcctgaaaggctcttcaccgacgattttgacagccgttccatcgctgaacggtccgacctcgtccaacatgactctctcacccttacccaagcttttcgacatggcgtctccatcgtatgtctcgacaccatggatcttgagactgggaggggcaacctgcttgatatacgagcatagcccactggcgagcccacctccaccgatactagcaaagataccatcgagcaggtccggctcggggacctgtctgaggatctccataccgatagttccctgaccagcaatgatgagcgggtcatcataaggtgggacatagatgagtgaatattgtttagtcaaccgggcacactccgccttcgcctgatcgaaatcgtctccatggaggacaaccttagcgcctagtcgctcaacgtttcgccatttgatagtcggcgttgccacgggcatcacaatagtacacgggattccaagcttgtaaccggcaagagccactccctgagcgtgattgcctgttcgtgtgagaggacaccggtgcacaaagaaggaggacattaagaggggatacatacatatcaatcactttagtcagttaagcgctttccgaggataatagtacctgacgaaggaggtcagtaaacttgcctgcactgcatgtaacaactcctttccaacgctcttcttttccgagggagcacatgaagttataggctcctctaagcttgaaactgaagacttcctgcatatcctcccgcttgagccatatctcgtttccgagcttggccgacaagttaactgcctttgtcaacggagtctccttcatgttgagcggtggagagtacgtccgggagagcaagatgagtttcaagtagtcgggcgttccatcaggaagaatatggtgaggagacaacctgctgtagaggtgggtaggaagttggttttgggtcgaggcatgatctccgttgagtttggtgccttcgaggttggcatctgacggcccgttgggcggtgccagatgtggaacgttacgaggtggcatcctttgtagttagttgatgagtataaatgacaagagacctagcagaattaccaagagatcaaggttggagaagaaagcaggatatgtttagaagaaatgaaaagggaagggaaagacgaaacggaaaaaagggaatatcgttgactcgatcggatgttcgggcgaaaaccaattgatgacgatacagatcatctcgcgcctactagcttcttctcattcttctttcctttcgtgtgacaaaagctttcgagtgtacttcttgttgctctaaatgaacttccatattcttcattgcttcttccgaatacagtgatatgtccattctatgatgtcgattgtatctgctgctttttcttagcttctgccacccaggctttctcctcctccccctttactaaaaccacaaaactcaataatccatccttcagaaccacaccgtcctgccctttaccttcctgaccgcgagcagcttcgaatacgcttctaagtgccatctttctgggaatcttgagcagtcggccatacgcggtctcacaataaaccaccacgttcgacggtcggtaggctcttgcagtatcccaagggggaggcgtagcaaagatggcgtccaaatgatcggcgaacgcagtgttttcttcgaacaaagagatcagatcggactggccatgggaaggatagaggaggaacaccggaaagatcaacggagcttctggtgaaggagcaatccatggtgaaggcggttgatagctatagttgtatgaacaagtagatacgtatatgagattatgtacatagaaaagagaaagtaggctcattagtacacactcacagaggtatgctcgacatcgagtcttctggcacacactcttcgtcaaagtgaggcgggtaggggttatctggcggagaagaagtcttctgaacatgaattcctcgaacctatgagtgggtccggaagataagtatccacatgtctgaccaaaagagaaagagagaaagaggagaagagaagaagacaaactcactccaaatgccaagttgagcgcaagggctccctccttttcccttctggctcgttctgtgctctcaacgtgctttctgtctgctttctcctgtctttctctcacagtcgcgagtagagtctggacaggcttgttcccggccccaccgggaatggcgagtgcgcgctcacagcagtcgatcgcctcgacgtgttgttctaatgcgagaagcgcaagcgaagatcggtagagcgctttcacggatctggggttgagctcgagagcggctgagcagtcgtggagaaccttccggttattttcttggtggtgattggtaagaaaggcaaagaaaaaaagaggaaatgaatgtatcagtaaagaaagcggcgagaaaacaaaagaacatacagggcgatacttactaagtgctaagttacaagccgctcggttgacatagagaacttcgaacagagccttgtcgtccggcttaacgtcgataccttgggtatagaatccaattgcctctcgatactgcttgaccgagaaacagtcgtttccgtgctccttgaaattgagagcgatctctttgagatgagaagatggtcgaaaggacatcagcttgattcaatgaatgtgtctctgactaataaaattgtatatatgaagacaatagatacacaagaaagcttaccgtccggggtaccgtcgtaggctagactttgaagggcggcgacggcgtcgttctcctctccctcaggaagagactgcatgaagagcggagagctcgcaaagagatcatctatattcttggatgatcctacggagggtcctgctggagcttcgatgatgacggccatgatatgagaggttctggtcgacgaacgaggcagaggattttggtcgagatagtcgtgagggaagaggaaaagacgctaggtttggctgatgacggatgtaaccaagagtggaggtgcacgtgtaggtgttatcatgtaacatatctgtaacggcccacctcataagccacctggtactacatcagacgctgacacacgagactatcgatggcgatgatggtggcaatggcggtagcgatgacaatgttaatggtgacggtgacaacgatgatgacaatatcgatactggtgacagtacgactctacgatggtgttggtgatgaggcgcatacagcacagcataccacatatcatggcaaacgtcgtgtcataaaccgatacaccacactgcgtccaagtaagagtgatgcgagagagacagaatcatgaagaaacaaggcggatgaacagtgtgtgaggcaggaaatctacgttccagatgagcgaccgtacgctaccttcataaagacttgggtcgcctttagggcatctcgaacactacaaagaagcactacagaccagactaggacactagccggtgaagactacagaaagatgaataacctgagggccccgcggcgtcttttgttttggtcatcttctctcacttggacccgccctcaaagtctgtttcccctaacgttctcccttccttctttctaattccctttccatcctcctttttcgtgtctctttcttcttagttccttgttgagatacttccgaaatgtctagagacagacttgctggcctcagagtgcgtttaatcttctttctcaagaacttctcttcccctgttttccctcaaagaatctcgaatggggtaattctgggccaagggcaagaggcgatgcaacagtggcttttcaagctcttccaaacctgattaggaactaatcatttccgtctaaattcctcttctctgtcgttttcaactctcgttctggatgtttcttttttgtttgactggaacgacccacagaacgctcctcagcaggagacgtacaaccctataccctcgcctccccaaacgtcggtcatttcttcttcctaaaagcgacgcgttttgcgaagaaggaaaagacaagagcacgctgaatagacatcttctgttttcttatttttttcccatgaattttcaaattcaaacaaaacaaaagccaatatggatataatggccagcagcaccaagcctacgcgccaacaaatgcgtacgagatgaacaacgttcagcagccgcccgccgatttctggcaggaggtacagttctttttccgagtcaaattctggagtctgtctgacctaggcttgcagaaacgtcttctcacttgatcttttcgtcttttatagattggccagattcgaacttcactctctcagctccagacgtcgattggtcagataaagtcgctccatgcgatctcgttaaactcgacgactggcccaccaccggagctgtcgtcccaggtagaagagacgagagagctcgcgcagagcgtcaagatgatgattaagagcgcgaacgccaatacccagggtgatcgaggaaagaaggcacaggtgaaaggagtcaaagagcaatttcttggattgctccaagagtaccagtcggtcgagaggatgcaccgaagcaaggttaagcagagagcggaaagacagttcaaaatcggttcgtttctttcccttgtctgtctgcttgttggcattcatttcttcacgcgaaggagaagaagctgagttacccctgggtttcgtgctcgttcaattgccttctccttcacctctcttcatcccttcttgcagtcaagcccgatgctacgcctcaggagatggaagccgtgttggaaagcgacaatccccagatcttccagcaagcggtaagcatggctctgatcggttagagtgtctcttagggtggagtaggtcgactgatcgaatacgtcttgttctggctttctatcctatttttggtctgtagctcttgtcgtcaaaccggtatggtcaggctagctctgcatacaaggaagttcagcagcgacatgaagacattcaacgtatcgagcgaacgcttactgagctcgcccagttgttcaatgatgtaagttttccgattttctttttatttcatccttccgttccttttttccttgcttctctgacgagtattctgtttctaaccgactgaaatgtccttctaacctgtagatggccatgctgattgagcagcaggatgagacaatcaacgtggtcgagcaacaggctacccaggtcaatcaggacatggagactgggtaagtttaatttgggaaggcgaagaacagccagtgtcaggaaatcccatgtttgaacctactgacaagtgaggtttatctcttctttcgcgtgtcttacgaattgaattcaatagtaacgagcagctcgacaaggggattgtcagtgcccgaaaagcgttcgtcctgttccttgtgggtgtaggcaagtgaagaataatcggccagaggcttacgaagctgttgctctacatttacgtttcctttttacacagccgaagaaagcgttggatttgcttctggctcatcatcgtcattttgatcatcatagccgctatcgtcgctgctgtggttgttacccaggtaggtccaagctgaaagacgatttgtgacatccctgtggacgtttctaacatatgtacctctggctcctcttctttgatcaatctgcttttgagcgaaacaaatagacatgattgtcttccagagactttctcttctagtctggtttctttcttctctctattttttctctatgcgtccgacttcgacaagctttgggtgaaaccccaattgttattattcatccgacacacatccgtgggctttgcagtccttttcttgcacgctttatacaactctttcttttcctttctctttcctctttcctcctcattacccaacggactacacatacgagatatccatccgaggagaaaagccccatcgaaaccctccatcgtcttaccaccttacgatcgttattttcttccctactttcctgtttgcctatcaatctttctcttgtttgggtatcgagtgatccttgggatttatacctgcttatcagaagatgtttatctcttgcatatgtgattacaaaaaaaaaggagaaaaaaggaagaagatcgatcgtgagaatgacgagacaggaaatagtacaaagagctccttgatgatgaaccgatggcgttctcggccgaccgttttcttcctttttttgtcctttgggtggcgaaacaaggaaaaaattaaagaaaaaactctctctgctcccgatgactgccgatgggccagggcggccaacaggagatctgactgcgcgttccaagaagaaaaattgacgcacgttcggaaaaggtgcctgctgtgaatttccgccctttttttctttttttttctgttcgctctatctgtttccactcagcctttttcttgcttttttcttttctcttctctcttattaaccatgttcactcgttctcttcttcgatcaaccaccacctctacaaagtctatcccgttcgcttcttcatccaggttgcttaacaactcgctcagaacaatgtcctacaagatcgccactcctactgatttcgtcagtttcctttctttcatctcttctttatgacggaagagggaaaaaaagtaaatgctgatgtttgtcgattcaactgactcacttactttacaattttctctcctttttctcctcccacttgtatgtatgcacgcatggaaaacagaacgcttgcctctacggtcctctctccgagcaggatcctgagatcgccgatcttattgagaaggagacctggcgacagttctctggtctcgagctcatcgcttccgaggtttgtttcgtcctgctttagatctcctttccttcgtttgtttctcttttccttgccttattccttggctgatgaatgtattattatgtttctttttaaaattctcacagaacttgacctccggtgccgtcatggaggctaacggatccatcctcaccaacaagtactctgagggtctccccggagcccgatactacggaggaaacgagcacatcgatgttctcgaggagctctgccgacagcgagccctcaaggctttcgatcttgatcccaaaatttggggcgtcaatgtccagccctactctggttctgtcagtagcttgttctttaatatatgcttgtggagattgagttggtaggttcaattgactgacttgcatcgttccattttttgggcctttttcaccttttatcaagaccgccaagtgagctgctttcataccttaaattctttgtacccttatgtctgaatttcgaggttgacaccgcgtaacgatttctcttcgccagcttcgccgccttcactgcgctccttaaccctcaggaccgacttatgggtctcggtctccctgatggaggccaccttacccacggttactatgttagtcgaccctccttcactcggtctagtctcttcagatcctgtctttacttttaattctcttccttcctcaacagaccgccaaaaagaagatgactgcgtcctcgatctacttccagtcacttccttaccaggtcaagcacgagtctggtctgatcgacatggagtctcttgctacaaatgccaacttgtttaagcccagacttctcgtctgtggtgcctcggcttacccccgagactgggactacaagagcctccgagcgatcgctgacaagcagggagcttatttgctcagcgatatggcccacatctccggtcttgttgctggtaaggcccagagctcgccgttcgagtactgtgatgtcgtgaccaccaccacccacaagactctccgaggtccccgagctggtctcatcttcttccgaaaggacaaggaggccgacctcgaagcccgaatcaatgctgccgtgttccctgcttgccagggaggccctcacaacaacaccattgccggtattgccgttgccctcaagcaggccgcctcaccagagttcaaggcctacgccgctcaggtcgtcgccaacgcccgagctctcgccgccgcccttcttgctaagggtcctaactacaagctgtcagtctttatttcctgtttatcttttctttgccatttctcttgttgaccaggtaatttgtgttctgcagccagaccgagggtaccgataaccacttggtcctccttgacttgaggccagccggattgaccggttccaaggttgagaagatctgtgatctcgcccagatcactatcaacaagaacgctgttgccggtgatacctcggcccaggtgcccggtggtgttcgaatcggaacttccgccttgacctccaggtcgatggttgagaaggatatggagattgttgccggattcctccaccgagctatggacattgctcttgccctccaaaaggaggctggttccaagctcctcaaggatttcgtcgccaaggccaccactggtgacggtgagggtcgaaaggccatcgagcagctccgaaaggaggttattgagttctccactcagtggcctttgcccggtgtcgatgcttccaccatcaagcgattcgatcactaaatttgaggttctcttcatcgcgctttttgcatcttttctctatcatcattttttcccattcattcatccgctggcgcacgccacttttgtttcaacaccctgttcatgatcttttaggagagatcagtagaatccagtctcatctcttacacaaaagatgaaatctctcaatctctccttcatcaggaggattggtttctgttttctccctcttctccctcttgtcttttaaaatcacccagtgggctatatttatgtgtgtaaaaagtgaattcggagttcttgtttcaaggtttgcctaacaaacaccgcaagattaacagagagaagaaaataacagaaagaaaagaagagaaaagaaaagagaaagcagaaaaatatccacactaatagagtccgaactggcttggccgaacgagtcatcggcattttcttacataagccggttcgaacattttatttgactcggctgatcttagattacaaaacgaccattttttttctcctttcccttctcttctcaaaaaaaaatatccttctttgcttctcttttccattcaatatcaatcagcccttcctttctttcgctcctttttcattaccttacatacatacttacatttcatccctcatcatgtgccccggagagaaccaagagcctaaggtggtttccaaggaggacatggtcggaatcgacctatccagcaccgttcacaccaacgatgccgtttctgatgtcaaggctgctcccgcggtcaatggtgtcaagaaggatgccacccacgctgtgagtttgtcctcttcttttcttttcattgtatatagttttcctcttctttctctttctcggtctggaataccggttgtgcttgcgtgcagcagaggaggaggatctgggtcgcctgccagttcctttctttgttgagtcaagcaattattggggctttgtttttgatggcttaccgttgatagagatagagatatatcttatataacgaaaactcctcttttactaatcgtcatgcctttttcatactacaaacgtattagggatccgtcaccaccaccactccttacggtccccaccctgccgacttcctcagcaacgtccgaagtacgtcaacctgcaaagtactccaccccgtttcgatctatctttattgacgatcgtttcgttctcctccgttacagacttcaagatcatcgagtccaccctccgaggttcgtttgcacacttatagagaaaagcgaactagttttcttgtccatccgacttttggtccgggcgtcatcgtcatcaattgtcctgattcgctcatctcgttttgggcattttctttttctttgcgtcgcctcttgattattgcagagggagagcaatttgccaacggttagtgtcatcctgccgagttgatgtgtccatgacttgcaactcgctgatagccatggtttacttcttccttttctttaactccagccttcttcaacttggagactaagatgaagattgcccgagctcttggcacgttccactgctccaacattctcataacctaatgcacatccgagatgctcatgacaagtcttgcttattattcatttcaaatgattttcttccttctaatcagatgatttcggagttgagtatattgaacttacttcgccggctgcttctcccgagtcaagagccgattgcgaggccatctgcaagatgggtctcaagcgatctaagtgagttggcgtttttttcttctccaactagatggaagggaagagttttttgactcattcctattcctttcgctctttcttctcaggattctgactcacatccgatgccacatggacgacgcccggattgccgtcgagaccggtgcgtgtcttctccaccttttttttctctcttggcgttcacgatttcatacgcgggccggcccttttcttctttcaactgactcgctcttaattatacaggtgtcgacggtgtcgatgtcgttattggaacttcgtcattcctccgagagttctctcacggaaaggatatggcttacatcgagaagaccgctctcgagggttcgttggttcctactcgttgcggacctttcctatccgaactcgaacactcatctttctttttctgttcgaacgtgtcttggtctcttttttatctttatttttaccttttcagttatcaacttcgtcaagtccaagggtatcgaagtccgattctcttccgaggattctttccgatccgacctggttgaccttctccacttgtaccgagctgttgacaagattggagtcaacagagttggtgtggccgataccgtcggatgcgccaacccccgacaagtgtacgagcttgtccgaactttgagaggtgtcgtcagctgtgatattgagacccatttccacaatgatactggatgtggtaagtcagcccgaggaaaaactttgtggaatctgtgaagtcggtgttgatgccctgttctctgttttgtacaacatcagccattgccaacgcttacaccgccttggaggctggagctactcacattgatacctctgtggtgagtctacagtttattttttcttttcatatgaacatcaaaaactcgtctcttgttcatagttaaccctcttcaatgatcctttctttgtctcgtcttttcatgtgtgtattgatctagcttggtattggagagcgaaacggtattacccctctcggaggacttgtcgcccgaatgtacaccgctgatccagagggtgtcaaggccaagtacaacttgagcatgcttcgagaaatcgagaacttggtggccgagaacgtcgagatccaggttccgtttaacaactacgtcaccggttggtgcgcgtttactcacaaggcaggtattcatgccaaggcgatcctaaacaacccgtcgacgtacgaaatcttgaacccggccgatttcggaatgacccgttacgtgtcgatcggtcatcgattgaccggatggaacgctgtcaagtctcgagtcgagcagctcaagcttgagatgaccgacgatcaggtcaaggacgccaccaacaagatcaaggagttggccgatgtcaagacacagaccatggaggatgttgacgtgatcctcagagtgtaccaccgagccgctcaggccggtgtgctcggtttgggggaaagcgtcaagctcgatcagctcttggaggcacaccgagaaggaaacaacggtatcgacgccatcgctgacgtccctgccaccaagcgtcaacgaaccgaggcctaagccgaataaagtctatttctctctctccctcgctctcgtgacgtccgtagcttctctattactgtcttttcccgctctccaccctaaaaaaagatgagcgctatgccaggaggtacgccgttgatgaatccacaggccgtcgacgtcgtcgttcccttgtcatatccttgtctgtttaaatgttgtgtatcatatgaagtctaacagctctcaaattccttaaaatcaaaatgtctgctgtcaatcggaatttaccagactaagtaagatgaacttgaaaaaacacgtcaatcagacttaagaaaagctatgaatgcaagcgtgaacatagaatataggattgtgctcagcgtgctcaagctctcagaagggaacagggcataacttgttgtgtaagggtagcaaagaaggactgtaggcgaaagttagaaacagatgaggctccatatctgaagagaaaaagggaagactttcagcagacaaaacaaacgatacatgccatttctttacctctatccccgccaacttcgagaaaaactaagggcagaaccaaggagaagaataagaaagcagaagagggaagtaaaagaaagtacgagaagaaacatctgatgtatagcaaggcgacagaatataaatataatgattacacagcttccttgtatcttcggtctggtcatcgtttgagcgcgacctgagctacgacacaggggcagccgagcgaggatgcagtagaagaagaagaaggagaagaagaaggagaagcatatgatgagtggatagcgagattagctttgttcaactacgaaggaatgttggtgcatattctagacagacagcgcgcagacaagagagaaatagcacagaaggaagggaagaagggagtttttcactgtcgagatacacgaatatgttaccggaaaccctaatccagactgaaccaacctgggtcagatcacgacataaataaaatcacaggcttaacatcctataacgagaagcggcgcaagagcgcttctttcatgctgtttggagctctatagtcaacaactacgacacatgttaagtcatggtggaagggagagccgactcatatgaagacaacaatgaggtgatgtgcgagtacaaagaacggtatggggtggtaatgagacgatctacttagatgagcttatacggttggctcgtttgagagagaacggatcactcagatacctgacccaaccaaaataaacatcaacgcaaggcgctagtacaatgaatcgggggaaccagaaaagaaaagcataaaagagagctagaaagtgttcatacgaaatgaagtccgagataatcctatacacgtgactcacacaaagctacacaacacggactacgtatcaaatattaggattcagagttgagatggtatcaggaagattgcagtgggagtaaacaagtatggacggtagctaggcaaaagagaaatgcagactcttgacggatagttgatggatgaggagacgaggcagagaatcacttgcgattcagtgataagattgatattgcacaaggtacaaggataacagggattgataaaggttcagggttaggagactaagctacgggtggcaatggaaggtcttcttgtaaatggtcctcagaatccaacaatactgtatgaaagaacacatcgtagaatgtgttagaagcacctacatcggaagaccgtatactcacaaagcaaagccttggaggagcgggaggagttgaagcgtcgtaaggacgaagatgttgagaatacttgaatatggtgcatcggtttctgcttgtcagctatgtacctcagccttagctagcgcactctgccagctgccatacttcttttcttctccttctttctttttctttttctttttctccttcctcagcatttaccagaaatgtttctgtgccgctgagtttggaaccatttcttattctattctacagcaatacgaaaccgtatctgccagcagatcaagagcctgacttactctactgctacagatatgtctttcgatgttaagccagccgagcccactgatgcagagccgtcgagtgtgccgctgtacaccaagctgtccgagtcgtcattcgtgtcatgatctgacccggtttgatccgcgcagggtgaccttgcgcaatgtagaccgattcttgcaacagtatcttggtactgcttaactcgctcttggttatatcttgactcttccttggtatctcttcgctcttgcttgtgtttccttgtgtttgcttgtgtttccttggcttgatatctcgaatgacatatataccatgtagtcgttagctatctccccttttctcccccaagcttggaacctcgttaaatcctcatagttcccttcaataacctcttcatatccctctgcaatattgcatgatctcttccctcttgagagctcaagcgcactgagtaccgtccccactcagcctccttgcctgcgctcataacagttcgccaacttcgagaaccttctgtaacgagattcgcggtttgttctgcaagatagaacaaatatgttctaactcagcacacaaacagtcttttgtgaatactgaggaagggaaaaagagaaagaaaaagaaaaagaaaagaaaagaaacgaaagtatcgagcgcacatatatgtgagagaacacaatgtgcttggatgagaagatagataagaagaaagaggctaaaaagacagcaagagaaacagccacgatggaacaagatatctgccaagatggcgatcgagacatcatcagtcgaagatgaaacagaaggattgtaagaaataaatccgacatactgaattcgaacgaatcactccaacactttccaccctccgaaccatcctgccaacgactacggtgtctgggagagccgactccggttcgctcttcgagacatgaagctctggacgatcgtcactggtgagaggccacggccatctgcc

SEQ ID NO: 1170 - DNA, 537 bp, Xanthophyllomyces dendrorhous
cttggaccctatagagattggttatactcatgaccttcgtgcacagctggatcagtttgtggacattgtgaatgacatcagacatctcagaatcagatgcggatgcgaatgcgaacgcacatgcaaatacaaatgtgaatgcaacacgagtgaccagtcgtggagctttactcttcttcgggcccttcccagatctgcagaaggcaaacagctcagaagaagcatcatcgcaaacgcaccgaaagacacatagggcaaagcgatagcaatgacactcgagtacgtcgtcggcttcattctccaggacgctcggtcaaacgcagctgccatcaacaagacacatcggatcgatctgacagacgaacacaaagcactagcaacgactggctcgatcagcacgatctgtttctcatgccagcaacctggccacctcgcgatcaactgcccgagtatgtcgaaaaggaacggccgagcgagcggaagaaggtactgcgagtaccataggtcgatcactcacaacaccgcggactgcaaccc

SEQ ID NO: 1171 - DNA, 1666 bp, Xanthophyllomyces dendrorhous
  misc_feature (1345)..(1354): n is a, c, g, or t
  misc_feature (1418)..(1427): n is a, c, g, or t
aacggcgcttgatcggatactctctgtgatgtctgtttcttctgcgcgcgctgtccaatcgaagcgatctgacgccggccctacttttctgctagactcgggatgtacgcagacctgtgtgagcgaccggtctctcttttcttaagagtatgagttctatgaatgtagagagtagaatgaaaaccgcagtataccagaccgaatatctggagatgactgaggtggcaaaagtgagatggtaggaagaagctggctatatagtaggcatgggatcgagcgtagaacgataagccgagtaggagcgaagaaagccgagagcgcagaatcatgtggaaatgatacaggatgtagagcatggtcattgtacacatgatggcacagcgatggctgcgcatcggtccggattgccggagatattcatgcaagaaggtggaagacactatccggagaacggcgaagaacggaagggcgggatgctgcgcattaggtaaggttttatgcacaggttcgtgatcgggaagaaaatacatggtctaggtcgggtcacgtgatagacttatgcaagtgggatgagtaagctgctggtcgccttacaaaagcgtaaccacggttacggtgtaattttaacatcttttccacatacgactcatacgacgagacgatttatgtagccaacggccagccgatgaaagtcgtcggtcgaggccagatcagcttgctcagcaagccagcgacaggtgacgaacagtgcggactcacactgaccgatgtgttccatgtgccggggatgtcgtccgacatacttgtctctctcgtctctcagccagctttgccggatcaaaggcatcactttcagcggcgacatggatcggatcgtgttcagagacaagaacggcatctttctcaccgcttcaccacacttgcaaagcctgtggtcgctcgatgtgacggctcggccgccggcattggctgcttcggtggtgccctgcaagccggagatcgagatcgatctcgttcacagacggatgggacatctttcgagatcagctatgcatgaccttttcgcttattctcgtgtgttcaccaaacagataagcaagagtgacatcgacagtgacatcgatagatactttgacaagagcatatgcattccctgtgttggctcacgtcagcacaagactccctttcccacgtcacagatgttgaaatatacggtataagttccttgttccttgttcctggttcacagtttcatgttaccctgtcttagcagctccacagtttcaggttcccctgtcttggcgtttctatctttagaacctgtactttagccgccatcttttannnnnnnnnngacggatgggacatctttcgagatcagctatgcatgaccttttcgcttattctcgtgtgttcannnnnnnnnnacatcgacagtgacatcgatagatactttgacaagagcatatgcattccctgtgttggctcacgtcagcacaagactccctttcccacgtcacagatgttgaaatatacggtataagttccttgttccttgttcctggttcacagtttcatgttaccctgtcttggcagctccacagtttcaggttcccctgtcttggcgtttctatctttagaacctgtactttagccgccatctttt

SEQ ID NO: 1172 - DNA, 582 bp, Xanthophyllomyces dendrorhous
cctcaatcgtacgcgcgttccctcctctgtccgagcttgagccacccgttcaccttccttcttgacactggctgcacacagacctgcgtcaatgaccgatcgctcttcaccacctacgagccatacaccgacgagctcttcgttgcgagtggtgcgtctctaggtgtcgttggcaaaggaacggtgaacgtggtaagtcagtctcgctcggacggtcagcaggtcgaggtatcatttagtaacgtatggcatgtccccctcttgtcatccaccattctagtctccctcggtcagatctgccagaccgatgggatcaccttcaccggcaacagagaggagatcgtgatcagtgaccagaccgggcctttctttactgcgtctgcatacagcaggaacctgtgggctcttgatgtcactgtgcgatctccgactgctgttgctcacctggtcaccagccaggtgaacaaagagattgatctgcttcatcgtcgaatgggccacctttgttgtatgtctatgtatgctcttgtcaagtcaaacccagaggtgctcaacaagtccatcacttcacaggacatcaaa

SEQ ID NO: 1173 - DNA, 344 bp, Xanthophyllomyces dendrorhous
gatattatgacagcgagttctgcgtgccctgtgtcacatcacgacagcaccgcatgcccttctcagcgtccagtaccgtcatcagccagcctcttcagcttgtccacaccgacatccaaggtccaatgccccatacatctcttggcggtgcccgctacatgcttaccatggtagacgagtacaccgactaccactgggcctgggcgaccaagtcgaagagcgatgctgccggagccatcaaggactggatcatgcaggtcgagcgccagacaagtcaccgagtcgtcaccatccgcagcgacaacggcggggagtacatgtcgaacgacttcacgtcttggctc

SEQ ID NO: 1174 - DNA, 839 bp, Xanthophyllomyces dendrorhous
ttggctgcactgcttttgcacacaatccaaaacacaagaagcaccagtcaaagtcgaccccgtgctggttcatcagcccgtccgaggatagctttggcaagcaggcctaccgtctcgtccataagcggaacgtccagaaggtcatatactcccggaacgtcatcttcgcagaggactggaccatgcgaactgcacatcagtacggccagaacaactacagtcagtccaagacacttcctgctgctggtacatcacttccgctatggactccagacctaaccgatcctccttctgcgctatctcaggacatcccttccgagccactcggtcgcgtggatgatgagtctaccgaaggccactcagctgatgtgagcggcgttgacaaaagcacggctgatgaccatcagttcgtgatctctgaagacgagaccgacgacggtgaaaatgccgaggacacacatgctcttccacgcactcatctccgtccacttcttctccgacgatcatcacggctttctcgtactctgcctcaggccaacatcctgattgacatcggcacacgccagcttccatccacacctccagccacttactgtcaagctgtcagtggtcccttccgagtagagtgggaggcggcgatgaaggccgagatggacctgttcgagaagctccgcgtgtggaccatcagaaaggccgacagcaaggctaccgaggtcgtgtctggtcgatgggacttcacttgttcatcgacggccatcagtcacgaggccaagttcaaggccagatgggtcgcccggtggttcaagcagcgcgaaggcacgttcggagacacgtactca

SEQ ID NO: 1175 - DNA, 4306 bp, Xanthophyllomyces dendrorhous
aacatgaaaccgtgtttgctaaaaagaatgggaaagagaaagataaagccaaagaggaggaaggaaaagaagagaagtacgccagctgacagagtgcgctagctaaggctgagatacgtagatgacaagcagaaacctaagcaccatatccaagtgttttcaacaacttaatcggtctgtttttatgtcgtgtggtcgataccaaaattatagtctgttatactgtgtctcttcttctgtatctttcttgacaggacctacaaccttataactgcctacgtcgcatgcacaaaagactttacacttaccaccgatcacaagttctccattcgttatgccacttgggttctacactgactcttactatgctaatttcacaccgtaactacaagttgcacagcccaggctataatcgcacagctgttttctttccatttgtcttctagtatttattttcatgactttatcacctcccatcgcgcgacttcacacaaccttgcgctcgacattggtcgatgttcctatttgaatcaactatcagaactgatacgttcgaagatattcatttcaatcgatctcttacatctctatgagggtagacggcctcgaaaacctttctgtttcgacttgattgaatgtacagttgtgataaaagggtgtgtgttgaagctcaagctctcgaggaatgacgaaaatgccaaaattataagcatagatgcaacgatagataggacaaagacacttcgaacgtagatgacagagtccaaaattgacaggagagaagagagaaaagaggaaaagaactatggggaaagggaaagcgacgaagttcttgtatctcttggtcgctcggcatacatgcaagccagaaggagtgcaagacggaaatgatgcatacaggtgccgtaatgaatgaaggtcaaaaacaagaaacatatattgtaaaggtagtatgcagatccatgcaaaatgtgttactcgatcagatctctatcaatactcagcttattctgtctcagtcgacattttggcagacttgtttctccgttgtgatgtcttccgatgttcatttagctttccttttacttatctttatatctatcttggcacttgtcttctactttgcatactttgacaaattcatatttgtgcttaacgcggtcttttcatttcctatctctttttcatttttatttttccacagcattcataaatgttcacttataaactaagttggaagaactttgtaccgtttaacggaacggattgggaattattcaagggaatacagtgtgaaagaaatatacagaaaaaaaaaattaatggcggtagtttaggtcaaccaatacgacaaacaacaatgacgttgaggtgagaaacaagacaaacggataaaagagacaaaaaaactaacatgaccgaagaggtccacgtttcaaggaaaaacggaggagaaaagtcgcaagtacagtgagaaaggcacccacaataaaaaactatgcatattaggatgtcaactgaaataaaacaagtcaaagacgtaagaaagaagctgtacgaaatcattcagccctcctattttcaacagttggttcgaaccattttttcgtgtttctatgttcttatctttccttctccatttctttattggttacccatttgaagtatgaaattatgttgataaagtatagtcatttaagtgaagaatctctggatattctcctcatgagcatacaaacagagacttgggggttgcgaagcatctgaaaacattattcaaatgagacatacgaaaaaacgatagcaacaacatatcacttcacttgattgccaccaccatataactctccaatgtgattgcccttgacaatcactcttatcacctcttgacaacccatatctggataatgatgatattgatagtcatttcatctctttgttcagaattcaaaggtgaacgaaacagcacacaatttgagaaggaaacaaagcatgttttatgtacaatgaatacttcttgaccacgcatagcttgactgactcaatatgtcggatcttgcaagttcgaaattagttttttcagcctctgttttctacgatttgcacaatactttgaatacttcgacaatggggtatagcgactggcaattgccaaatcagcttgcaaacatgtcgatgtaaagacgcatatctcatgccttttcatttcaatttaaaacagattttcgaaatttgcctcattcaaacaatcactgaaacaatatacgtaatgtcgaaacggtcagtacacaataatttttgttctgtcaacactcttttttttaatacagaaatgctttgtcaattctctctttgtgcttttttcaataaatatatgtccaaatcattttatatttttttttacaaaagtgccacactgatgaattacaatcaaaacatttacaacaaagatactatgatgaatatagaaatatcactcttcaacactgcatcgcgtaaggctatatgacaaggctttgagatgagttcatttcactgctttatcactttcaatgtccgttgatataaattttcatcaacattgatatacgtcagattgagcgtatgattttgattgcaaagttttgtttttggctacatttttacaaatcacgcctatgtttcacgaattatgcagtttggaacatagcaacatctgctgaaaattgtccatcgtaatcgtcaggttttgcttttcacgcagtcaaaacaagaattttgcaatttaagacctcatccttacaaaagattggcaactggccgtggttaaattatcaaacttggcatgtggatctatgaagcgagcggtaagatttaaacggtatacaataaaatatctgtgtcaagtttatttctgtaaaagtgagtatataacttgaatccagcatcgatacttgattgtgaaatgaagaaggggaagaggaaacaatacacattaaaacatatttgggctgtatgctcaaattgttcattatctctacttctattcatcatgcaagtcgtgatttgatctcttctttgattgttggactgaaatatatcaaaatgttcaattatcgcatcatgcgtctctcaatcacttgaaagcttttgaaatttgcaagtgaatgagcctgatacaattctcgcttggcattcgtggatgtttcaaaaatagactggacacatgtactagtcttactactttgtgttcagtgcaaatatatcctaccgcgttactcccgacatatcgaattacacttagcaagcctggtttgccgatatacgacccgctgaactatatactcagaacccagaaaaagacatagacactaattttatgtccattcaggagctctagattacccgataaggtataaaatgcacaacaatcattaggaacacaaacgaacagacgttaatataagcccaactctaaaatatatcatcaatagctggaacgaactacgttagtatattaggcgccatcaacttatggcgatattccaaatctgagtacatgcatatgctctgacctgtcactcacataagcttcagttacagaaatacatttttatgtatctcttaccagtagacgaacaatgaaaactacactttctgaagaacaatggaagctcattgatagatcatgattggcggaatgaatagtttgtgacagataaaggtcgtaagcaatcaagcagtttgctgacaaaatttacattgcacgttcccttctaatataactcaatgatggctcttagccatctacaatgtacatagcaaagcattacttagtagatgcagtacctagataagctgagctgttgcttcatggactcttgacaacgtttttcacctacacagagactctgttatgctcgtattgtagtgaccgtgacaagttgatgaggtgataccctatatacctgtgaggcatttgaccgacttgtcgcatgactgtcatctctacattctcgatgtcacattggataccaatatgctcaacagacttcatgcagatctgcgtcaacgtacatagcttgttttgcttcagatcgaggtcagtgaccatacacttcttgccgacggcccagtcgactctgttgctgttgcgacagcatcggcccatacgcatcgacgtgacagagtgttgtgcggcaatcatggctcggtggcgggtgcggtgatgtgtactgattgttgcaagcacgcccaagaaaagattctggagttgtcttcgtactgactacccatgtcgatgtttcgcatgttgggcgctggacac

SEQ ID NO: 1176 - DNA, 996 bp, Xanthophyllomyces dendrorhous
ggaggctgatgcatctgtgacagatcgttgcaagctggtccggatgtccccttcctcctctcaatgccgtgcgcagtggagttcgctctcatcctcctacttagcagaccgcatcgtacactcgcgttcatatttctttgtctgacgttgttcacttatttcctcctggcttatgctcatcagatcgacgatgttctgcagcacaattgcacatgcacatcacgtaatggcgggtaccgagagccgtaaatggcatgtctcatgctatcgacatcaatgtcgtatgcaaaagcgtggcgactcatgcttagcgctctggtacgtgactgtgttggtccttcacaaagtagtagcatgctactcatcagggtcgtagttatgcacgctcagagcatgctcatcgcggcagattacaagctgtgccacgctgcgactggcatcaggcttgtagtcggtgagggcgtaaagctgaatgtagatatccgacgaggcttcttgcctgtgtctgtcgttcgtccccgtcgtgtgcagatttctccagctcagatcgtcagagcttgctaaaggcaagaattgcgcgtgtcgcacggcaacatgacagcgttcactgagcttcgcaagtgcattgacactgagggcacgtggtccttgtctaaacgagccttcgtgccgggcatgtacacaatggtgtttgggatcagcgttgacgcacatatcgtgagaccagcttgttgctcgaggtccttcgagtgattctcatacacgctgatggcgcaaaagccactttgcagcagctgagaaaacgtgtgacagaccatcgcactgagaccggcaagcattcacaagaatgcaaccacagccgacgcctgaacaacgcacctactggcatcccaccgtcatattgcatgcgcacaacggcatgcataaagcgtgtccatcaacaacagatgtggcgcgttatacctgtcggcagctacctcacggcagctacttcac

SEQ ID NO: 1177 - DNA, 547 bp, Xanthophyllomyces dendrorhous
cctcacggcagctacttcacggtaactacctgacgttgcttcacacttttccagtgatctctggctgtggaccagctgacgcatatgatgcacacgccgctccagctggtgtatatatcacaacatatgatgaaggcaaagtgagcggatagtcgtgacggcggttagaacagtcgtagtcgtcgccgtcagcagcatgtctgaacatgaagaatgggtcattcaagccagttgctgatatcttgtctatcaatcacacactgaaagcctggatggctcgaaagttttcagcctttactgtacatctcgtccatcagactcgtacgtctgatggttgctgacagcagttggtactgggtcagtccatctgtttgccacaagagcgcttttttagaatcgcagctgagttatgcgatctggctgatcgtcggggtctcaattctcactgaaatagagtcagtacttgtgatgcgtgttgacttcattataagagtggctgttgtaaggataaatatgtgtacctgcagcccactaacagcatgacaat

SEQ ID NO: 1178 - DNA, 508 bp, Xanthophyllomyces dendrorhous
cccactaacagcatgacaatgggaacatcatggtgcacggtcggcctatcaaccaagaaagaataacatcatcgcttatgggcatcatttgtcgcgattgctgtatttttctaccgagcaagcctgtgatgtggatggtccatggctaggcttgacagacttctattcaccagcaggtagtagagcttgtatagtcatgtcggatgcataactaacatgaaacggatgaaagtgcatatacgatttttctgtcatactcgtgtggaagactaatcaatgcatcaaactatggtcagcggtgatttgtactgttcgtttggcgcccaaacatgatcatgcccggctaccgttctaatctcattcaggctcaaggcccagccagatccggtttgtgtgtctcttccgtttgtgcatcagagaaatgtatcgatctgttgggcatttgtttcttctacgaagaaagacaaattggatgtactggctcgaaagatctttcttttcattgttc

SEQ ID NO: 1179 - DNA, 348 bp, Xanthophyllomyces dendrorhous
agagctccctaattctattaggttatgagcccggcttaaagccgtttccacaataaaacattccaaaggagcccttgcgatatcatcaaaaatcactacaacaaacaccactgccactccaatggaacctatcatcctcaactcctcggaggagtacaccgcgtgggagaaccagatcgagatcgttctcatgggagaaaacctccaccgctatatccagactacagacgaaggaaagcctgccatctcttgtcctgatgcaaccgatcttgccacgtaccgagcgtgggatgcagcgcggaacaaagtgctgtcgatcattctgttcagactgagcctcggcgtcat

SEQ ID NO: 1180 - DNA, 430 bp, Xanthophyllomyces dendrorhous
agcaagtgagtgtacggctgttccataggtcagcgaaagagctttggtggacttagcataggtcagtactctctgcagagctttccagtgtcttggtcctgggttggacgagaacgatgccagtctggacacggagtatgcgaggtccggcctggtgaccatggtgagccaaaggagtgagccgagaaggctgacatacggcttgtccttcatttcttcctcctcctcagcgttcttcggtgacatctcctttgagagatcgacagacaccatgccgggtgtccacacagggtatgtctccctgtcttcgaacttcttgaccatctcttcgatgtatggtagctgatcgatgctgaccgtgcgtttggttctgtccctggtgactctgagtcccaaacagaaggccatctcgcccatgtccttcatggtg

SEQ ID NO: 1181 - DNA, 467 bp, Xanthophyllomyces dendrorhous
gtcgtccagctgggagaccgaaagcaggttgcctgcgatctcggggacatgcaggcagtccttgatgatgatcgttgcgcttgctgtcgtcagcttgacgtctccgcgtcccgtcgaccagagtgagtttccgtcgccgagcagaatctctttccgttccagtcgatatgtgtctggacaaaaccagtccttgctgctgaagatcgaccgggagcagccagaatcgatgtatgtttcgtagctttcttttgtacgatcgatgatccttgatgtcacttggaacgcactttctttctcttgctgcacataaacagaaggctcattcgatacagctacatgttcttgtgcttcttggccagggcgcccactctgagcaccgtcgttcgctcgatctctgtacgtctcgttccgccagggtcagccgttggtccttcggtttctgcagtcgatggcaaggtgtccatact

SEQ ID NO: 1182 - DNA, 6202 bp, Xanthophyllomyces dendrorhous
  misc_feature (148)..(157): n is a, c, g, or t
  misc_feature (411)..(422): n is a, c, g, or t
  misc_feature (676)..(685): n is a, c, g, or t
  misc_feature (2225)..(2234): n is a, c, g, or t
  misc_feature (4345)..(4354): n is a, c, g, or t
gtggccaggcccgccacatgagacgtgacctggatgcggtgtcgttacacaaggctgtgtaattccaacagataagcagaaaccaaagcaccatattcaagtattcttaataacctgagtgtttcacccggtaaccttctcctatttnnnnnnnnnnctatcattcctcctgctttgttctccctatgctctctcccattacagcgcaggcatttctagcattttctacgacctgttctcttatgcataatcattggagtctgaggatgatatataatacgtggttcctttgccaccaatagtatagtttctcaagcctgaatcctctatcctccttggtccctttgtattcttgtaatctgtgatatcaatcttgttcttccaaatctcttcgcctcgcccctccgtcannnnnnnnnnnnctatcattcctcctgctttgttctccctatgctctctcccattacagcgcaggcatttctagcattttctacgacctgttctcttatgcataatcattggagtctgaggatgatatataatacgtggttcctttgccaccaatagtatagtttctcaagcctgaatcctctatcctccttggtccctttgtattcttgtaatctgtgatatcaatcttgttcttccaaatctcttcgcctcgcccctccgtcannnnnnnnnnctatcattcctcctgctttgttctccctatgctctctcccattacagcgcaggcatttctagcattttctacgacctgttctcttatgcataatcattggagtctgaggatgatatataatacgtggttcctttgccaccaatagtatagtttctcaagcctgaatcctctatcctccttggtccctttgtattcttgtaatctgtgatatcaatcttgttcttccaaatctcttcgcctcgcccctccgtcacaatcaccgagcaagagagcctgaacttctcccctactcttcgtactccttgtctggttacacttttgtaaccttcccattaccctctgaacccggaacctgacagtccgtttctcgccgaatgtcgccgttcacgtgatcgctttcggccggaataactccggccatccttcccggagtgcactcagacctgcaccatcataaccgcacagctgtgctctatcgtcccatatcgttatctcatatcctgtactttttcggctttccttcgcattgaatcggctccaccagccagcttgctgtatatgactccttccttcttcccatctccttcttgcacctcagtcgtcaccagaactacagtctggtatactgagtcattcgttctgtatttactctcgacagaactcttaatcttattagattaagagtctgagtactctacgagctaacatgccagatcccattctttccacagtgggagtggaatcgacaccttctgaggtctcactttatcgagaactcagaagcaacacactcagtaatattatccccctaccagccccacatacttcacaagtcaactacaagatgtgggaacgccgcctggaatcggctctgttcgagatgcgtttgtgggatcttgacgaccaaatcgcacgcaacttcatcatatctgttctcacagactcggagggagagcgcataagtgagtgtctaacagctcacaaacagatcgaagtccttcgatctgttcatatgcaacaaggcaccgtcggtgtttttcaggttctcagctccgtctggaatatacgctccgagacggctccgagtcttcaaagccatgtcgaccatatcggtcgacaacttcatttgactgaacagatcgccggcaaaaccatgacatacaatgaactctatgctctcattcttatccgatctttacccactaccgctcacggacaatccttcgtggccagcttacctgctttggcaggcaatgatgctttgggtcatcccaacccattaacatatgaattcgtttctggagccatcctccgcgacaagcaacttcggaacacaaccagggcacttcacaatagccgtgagtcaacctctgcacttgctgtcactccttccagtccacaatgttcgtactgtggggactttggccactttgccaaagcctgcccagacaatcccatctcacagactggaaggaagagtgacagtaagtacaaagccaagaaattctgcgacttccacaagtcttccggtcacaatacnnnnnnnnnntcgacttggttcaggcaaagggacacctcgtccccaagcaaactccttgtcggctcgagatcctgacgagaatgaccaaacgtacgctcattctatcattccacagaatttgtatccctcgttcaccttccttcttgactctggttgcacacagacttgtgtcagcgacagatccctcttcagcacttacgagacctactccgacgagctcttcgtcgcgaacggtgcttctctgagtgtcgtcgggaaaggaacggtgaaggtggttagcaagtcctctgtggatggtcaggatatcgatgttttattgagtaatgtttggcatgttccaaaactatcatctaccattctcgtttcgcttggtcagatatgccacgttgatggtatcaccttcagtggaaacaagaaagagatcttgatcagtgatcgttctggtgtcattctcactgcctctgcgtacagcaagaatctttgggctttggatgtcacagtccgaaccccgaatcttgctgcctcgctggtttcagaacgaactgagaaagaaatcgacttgttacaccggaggatgggacatgcttctcttacttctatgaaatctctcatgacatgctctggtttctacaagacaaaggtgacaccggaagatctgaaacactactttgatagaggcatatgtgcaccctgtgtcgaatccaggcagcacaaaacaccctatccgacatcaaacacagtcatctctcaaccactccaactcattcacaccgatattcaaggtcccatgcctcatgtgtccttcggtggagcacgctacatgctcaccatcatcgacgagttcactgcttaccattgggcctggtcggtccatcaagctcaaaagcgatacggcatccatcatcaaagattggatcgcaaaagtggaaagagagaccgtttacaaggtcaagacaattcgtagtgacaatggaggtgaatatctttcaaacgactttgtctcgtggctcgaaaccaaaggtatcaaacaagaaacatcgatagcaggaactccccaacagaacggaaaagcagagagagcaaacagaacgatcgaagaaaagatcactgctcttcttgtcgagtccggtttgccaggttctttctgggcagaagctcttgtctatgctatctacatacttgcccgcaccgttcgcaaggcgagcgggcggacaagatatgaagagtggtttggaaaaccacctacctttgaccgacttcgtgtttttggctgtactgcatatgcgcacaacccgaaacatagaaaacacgagtcaaagtcagtttcttgtttgttccttgccccatcagaagacacatttggaaagaaggcttaccgcttagttgacaagcagacccttcgaaaaatcatctactcccgagacgtcgtcttcgacgaagcttggacaaaacgatcagaagcggaagctcatcacagttcccagagtcagacaaagatgtcgattgcaagtccaatcgaacgtcgtccaatccacatgagaaacacagtgcctgactcatatctgactcaggatacactcgatgatgagcaatcgcctatgacggatgaaatccaatcagacacggaagtagaaactattgaacaagacgcagaacatcagtttgtgcagtctgaagatgaagaagaagttccagaacaagaatgtcaagaaatgcgagacttacgccgatcacctgtacatgaacgagtttctccgccgccgatcgttccccgccgctcagctcgcctgtcccgaatctcgagaccagtagagacatgtccacaagcaaccattcttgtggatattggttctcgactcctcccatctcagccgccaaagacttacagacaagcccttggcgggccgtttcgaaccgagtgggagctggccatgagggccgagctttcccagttcgaaaaactcaaggtatggaccttgagaccggtcgatgatccggagacgcaggttatctccggtcgatgggtctatacctgtgggccaacgtcagacaaaaacacttgtaagttcaaggctcgctgggttgctcgtggattcgaacagcttgacggcacttacggnnnnnnnnnnattcttgtggatattggttctcgactcctcccatctcagccgccaaagacttacagacaagcccttggcgggccgtttcgaaccgagtgggagctggccatgagggccgagctttcccagttcgaaaaactcaaggtatggaccttgagaccggtcgatgatccggagacgcaggttatctccggtcgatgggtctatacctgtgggccaacgtcagacaaaaacacttgtaagttcaaggctcgctgggttgctcgtggattcgaacagcttgacggcacttacggggacacatactcgcccgttgcagacggtacatcccgacgcatctttctgtcgatcatagcaaacgagaatctcacaatcagacagggcgatgtgaaaacagcactcttgtacgcaaaactggacaaaccgattttcatgactccgccaccaggatatgcatcctcgaccaatgatgtctgctatgtcaccaatgcaatatacggactacgtcagtcaccgaaagcgttttgcaacagaatggcaacataccttgcaaccattggactaaaccccatcggctaagacaactgcatatttctaggcgaaagacatgggaaaagggtgatcctgatgctatacgtggatgattttgtgattgccggtgctgatgacgatgtggctggtgtgttcgaagacatcaagcgccagttcgaagtcgacgaccggggcgatctcaaccctggccagctattgggaatggagttcacaagagatcgaataaacaaaacgatcagcatcacccaaaagtcatatatatccgaagttcttgaccgattcaactcactggatgttgtaccaaggcggatcccgatgcaaccggatctgcaactgtgggagtcagactgtccgtcagttccggacgaaagtctgagaaaacagtatcaagaactgattggctgtctcacttacctagtgacctgcaccaggtacgatctggcatactcagtgggagtacttgccagatactgctccaaccctgaccctgttcacatggcagcagcaagaagggtactagcctatcttgcatgcacgaaggactttgtcttcaccatcggtggtggaaaggctcagccagtagtagagcttttcaccgatgcagatcatgctggagacaaagaaagcagaaagtcggtgacaggagtgttagtatacgtgtttggatcactcgtccagtggaaaagtaaaaagatactttctataacaaagtcctcgtgggagtcagagtacatcgctctctcccaaggatcgtcccaggtgatctgggtgaaagcagtactcgaacaactgggctatgatgttccctgtgtggtcgctagatcagacaaccaaggggccatcgcatcagtcaagaacggccaactccatcaagggtcaaagcatattgacttggcttacaagtatgcgagagacctctatcgacaaggtctgctggatctgggctgggtagggacttgtgacatgccagctgacatgctcactaaggccctaccaagagaaacgttcgagagactaagagagaaaggaggactgagaggtcaaaccactggtcgggagttgaaccagcgatctgctcaaggggatgatggtggttggaaggtcaaagcaaaagagacaaaagacaagaaaagcaaggttcttataggaaatccgaaggctcatgcatctcatgctgacgacacactggttacggcgagtgggagtgttggaattacacagccttgtgtaacgacaccgcatccaggtcacgtctcatgtggcgggcctggccacactgcccggctcactgcccaagtcactgcc

SEQ ID NO: 1183 - DNA, 8437 bp, Xanthophyllomyces dendrorhous
acaatatgcttactctatcacctgtctatagtcattcgttctgtattctctcttgacagaactcttaatccttttaaattctgctgctttccttgttcttgtccttgtcatcgttctagtgatgtcatcaatcctgtttctcagtcccaagagcctgaacttctcccctgaaacctaagagtcttgtgtggttactacctcgtaacccttccgctaccagcccagctcccgcccctaacaaggcccgccacatgagacgtaatctggatgcggtgtcgttacacctcgctgtgtaatttcaacaggcgagtacacgctgagcgaagtgccagtgtgttttgtttgagttgagacagtaccgagaaatcacaccgactgcgaaggctagatcgtacccagtgcacgtcacaatgtatgatctagccttcgcagtcggtgtgctttcttggtgccacgatcggatccgaaatgactggtataaggtgaattggcccaacatagactgttcttgacacaacgccagcatcgggatttgctgaccgtgtgctatcaacgccgatgcctttattctctctcttccttcatcttgctttctcatcctcttttgtctcccgttgtatttagtgtgtatcttcttatctctctctatccgatttatgttgctttgtctttctttgtctttctttgcgtctccttctttttccttagcttgttgtcgagaacgtgatgagagatgggatgaaggacagcagaatggcatatatacttggtagcttactagcattctttcctctgctctctcaagcttgaaacctcgtttaattctcaaagtttcctatcatcattaccatcctccttactctgtaatattgtatgatccccacctgcccaagagcctaagcgcgctgagcacactccccactcagcccccctgcctacgctcataatagaatacaaggcaaacttaaaggtataagctaaatcatctataggccacgaaacctgctgagggattgaattagttcggtgtgagaatttgcagacatgcgtgttagaataatattgctcagacatcaatcggaagattgctcttaggtgagaccaacactctgaaaacgcccgctgtaccattctattctgcacatgtcgaagcttattacaagaaatgttttctcatactcgttttagaacctctcatatagatagcggctgcgacctatagttcatattctacattgagtgcagaaggtatcatgctcaactgagttttgacatgactttcgatatggaaagggacaacgtttatacaagtaaatataaatgacaccactcgaagattgtggcaaagcagtacgcgcgactagatggtataatcaagaattcgcgaagaacagaccgaaagcatgatcaaggcctctattcattgaacagaaggaaaaagaaatgaagaagagaaagtggtcatgctgttatatacctaaggacacgccaccttgatacatccgaaccaagcaggtggcacacatgccaacaatgtaaaaggaagagaaatacataagaagaaaggaccagataatacacagagctcgatccgtcgaatcacgtcgcaaacagacctcgatgttcaagtgccattggacttgtcaatagaggatagttatcgataactatgcggataagacgattgttgctgcggtataggcgtttgagaactaaattggttgcggacaggttggttgaagacgatttgtggaggcaaaaattgcgatgagtgctggttcattagaggtcgatgatctggatgatgtgacagcactgctggcccctccgaactcgataggggattgtctaaaagaatggtcgctgaaacggagcagaatgaacatgtgagtaaacattaattatcctcagaggggtttgacatcttgaaatcagtagaatgacgatcatattcaaagaaaagtatgacctacgttggagttcaaaacttcaacagcgacgatcatatacagtgtgttgaaatttagatttattataaacattaccaatcgaatcaaaggtgcttacatcgtttgaggtgtatcgttcgcctgatttttttctccgtccatgactatgtgaaccttagactccatggtggcgctctcaacaccatatccttgaggtccaggagtagcctgactgagagaactacaccatgtacagatgaaccaaaaagaaatcagtctttgttcttttgataatttatcactgaatgtagatgaagaggacacgagtatgaacccacttgaccccgctgccatcccaaacacaacgaacatcttttccggtgatgatttgtgctaatcggcccgtttgaatatgtcgaatttcaatgtaattccaggaaaacagcaggaagtaaggagggtggaaggctacggttttaggcaaagtctcccaatcgatagttttaccacctcgggcaggttctccgtgcttttcaacatacagtccaaatgctgatcacaatgatgagttagtaaggacgacatatatctcaaactgacgaagactcttactgttatagcataagatgaattcagtctaatcataaaggggagcaaagttagttccggtctcgttctttacgaataagatcaaacatacgtctgtcgacttgaacatgcccaatgcagacgcgttttcacatctctttgacaaggcttgcattgtcgcattgtctttcactttctgcgcctgaaaaacaggaatagagcctgtctgtaagctgttcatgacaaacgatatgagtcagttggattacaagattgtcgaggttaatcaacagatggaaggaacttgcctctgcagatccataatctcgaacccttttgcacaaacaatcgcaagtttggccttcaagaaatgtataaactttgcatcggttggaataaagaaatcctgtttgcagtgttgttcgaaagatattcatctaacaagctcaagagatagatgaggtatatgagtcgactgaagcaacacgacataccttgtacacttcaaaactagtccctttattgcttccaaagaaaccgcgacggcccctaaagattaaagagttgatgagaatgatgaaaagcttaaccatgaatctctatttgagcacagctgaaagcaaatatatatgaatagtgctcacgtgtcgcctcttgcgccttttgatataggctctagcacacggaagacgctatcaagttgtttcttcttcatgtacaccaccaacgttcgtccagagagctggccaacactgaacgaaaggacatgagccgttccgcttaagcgttccggtcctctgctacttggagcgggacccgatggagagggtacgagatcttctaattgataagcaaagagagactatgaacaataacggagattagctgcttatcaaaggcaagcaagaaagaaaacacccatgcttacatggtctgcaagaacgaggaacatgccaaaacgttctagaacagctatgaccgtcacgtttttcactaagaagtgaacgtattgaagcttgattcagatcgattgagaaaagattctaaagaaagattttaaggatgtcttaccatgcagaaccttgctgaaagctgcgcatgttaagggaagttgcgaaatatcagatgttgttttcatcataagaccaaacctctgaacttacatcttagattccctctcatcccaatccaaaccccttcatcacaaccaatggcaactaattcacgcccatctcgagttcctttgacaaaaaaaagattatgacatgtctctgtgttggtgtcaatcgatgtgcagacacaaactgccaaacatacttacggaatgggactgagcagttgacttgaccagcgtaagggcttggatgtgtaggtcggcctaaggagctctgaggaggcgcacttcctgacttgaacagtgtcgagacgcaaagctcaccaagttcaaaggcctatttgaaacagtatgagggtcagcgctgggaacatacacttcaaaatgttatacaatagacattaccttatttgaatctgagacaacgtcactgagagtttttgcctcttgtagcttgtttttccattctgatcgtgattgttctgaatctgcccaaagctgatatgtcccacccatgactccacttgagcccacaacgtatgtgaaaggaaagacctgctttgactctgcttcggacgaattgataacttcagatcggtcttttccccgaccgatcaacccagttgatagagacgaagctcgagacattgcacctgaaaaatttcccagatcaagcaagctgagggggatgggctacagaaaagtttaaatgaatggagtgagcttgttcttatatatgatatatgattattcccaaaaaaaaacacttactcttttctgcagaacgtgcttctgttgtccttcatctttcttgccctcccgtactttcatgattcgggtcgttacgagatagttatctaaaagaatgatgaatacttgtaatccatcaggttgacgcagatatcccttatgaatcaattgtcgattggggtgcatcaattcgagctcagcaatcttcaagacacggaaaagagattttgaagcccgcacgacaagatgggaacgcgtcacccaaaagagcaaagcattggtcagtgcaaagacaccctctaaagaattatgagtagagactcacgacagaatcgtgaatcttagcatcactagggatagccaatgtgtcctttaattgccacatctcgatcttcaattgagcctcctcaacggctttatcaactaaagaggctgacgcttgaagctcttcgagcacttgcttgacctcatccgtcggtagaccttctttcccagtcagcttgagtatttccttcagaagaagatcgtagcgcaaaagtcgagggataggtcggttaatgaaatcgtacatgtcctttttgtaggcaagtttttgacgggtacaattctgatcatatacatttaacaagtttagaaacataatccagaacccaaggatcagaaaagcgtagcaaacatctacatgtaatttcattataaaattgacagatagcttgctaaaataactcacatcaaaaaaattggagaatgcggggttattctttctttctttgtcaatcatgtatttagcaatcggataattggccgcgtaagctctacaaagtgatatggtcgggagcagagagaagagaaaaggatcagtgaggaatcgacaaaataataataacgatacacaccgaggctactctactcacctgtaagaatcttcccactgcagcaatgaatcgtatataagatccgtcactgaaacgatttttggatgctgatctctctgcctttttttgagtcggttgagaaggtgtcggtgaatcgaaagaatatcttgatagttatggaaaacgtcgagaatgaaccggttgatacgggcggcatttattatcggagggacagcttcccgtaaaggaactatgaacaactacattttcgaaatttgaaatttggtaccttatgagaacgataatagctgaggagcattgtgatattggacgtacaggttctaaagcggttaagtctgaaacgtattgtatttcacctttgatgatctcgaatatcacgctgtgattttttggtttaaaaagacaggttctgattacctttccgtcaatacctttccaagttatcaagccatgcttactgctgccgagcctgaacttgtttaggtaaactctgcaaatcttcatctgagacgaaatcatgccactcgagatgatcatgtactcctctgccgttgcccgcctgaaatccaagaagtttcccctccattgcaaattttgaaatggccccatctgcctcagcaataaattcggcatcgaaataattggggtcggtctctttgagaatagcatcgagaagcttgtggtacctttggagttgagtcaacggccggctaaggaacttcttcaaatctcggcctcgggcctcaggcgtatgacttgcgcgctctgcaagcattcgaaactcaggaaatttttccatagtcgcatccaaacaaagctcggccgctgggaccttggatagatattcggcgtatatggggcgaaactcggccgccgcatgaaggaatacatcgccaatagtttcaatcgttggtcgctgttctcgctgacggaccgtgaagagttcaatcagtcgctcattggcgaggcgaatctccaaaagatttgaaaaaactgtctgtatgaaggattcaagaaccggttgaggatggatgatgggtgggtctgctgatcgaagaggaatgatgaataacttttaccattgcacagaatattaaatcatgtaggaggtctgtttagtcaagcgatcaagcttcgataatagtagcaatgacatactgtctcgatcgtcaacaggtcttccttgtactgttcctcctgaagaaccatagtatgaatagcttcttgtttccttatttccgattctgagagattccgaagaacaaatgggtccaccgtctcggcccatgtcctctttcgctgcctagtttctccagtcgttgacactgtgcttagattcctactaagcgagttaaactattacaacagaaacgataggaatgaacggattaagtttgtaaggcacaattcgatgcaaagaatacttgtagtcagttcgattctagatcctaatacgatcaaatgacaaagtaaagtttacctgtgttttatgaggacatgtatatgaataacaactctggtcccccggacaactcgcgctatagcacttggtcaagtacgtaaagacccctgtcggaagttctgccaccccacccgcacctatctctgactcatccatgaaagtgaatacatcgtccagagaatctgtcaaagggatatcgtcgaaatccacttcaatgatgaacagttgagatttgagagctcttgcgacctcgagagcagcgcggcgatcgttttcactttggcgaatgaaggatggcatgaacgattgtatggcagtctattgacgaagcgcaaagttcataagaataaggaaacaaacagatgaaagtcagctggcaggttacaatagagacggtttgggatatttataataacgtaccacaatatttttaccagtgaatgaattatggaatgagatgctgcctttgatatgttctcctctgacaactttatccttcaagtgaacagccacgttgctcaacaaggccacttggaagaacctcagctcgctgtcctcttctacgtctgatattccgcctcttagataaagatcaaaacctccctcatcaccaggttcgataagtgtgtccacaagctccccagattgcgtatcagtcctcaacactggtttggctctgaactttcgttctctatcgaagtcttctttgtgtcggaacgtggctctatccaacgtagcctgatgatcgcgctcctgatcctcatcagaaaacagtggtcggggatactgtccgtatcttgatggtcgcgggtttgcggagtggtacgctaaagaggggaaccttttgaaagtcgtagttgtctctttcaggatctcgtcggttatgagagaagaaccatacggctcgcgttctgagttctgatgtgacggttgattggtcgatgtgatctcaggagaaggaagagcttccggaataggcaaaaaagaccccattgaaagactcgatgtcgtccgatccagcattcgatctgttcgaaagggttgggacgagtgtacgcttacatcagtcaggggcgatagcattgacgattcacgagtgataacatgacgatgagaccctcgacgtgatattgattcagatgagctttcagacacatgcgatggcctggaaagaccactctgtccatccaaaaaaacactcgaggatcgcgacggggaagaataatcaagttgactatattcagtaaatgattgagttggctgagcactgtagtacgatgatatcgaaacatctgaggatgaaggctcgtggcccgttctgctttgacttccatcatcagagagtgcgtaatgagatatgtcagttgtgcagcttagctcacgcgaaggaggtatctctaaatctagaaataaaaaagatgtcgtacctgacactgtatcgagatgtaggagtggtttcgtacgttgctggtgggtgatatcgagaagttgagacagacgcaaagttgggcccgaggctgaccccagtattcgaaactggagtcgtgaaggaagaggaaggcacaacgaagggtgggtgatactgtggcgacgtattatgtagcaatgaattggaggctgagagtggctgaacagacgcttgagagagtggaggtggtggaggaggaggaggtggtgg

SEQ ID NO: 1184 - DNA, 49473 bp, Xanthophyllomyces dendrorhous
  misc_feature (27784)..(27793): n is a, c, g, or t
gagttacgacataagctggagagattgcatggctaaatgatgcgccgtctggtactccagcaaatattgcacgcttttcctcggcagctgttggagatatggttggagagcattcaaaagtagaagagccaaccacaacgtttgaaggtctttgctggaggttcggaatggccggtagtcttctccctccgcctcctgaaggctttctttcgcttttcgttgtcgacaggcttgctgaggctttctgtgagcctggatctggtaaagctctgacggcgaacgaatgaggttggccaggagcgtaagaatcagttgatggatcaagacccgatgttgtacgcatgcgttgaggcaattgagaagactgatcgtgcgacctgtatagtaactgcccagctacagggggctcggaagtagagctcggctgtctggtcagaggtatgtcggtagatgtttcgaatgcaagggacttttctatcggtctgtattgctcgatatcggggtacgcatcaaattgagcaaacgacttagatgagcattgtgcggtacgttgatctgcgtgttgatctgcgttatatcttggaacatgttgatagctatcaagagattgctgatatccaaattcggttggcggttgggttcctgacgagctttgggaatgatttgattgcctatgcagcgaggatcgttcgtgacgaggagaggtgtgatcgatagggataacactaccatctgtggcagtagtcgtagaagaactgaaactgaaattgtttgtattcggacaatagtttgagcagagcagagggagggttgaatcatctccacagttagccatgtcaaggcattgtctcttgatctaatcttgatatgaaaaggacgctccgatgctgcagtaacggagaaatgtagctgacttactgaggaagcgtcctgtattccactttaggtcttggtggatgagacatgttttgatcttttttttttcttttttaaggaagcctgatctaacttgaagttattgctactgtcgacgaccgcaagagtgagagtaagatatggagatgaaaaaggttatcaagagaaggacaatacagacagaatccatttacatcgcctctttgaacacagccttgaagttcacgtgtctatcattgagagatttgggctcatgctcatttctacctttctcctttctatcctacaacgaacctataatcgtcattctatcaatcttacctctgcacttgttcagcctcacttcatgttcattctatctgaagtcaaggcacgactatctctattcttgattggctgtgtaattcagcctgcgcttgatcaaactcgaactaacaccaccattgtgtctctttcttcctcctcacaggactctgtcccaatctttcctaccaactttgggctcccgacacacgaggctatcacatcgtatctcaataaaaagtatgctaataaaattcttcaacaggttggcttctgtttggctgtttgggatctggttgagtgtggcgacgggaaggtcagatggggagacggtgctgtctggtacaagggtatgttgaacttagcagctaatgggggaaggacaagacagaactgacgcgtctatttcgttcgccttctctcgttgtcattcatgccgggccatgttatggctcacgtatgtgactaatgacataatcagtcaagttcaacctcttagtcttccagccttttagcggtgaagtcttagttggcaaggttttgtcctcaacgccggaccgtataagaagtaagatccgagaactttccgtatatgcatgaggcatcaattcttctaatcaactttaggaaatacgacgagcaaaccgatacggtttgtgtactaatcctatccattctcatcgtttcccaaacagtatcgttgggatttttcgatgatatctacatccttatctcctcgttaccagccgatgaatttttcttgtgcgcatctttctcgagtctcagcccatccgttctcatcttgcactaaatccctagacacgactctcatcgatttttttgttcatgcagtgatcctgaggatccggatcagccgacaggagctcattactggcttgttccattagatgaagatgccccttcggattcagaaagaagtccgtacaattctcgaaaaatcctctcatcattcgctctccatcaagactgactatatcattcttttctgctttcatcaatggtgatgcttattcttttcaaaagcaaaactcccaatattaaacaacgatatgattcgcttccggatcactgcttccaaatttcaagaacacgaacctagaccgccgagtgagcgatccaagattgttgatggaatggccgtccctgtggacgacgacgaagacgaacaactacccagttggctattagaagtatgcttgcctcctctttctcttcttctcttgggatctctgctgccgggcatcatgttccttccgatattcgttgacagtgaaggaaaaagcgatcacagtaaactcgtaattgatcttcgttccgtgatcttttcccacaacaggcaactatagcagaacaaggactcggtgttacaggctggtggcctgcaggggacgacgaagaccaagaggaggcggacgaactggccatggatgaaagctagaatttcttatcctccgtcgaacaaatggctagatgatcatgaaaactcagatagtactttgcgatgtacacagaaactatttgaagaaaatcgatcggaatctcaagcaagaaagcgatagaagatagttgatgaacggttgtttaatataaattgtggcttggggacgggcttgtagattaaggaaatctatatattttttgagtcttgtcaatttcaggatgaacaagagtaaaggggaattaaagagaagggacgtgatggtatcgaagacagaacttcttttcagagatgatcgaacgactaacatcgaaacaggatgatgaaaatctagagaactttgtgaagtattacattaaaacccgagaaagccaaaggatgaagtgtcaagcaagaaacttcaagaaaccgatgtcaaatgaagaagacgagagcatgtgtcaagagcgaataatctgacagagagcagatgcagaagaatagaaaatttgcctcaagtgcctatcagacattcggcaaacaaggtgttgccctatcggcttggcatatacagcaaccagaaacccctcaattgaagaagtattcagacttgagcacacactgtatgtcgagcgaacccaacggcgggataggcgggatgacgtccttgaactggacaaaaggtccagaagggagggtcgagctcttcttgtcagactttaatgactcatcgctcgatggctcttttgttgattgtgctatcagttcttcggtcgtcatttgaggagctgtcattggtgtttgggcccaaagagtgaatgcgtccgttggctgatcaggtggcgtcaagggtgcagtctttgacatcttctttgcgagcgcaattctgagcttgtcagccgctgagaagggaacccagtagtctccatatcggaagaccatctgacattaaagaaaggcacattgagtaagaacacgttgaatgagagataacatgaagaacatacttgttcgtgcaactgttcgagtaaagcctgcgaagtcaggttgatgaagcaatgtcgaaggtaataattcatctcgtccacagttgcggcatgcgtccagaaagagtcgtgaacagaagccagggtgacatcggttgtctgaatagcagcgtcaagtacgtgaaggtttggaaacgaaattggcatcagaaataagcttgctactcgcacctatcaaaatggctaccaagaaacaaacaaaccttgcagttcatcgccgtcaagaacaagtgtgtagcatccaaactatgaatgaagttgggagcaaacgcgttcttttccttcttaccgacgaccttggtcaccttggagtcatccttgatctgaatatgaccgaatgctgagctgacctatatagccgagagtgggaaaggatatcccatgaaggttatgagatgacaatggaagcttaaagaaagaacggactgatagataaacgtacacgcttattcggcttgacccgataatcctgaacgatgggtaaatccaatggagtggtccaagtcatggttgttcccgtctcgtccatcacatcagctacagatttggttaccaaactaacacacacaccgagccagtcctgaatagccgtcgccacagggaaaagaccggtaatggacttttggatggtctgggcgaggtacacactgagcggataaccgtgactcttaaatttagtcttgtcaatcagatttgcctggtcgttaataccctcaatagcgttataaacctggttggccgctccagtgagggtcactccatagacagaagtcatgacctactcaaagataagcacccattagcggtcagtgtacattccagcttcctagtgcgactagacttaagaaacaaccgagactcacgggtgtctttaccacctttctcgagagcaactctgggtgtgcagccaactgtttggcataaccaacttcggcggcggtgacacctccgtttccgctagcgtccaacctaacccgctcaacaacttgtgtgagcacctccgtgtacacgtcttgaggcctagcgttaggaacgatgttgactgccttggctccttccgcgtctcggcctaaagcagcatagtactggagtccgttgcaagtcccgtcctggtatataggaagtactgaagggaactcctctgggttaggatatctaagggcattgacgtactcatgacaggccgccatgaactggagaggtttgtcggcctttctccaccacagatcatccacattctcattctccaagggctggatcggtaaagtaaagagagttcaggaaacatgttgtcagccaatgatgaattgaatgtctatattgcaggcgtaagataacgtacatcgaaagggtttctaagcgaagccaagatgttgtccaagttgtcttctgcccaagaaactctctcatcaaacgttcctttttcggagccgtacatattggtcacctgaatcttgatccaccgtagaccggtcttcccaagcggcttgggctcagcaaacgacatgattgatcgaatggcatcgtctccggcagggtggatataagacgagatagcatatacccggcctcgatagtccaaaaagtggggaagatagaaggtgtgtcccttaagctgcggagcacatagaacaacaattgaatggacgaaaaggacagcatttcagctcggtgaaaaaacaaggaaaatatcaatcaaacttacagcttccgcaatgttgaaaggcaaagcgtggtggctgtcaatcatcgacttggagatcatgggaggtaacgtcttcataaaatccaacatggtctcattgatcctccacccagtcgactgcaggtaattgattccttcagaaacgacagggacctgtctcttagctaaagcatcgttgatgataagtcgtcggacggaggacgtttttccggtcaccaacgaagctatagaaagcccgatgatcaaagtcgacagtttgttgagttcctaaatcttagcaagagcgatcggcgaaatcgactatggtgaatgaacgtcttaccttgttgatgccaatatcctcctctggagacatcgtgcgtccaagggtatggaggaaagagcatagggagttttcgagcggagctctgcaagttgggtcccttgctggcgagcctcaagatggtcgggttgatacgaatcacacgagggcgtcttgtggatttctcttcctgaactctgagaagttggaaagctggttcttccactccaagtctggttgaaagataagcccataagtcattgtttgcgatcatattcgtcatgcttgggggcttgcatgatggacaagcaataagatgcagaagagagacagatgagaaagagacctactttgacaagttgaaggcatccttggcgagagaaagcatgctagcaccaatcttgacttgcatctccatcacgtcccattgaggagtgaatggtcggccttcgtactcatatacgggcttgacactgagctcgccagatgtgacagcgtgccctcggaaaaacatcttcttaggaatctgatcgagaatgtttgagtctgcaaactttgatcgtttcccaagggagtctcccttcttctcctcagggggaatgattggaacatgctgggctctgaactcggtggcaagagcatcaccgatgttggaacacatgtctgccatgagaatatcttcggccatctgggcaggaaatctgggtgcgtaaggcgacctttctgattctggtaggctcaaccggttcgcagcttcaatgtcgacagtggcctgttcgaccggagtgagcttaaagtgacgaagcttgtttaaatctcccccgccttccaaatcttcggactcggtcatacctctcggtgggcccctctcagacttatggaaggcacgctctgcatcagtcatattgtcgtcttcctcaaaatcttcgtcctcctcacgacttccgacaggatgctcttcctccaaatgagcggcgaccggcccgtccgatgtttgggctatagccagagctgcctcggagttttcatgaataaagacgcttggattatcaagcatggactcaatctgtttgactcgggaacctgcccggcctcgcttggtgtatggcgaggacgcggcagagatgacctggaaaacggtcatggcgacggcatcggcaatatggctggtagctaggataggtcgctgagtaagttggtcttggataagtaagtgcgccttgactgagaagacgggattgatagaacaggaaggagaatatttcaatcagtcgactgaaaaactggaacaaaaaacttgcttctgtggacataccagaatgatcgagatgaccaaaagtcgcctccttcgcctctcgctcgagggcctgttccaagagacttttgaatttcctagaccagtcgttcatcaagtcctgaaagtcattcgtgttggctagacgacccagctcctgaatcttcgccgaagttgatctcgaatcgatcgcgtcttgacgactatgctggaagagatcgatcgcaagggattcaagcataagctggacctgaagaaaatcaacatcgccgttgggactttcgtatatctttttgattcggtcgatgtctgccctaaagttggaaagcgactttgcaggcgagtccggtttaacgggcacggtggttgacgtgtcgactggctgcagaggttttgtcggcttcgacatatctgcctgaatcttttcaatcataccaacggtgacgccagggaaaccaggtactgtagcggattcagccagagtaggatccaggtcgtttgccacctggctggtcgaaggaacatgaacatcaggaatggaggagtactaggagataaagagtggcgaagggacaaccagagaaaatcattagttggcaagcaaaaagaagaatggcaagtgatgtattcaaaagcagagttcaagaagagttttagctcacgaagacagctttggtaggtatgtctttatttgcagccagactgagggtcttgagcatccggcccaaaccagctacaggtgaggaggtgaaagaaccacagagacatcagcaccagattggtaagagtgattagaaagtcttgatgagaaaagaacgacgacttacccctcgagattctaactgagttcagcatactcgtgacaagagaataagaggaaaacggaaattagaaacactaggaaacagagaggcgagaagcctgttttattcctttctctatgttttactttcgactgcaggaatcacctgagaggtgaggagaacaaggtgagtaaagaagacaagacgaacgaggaaaaaaaaacataagccaagcagacagagaccacgaacagactgcaagaaaaaacacgcacagaaggaagaagccaagggaacacagagagatgtaagacgacgagagggaggacagagaagagaaagaggaaaagaaggcacaagaaaatctcgcctactttttccgcccggcttggtttccttcgccttagaaaagattttcttacagtccgttcatgcggtcgtctgacggtgaaataaccctaataggacgagctgctgacgtaacacagtaacatgaaacacgtgtcaatgtttggctgcgagataacatgtcgtaaccactgcgtgtaaccaccaggcgatccgcttctctcacccccatgatggtcgccgctcgtctccatcgtctgtgttcttggttctttcctaaggactttttctccctccttccaacaccagacattcgaaagtctctttgctttcctcctcagtcctatcgaatcctccttcgttgaaaactacctgtctgaaacagaatgacaggttaatctagcttgatctctccccttttctatctctattccttgatcatcgtctatatccgttcaattatgtatcctttcggccgccctgcccatcaaccaccgggtaaccttcccaacaagccttcgcagctctatcaccaagcttcttacaagaactcacctccacctccacctcctcctccatctggactatctcccttaccagctcctctgctgccagcttctcttccagctgggccttcatctcaaacgattcccactactaataacatcaccggtacctcttccagtaaaggtcccgccggtccgacgaaacgcagaccgttcgtccttacacctgatacctccatcgagttcaacactttcgctctaccgcctcatgcagaaatcttctggagggtcttccgtccgatcgggtcctcttcgtccactactcttccagctatcacctcccagacagcttccttctcggagtcatcttctttagcagcgttggaagcggcgcgcaagtggaccacagcccgatacgctactccaatgcctacgcccacaaactcagatacccccacgggtggtctgaatgttctaaccaactcattgttaggccatctactatcctccttgcctgtttcaagaaagccaactcctcacggaacctcatccacctctaaccaaaccatgcatgttcaggaggatagcccccagtcatctgagggcggccgcaccggacagcaccatgaatcaaacgtcgatgctgagttctggttattcgcgattgatgcggagaaagatattaatatggaatcatccggactggcggcactcctgaaagaaatcacatttgaaggccttgaaggtaaatacttttgttcacgcaactccttcagagtgatatatacttgtgctgaccatgtgaatgctggtatgcccacgtgtctatcttttccgacagagcacgctttcggatcgtttcgtccctcaaaactctatccctcaggcacctctgctcctacgtcctctgacgtaccctccactactggtgcactggattgtctgatgccgaactcagagtttcaacgcgcgtactctgtctttctcctagccgctcgcgagcggattgttgaggagctgatatctccctcctccgagttaatcaaatctcaaggcgtcagggtagttagatgcgcacgaggcgtcgttcttcttccttgggaccgtcaagaacacatccgacacggctggaaacgcggaaacgactggggaagtggttggggcgtccgtccaggcgaacgaagaccttggaacgtagggtaagtctttctttcgtacatctcttcacaacacctgagtgaaacaatgttgacaggattagcgaatttggtttaaattgcccgttttcaacataacttcgcgtctctttctcccagctcaaccatatacatcacattttctctacatcttctgcccgctccacagaatcttgtactctttgttccccatccaactcgaatacctttcgttcctttcaaccctcctcttgttgacccaacgccagccgcatctcccgtgccggttagactacttccgacaggaacgctcgcctattttctccgaccgtccaatcagatggacactgaccgtagcaagcaagcggaacgcgccttctgggaaacactccatagcccgtccgtcgagtccacacccagaacaaccgagactggttgggctgtttgctgggttcccatcgggaaatcagccgaggacaacaccggagatggcgtggtctgctgttggcctgtcgagctgatactctcttccgcgtcgtccaatgtgcttcccacgtctaaatctatgaatcccttgtctgcgagaaaggtctcctcttttacagaccattcgattggatcaggcccaggttcgagatcgatctcttctagacaagatctgatagcacattcctcaccatctttcggctcctcctcagcaacggcactccccacatcaaatctggcttcgatatggaagaccctaacctcggcgtcctcccgacatcacgcatctttattcccggcttcacccccttcgtcgcctgctccttcaggcgcgaacccgacaggctccgttgtagcggctgaaggattggacgatcagtctagagttgtcgatccacaggatgtatattttgagattgcttcatcaggtgtccgttatctcgattcactcgttcgggaaagggagagagaacgggagagacaagacgaggaaaaagaaaatgagaagagaaggaaggatgcaactcatcccggatcggttacagcaggtatcgagtactttggactggaaccagaaggagacgatcctggttcggatgacctttggggctcagattccggaggtgacgtcggccaagctgtcgacatcgtgggtaagactgtgtcgactccttcattgcatttgcccaccatggcctcatcctcttcagctgcgctccatcaagccattcagcggaacgtcgtgacgtccacagtgcttcccccactctcctctagaaagtcagccgaacaagtaggatcttccggccagtccaccgggttcacccctctttctgttcaagaacagcaaatagccgccgctgaccttggacatctgatggactggtcatgggaagatccaacagccactacgtccacttctaccaatgccaacgctgcagtcggagttgtcccatctgatactttaggctccgcgaatactcccaccataggattaactcctcagtcttccagcgcattcaacctgagactctctagtcatcgaagacagaccgaggagccaagttgggctccggttgatgccgtcaccgaggatgactttgacttctttgatgccccaggtacgggtgccacacctggcgcatcgttcctctcaaacgagacaccggcagagctgcccctgatagggggtttggataggcagcagagtttgggactcagtccggctggcggtttggccgaaacatctttcgggctctctcctctaccgtcacatatgatcggtctaagtgggtccggctctggaggagcaggaaatgccggaacagtagcgaatggtcctttctcgccagtgttgatggacgtcgacttgatggctaatgggtccccgaacaaccatcatctcatccaaggatcactcaatcaggcttcgccttctggatccagtctctacgctgtgccttctcccggatcgtcagcttggacccatgggctctatcaacaggccaaaactccaaaaacgcccttttcaccttttgtggagatcgaggaggacgaaaacgaggacaatgacgtccaaaaaaaagcggacagagtgactgaggcagggccagttaagcaagaagagatggaacatccgctcgggctcatcgagcatgtttgcggagccgcgccaaaaatcagaaatctaggtcttattccgactggattcgaaccagtgccgttcggcaaaggtcataccttggcagacggaaagtatgaactcggcaagtttgcatttcccagtcctgtttcgctcgtttcttctgagggcgaaggttcagccggggcggtcttcaaagagattgcagagaggagggataccaagaagcgtagatcttcggaggtgtgtttccctagaaccaagaagagcggttcttggaaggaacatctgacttttgatcatcccgacaaggctccatccaatttgtctacacattcatcgcggagacctaggagaacgacggagccaaggaacccgtcctcactacccactcctaccctgctagcagacctaagacttcactacaaccagattgccgatccgagagtcggcgtcatccgccgacttcaattacagtctttctcccgtcgaaaccgctcaacagctcctcttcaagaagaaattgagactcaccttccaaacgattttcaacaacaactaagactctccacgcttaaccgtcggtttgagcgtccgacggtggaagatgaatcagaaaccgatgatgaatgggacatggaagatctcatggggttcaaaaattggactttcactagtccgtctctcagggatgatcgggatgcaatagaagatgaaactgacgcattgcaagcctcgatcgactttctgccctatctggcaaacgggatatgtccttcttcgtcggccggcttctcattctctctctccacgtacaaccaatcgagtctttgtggcgaaaaattaccagttcatacgttaaatgacagctcttcagctcagacaccaattcctcaacagccaccgccagtggtgatcgcagcggcagcgacgacaccggcatgggcaccgactcctactagtccaccatttgggtcggtcgccaaagaaaccacggacgaagatatcgagattcttggagcctggttggctagagaggcagtggagaattcgttattgttcggagaactgaagcttaagttgacaagcttgacaaataccttgacccacagcagtatgtcaataacatgcatattcatctctgccaatcctttgtttcactttttgactctttttcttttctttttacgtagccttttcttgggatgcagaacctatctcctctgttctcaatgttttgcgtacaaagtcatccaaggctctttgcacccttcagagtctggccgagttgaatggtatattgacgtcatcctcttgtttctcatttgttaagacgccactctgtgtgcataacatgctaatcctctctttcccaacttcttttctctatagttaccccctcagctgtttctcctccttctctggaaacattgcaatctccaaagtttactatcggctgtcaaggcaatataattaaaacgtccccactggctcttcggttttggcccaagctaggtttagcacccgcggggggacataaggatgttgttgcctttgcgatatatgaatctacagggccaggcatgaactcgaaagtgagcgcctggctcgccaaggtaggggcgatttatgaggtacgtgtaactatctttctggtggacagaggtatattgtggatcctgagggagaatacctttgtgtctgattggatataatagtcgatgggtctaggaaagcatagcgcagggtcagctgctggatttcaacacggtctggttgccgtcgataatacgcatctcttagaatcaatctgtaagtttgttacttattttgccctctcttttattaaaaatcttttccaaagcgtccatatatcaacaacttactatttttgatactgtaccgttttagacccaattatgtcagaattgaatgcaattccacacgtcatattttacttgatcagtcctcgacatctctcatctacgtctttcagtcttcgagacgttcattcacaactttctatcgctctttcgaccttacaatcaccatcgtccatcaatcgattcctcactcatgtcataccaacttcacttgtgttggacgaacccaatcaagcccaagatcagctgtcattatctgctgtttgtctatctgtttatgatcggcttcaacgtaatgtagaccgacttgtgccgcgtcagctctttgaagttaggaatatcacgaaaagtttccgatttcctgctttctatatctctaaaccacgccctcccaacgtagagttcagcttatcctggccttcaccctcactcaatgtttcgaacaagcacatgttcttacaccttgcctacggattctcgcctaatcgggattggctcgtagcatgtgcagtagatgagcgaggtcaagcccatgaacttaaaatttggaagctcggcagagaacctttcagttttgattgggccatcctcatgctctggagcttcttcatcaaattcagtgaacaagcagatgttgcgtggaggatggtgatcagcaaactaggcctgatggaaccatcagagatcaacggtcagtgtatattctgctaaatttgaacgtgacacgacattttgattgactctgttccattctcttttcttttacgcaatatttgtagcctgggatcagcacctctccggtcaaatttcttcgttagcaggcttgatcagagtttacatcacatgcgcagatccgtcttctcctccattcctgtctagtatctcctcatcaaacgaccacacctctttcgaggagtcactggctcattctctgtctcgatttgatggatcggactctttcgtcgacacgtctaacacgacgtttggcgtatatccatcttatcgaataccctacacactctcttcgtccgataacatcctctcctctaacacaactcctttttcgaccacaacatcggcaactgcctcttcgaaacttgacgttgcggattttcaagaatcaattctacctctttcaaatttttcaatcatcagggtatcctccctgtcttccgtcaataccctgtcttcctcatcatcgtctcatacaatatcaaacttgacgttccatcatctcttgaccttggcatcctcctcttcttcagctcttcccttctctcacctggatcatacgtcggatttccgacgagaccttgcggaaaatatgcattctttatcagtacttgctcgagaacgctggggagaatggaatcctccattgggggaccatttgccgcttcatctattggcggtggctcggatgtgtgctgttgtggatctagtaagacggggggagtatggtctttaatgtatgcaacatgaggagtctgcttgacctccgttgttactcctgcttttccaccgtatttgcaaaggttcatgtcgaagaggatttgttcttctcatataatctagaatctctgaaccgtctctctatatgtcatctgacatttttagttctctcgttgtaaccaccataatatatgacctcaattttttgcctagttcatcagcaaacagaaagtcgacaagtttagaatctttcgtatatttctggtcgtacaaagtgttctctgcgttcactgggctgtttccagacgcactcaaaatccatatcgagcagcagccctattagcaatcactattcacatactgaatcatgcacagtgtttacaagacgataacaacaagacgaagacggacaggaacaactctagaccagaatcctgaccatcatgatgtactcgtcgagttagccagcacgtgatcggaaattctcaaaggttgagcaagcaacatgattgacatagaacacatgatcgaaggagtaaaagaaaagggtacatcgtgacgaaggagacggtataacgaagcaaggcaatattcgagaatatgagagtttagtttatataaaagaatcagactgcaagtcccaactacttcctgtgcccaccctcatacgattattgaacgtctcattcagtaagtcatcggctgctgcctcgtaaggagcttgcattcgaatactgttcatagaaggtgatgaaacaggagcgccgaattcgttggttcctggtcgaagactgttggacgaagcagagtgggccaactggctttctcgagcgatttgggcgagttgatcgtgaatatctcgcaatttcttgtgggcctaagtaagtaaggccgaccggaagaacataagagtaagaaacagttaagagtagaatgaaaggatatctcgaataggttcagagtctttgggtacttactgtcatctctttctccagctttctctgtagttcgtcgccaaatcgtattgcctcttcttctcttctcttcaattcatctaatttaggttgatactctcttgcgacgtcctcggccacctttcgaagtggtgcgcccagattagcttcgtatccttcgttgatgactttgtaaagattcacttgagattggagctggcagatgagtttatccttttctgattcaggagcatccgaagagataggtggtcgaagcttgagctcctcctatgataaacagtattcgaacaataatgatcaaaggtcaacacgaatctacagaatactagatcttgtacagcttcagcgatgagaatggctgacctctaatctctcaatctcgaccgcctgctcgtcgatcttcatcttagctgagaataattcgcgttgaagctttaaacacagccaaaaaactcattcaacgtcggtaatttatccagatactgatagactaagagaatagaaatatcaccaacctcgggtccggtagcttcaaaatcgattttcgttggcgaaacaggacgagccggagcatcttcttcttcttccacactttgagaggtaagaatgagcgaagaaaggtctcgaattcggtctctgtattgagtaaggttttgctacaacattgataccgcaaagatacgagtgttggtgagcatgtctctgcttgaatggctatcgagaacgatgacaatttacgaacctcctcccttctcgaaagtcttctggaactgtctttgggaacttccttctcttgaagctgagctcggagctgagctatttctacttgatactgctggatgagcgcatgtggatctcctatcacttccttcttcgtcgcgttcagtttgacagattttagtcccgtagcaaacaggagagttgaattggtttcaggtaagctgtcgttttgagaagtagagattgagggccgatgtcaacattacgcgccttatcaacgagagtagtatcaaaagatgttacgaacgcttgagccgaaggattcattgtacagatgacagacactttggagtctccagacaaggatggctgaagcatcctggtcagcttactattcctgtatgatacatgggaacttcaaatgcgcaagattcagaagggaccccaattcattcccgtcagatgatgctcgtaaaaacctggttatgtacagaaatcggggatatgcatacctttctttcttggtctcgtttttagcaatcgtagcaataacttgcttgagggctagcaaagacgtgttgatgtatttgccctcggccgacctcagtttatcagacgtagctttctccgaaccagccaaatcgatcagtgactgcacaaatcaataatcgttagtgagaaagtcgagaggttaccaaccagtttcttcttccaaaggataaaataagagttatgtccgatgtgcttaccaaggtactcgtccgggtcgctttggctgtcttcttcccacgcgttcgatcatccacactccaagaggcaacatctcctccggaagtgactctctctcgactttcgataaccagtctatctcaacagattgatatcaggaatatgtcagaaggtctattttcggaagctcgaatgcttcggattctctatggaaaagtagtggaggtaattctgacggctgacctgaatacggaatgacttcgggaactccgcctatcatgatacacagtcgagtttcccaagtcgtaggtggtcaattccatatatcaatacgatgacaaaatgactgttttactgactcattccagtctgtctgtcccacacttctgcttgactctcctctgctcaagatctctcggacatgcagaggattagttacgacttcttctcgaacaggatgaagtgttacatcacttgaggaagaacctctgatttcaacagatgttgtttccggacacaacaaatcctctgcgaggaagatacaatcacaaccgctcatcaacgatcttttcctttactgcacagatctttttctgatggaaagcagggtgaacatactgataacctcgttgtagatctccagataacttgctcttagcaggaattctcgcttattgtttcgtttgatgtaagaaaagacatcctaaatatatcaaacgcaaagtttgcagatatacaaatgtgttatcctctgatatctgccgatacaatagacgaccacagttatgtttacttacctcgatagcgcgtgggataacaccaggttcgctcttgtttcctgtcaaggtaaatgtcttccccgatctgatgtcaagcgataagaagtgagaagatcggtattcacctcagactaaaacacagatactagtgagtgaagggaagaactaacgcggtttgaccataagcaaataccaccgcgttatacccctccatggcagctctgtaggtcaagatttagaacgataagcacgcgtgatctaagcttatatatggcaatcgagaaataaatatcttaccgaacatgatcccgggcagcacactcgtagatctctcggttgtcagatccggaaacaacgttgtctgttgagataaatttcgatggataacgttcttgtcagtccttcacgcatcaacgcaaggttgatgaccttgtcgattgaagccagagtggaagagagcacgaaccaaacacccattcttctttagctcctcgcttcgcgactccttcaagcgtcttgagcgagtttgatgaatgctcccagacagcatggtctgagttggaaagagggtttaaaggtcttactcttcatagttttgggaataaatagaagatatcatctttagcatcaggtcggcttgttttgtttgtaggaggttatctacttaccgaacggagaccttaatattttccttctctctcgcacttccattctcccagaagagatcatcctgccaattttcccactcagccctcccttccagctcatcggacatatcttcaccaatcatctcactagataggaatccttcctccgcgacgttcgctcttacgtatgaaccaagtttggcgggcgtgacgatgtgtggagtgccgatcatgaatttctttttgggccggtatgcatcctccgagacctttgctttgaccttggggaagcctgagctggtttgttggtggggttcggtcacatcagacgcactttccgaagagatgctgatggttggaagggcagatgtgagcggaggcgcgtaagaagaagatcgactgcctgatctgggaagagcagaaggggtggacaccggtctaattcgagaagcagaagaagactgatttgccccgaaacgagtggatgtaaggggaaggcttgatgtgttgtgaatgtccgagtcgaatttaccggagcgctgactgtttgatgaaggtacgacccttctaattgtgcttccaccattgagctcagccaagacgtccacaccagcatctcctgtttggcgcattctagatgtcgaacgaacactttgagcacctggttgagcttgagaatgttgaagttgagttagtttcgtcgatggttgaggaacaaatcctcctttgactgccgaagtattttttctaggggtatgatggtcgagaggttgagatagagagtgggaagcgttgctagaggatgaggaagacgacgaatgtcgagccgtatcgtatgcagacatggcaagttattcgggcgagccagataggaaagttttcgattacagaacagagatgaagttgactctacaaatgaaagattaaaggtgaaggtgaactccaaacgggatgtagaaagtcaattatcatgagaaatcagtcgcgtcaagtcgcgttgagagtgtgaaattgggcgatacaatggttacgatcacgtgtgtattacgtattgaccactatctgttgaggtggctctcttgtagcaacagccatatgactatagcccgtcatcatgaacataacaagagtgctcgactcgctaaaaccacttggaaagcctatctcgagtctgttatttcatccctcgtcggaagattacatcgttgttgcttctggtgtgttaacttatcgtcgctatgccttgaaaagataggtcgttgatcttccgcggttaggaacacttgtgtattgacttgctcgccttgttatcgctcgtctttagaggactcctctcttaggttattggaccttaagacacagagaccgctatgcgctgtcgtagggtttccttttgagatctctggcatggtatttgaaaaggattcaccagagaagttcaacgagaaggattggggaaacgtctgggttgcatgtggttcagatgcaagtactcctcagaatttttaatttctcgcttgtagccttgtcaagttctctaaaagatgaaaacctcattgatctgtcgaaacaataggtccacttattaaagttatcggcggctccaaaatttctcagaagatttgaaccggcgtccgttctgcggtccttgccaaatctttccaaagacgaaatcaatagtctatgcctgaccgaagaagcgaatgcgctaggttggtgtggagatgacggaaaacttggaataagttagtataacccacctgagtgcactcaatattgtttgcatctctgacaaatcatcctgttcaactctcgatattcaagttgatctcgagacgttcaacaagaaatatatgaagggcaaacactccaatgtatgtatcttcgttctctcgactgtgtctcatgctgaacttctatttttacatatgatacgatccctcctggtttatctgatgactgtgtaatcagatagcgggtgcggtgtctttcgtgcctggtagacctaccacgcttctctcgataggctatgactctaccgctcgaagctgggatacctcctcttctgtcatgctggattttctctctctcagtgagttcctgaacttgggctttgttcttcctctttatctcgggccgacatctgtcagttcgtttctttttcagtatggttgattaagccttcggattctatctgaaccacagatccgcctcctggttcgcaatcaaacaatttggctccgtccttccccctgtgccttagtacctacttgcttccaccagcgagctctgtggaagccgaatcggaacaagatggagaagaaccgttgattgcgataggtactgcagatggatctatctggataacactcccgtcgcgcctgatagcttctgaccgttcgaccgagacggcagagaacgatacgggattcagcaaaaaagatttgaagaaaaagaagaacaagaagagtggaaaaaatacactctggaagggtatcaaagagggatcactcgaacgggtagagattgcacttgggcctatcatcaaagtgtcagttgtctcatatgtctcactccttcccaattgcctttatctttccaattcgctcacacattcgtcgtcgaacacagagcatatattccatgtcctccatccgagcataagttcagcgaaggtctaccgtatcttgttacgctttcccatcttggagtccttaccattcatcgatttggtcgttccaacaagtacagaatggacgtctcaaccgttctcacgtggaatacggatagcatagtaaagtgtaatacccttgctgtgtcggctggttgtccaagagagaacccaggttctaaagtcaggatcgctgttggtggagttgggagcaaaggggaaggatttatggaatgctgggacgttgagttcgattaatgaaccctgacttctgcgctcatccctatcacgggtacacctcttattaccccctgtagcctgcacagcttggggttcttacaaaacttagctcatgactttgatggtcttgagtctgaggacacccagatctagaagggccgcgtatggaccaccatcgtttgagattactctcaccaagtctaaagcctgcaattatataggaacgagtgattcgtgaaaaatcatgagattgagatattaagatagcgatagaagagaagaagcccagagattatcacaaggaaagtaacacagctatgggcgcatcgccgacggcgtttcgggagaagtagatactgatggaagcgccagtcatcgtgtgtgagaagaaacatgaaggtgaaccgtatatgtcggtaaagaaagaagagaaggaacagatggaataggtatacctcagctgattatcgctggggaaattgatactagaacctcttgttcaatactgaacagctcagaatcattcaagagatacatcgtcagtaagagatacaacattgaagattctcgaagaagagagggatgactgacaggagaattgacgatcccggacctcgacttaagtttgcttatcggcgtactgagactctgtctcgtgggcttggcaagctgcttcttgctgaccatgaaactgtaggcatagggaagtatttcggcggctatgagaaaaacgattcttgaagattaccttaagacgaacttaggttgaattgcttacacatcatctggtaaagcaacaacaatgttcttatcggctccgtgtcggaagttatcggcgacaacggtatcctggtatcgcttgatttgataatcatccattctgccctgtttgacccgcctgaagttccctgtatagttggaaagccgagcggaaggtttgtcagacggagagagaaagtatcagttcaacgaaaagcgttcgggttgaatcagacaagatacattcaagtcaaaaaaagtcgtacaggtgatgacatattctccagacgaagtcacgatactcctttcatcttcacccagcccggtgttgaacctggcaggagtgaagctaaccttgttacccatgtaggccacgtgttcaggtttgagctgcagtcgacggggaattggcttcgagtcggctgggaaggatttatcgaatccagaggcacccttatttctgtaatcgagatgaacaggagagcagagaaaatcatcgattaacgaaatatccttgaacacattcagacgataaacaaagaaatcgcttactttccatcgccgatcagggtatcaatcaagagaaggtaggttttacaagtggcgatgagccatcggccgtccgcggttacatcaataccaaggatagcatctccaagagcgggaagagcggtctgtcattcacaacagaaccagaagcgaaggagaggttcagcgatgaatctcgtttcagaaaacaggacaagaaagacgagtaaaccgtttaccttagcattctttccaagctggtcgaacaaccggatgtctcctttgttcgacgcaacagcgatctttcctgattcggtcgtcgtggcagcgctgaagtcattcttagttgcatactgtttgaattgggagtcgaccattttgttcccagctagtcgaggatcaatcctgaagatcccgttatgagctgttcgtggatggattgcaatcacacaagttatgtgcctcgttctttgagcatatgtgcatacaggatgtatatcaaagaagagaaaggaaaagctcacaatgtccaatcaaagtctgctgcccagtggtctgagcatacttgctgtctggaatgaaattatccacctgaacatagtcggacactttccactcgtccactactttaccggtttcaagatccatccggaacaaggagttcggatcctctagatttttcagaatcatcgatcgatcttgatcatgaagcatgatctattggcacaaagaagaagaaaaagggacaaagaagaaccatactgttaaacacagatgatccacgcgtgaagaacacacaaagcaagcgggacagcttactttggaaggagcaaacctcttgcccttggtggtcgagaccttggatatcgtggtgttgtacttgagcttatcgtcgtcagtatggcggaagacaccaatattgtctcctcgaacaataaatgatctgtcgtgattgaacccaacagcaagcagcttattctttcctttaaatcctcctgtttcggtcgagggtttgtgttcgtcttcggactcggactcggaatctgagttgtacaatggagcgcgtgctgataggagttgcaaacgttaaagagaaatcagaaaaactaattgaccaagaaaagatgcaacgaaagcggatacaaagacaaaaacacgaaccctcttcttcactttcctcttcttcctcttcctccagctcttgggaggctcgctcggtttcttgactctcctcatcctcctcttctactccctccataggcacatcctcaaatgccgagtacacatactttttctcatccgcctgggttagatgaaaatattttttttgttaagatcagatcaaacagttaccgtcatctcgagcagattatgggaagaagagtacgagagacatgccgaaccttggccttgccccacgacattccgttcgacttttcccagaggcatcggttgaagttatgattgaactctaggtatgcacccggtgtgttgaaccgtagggaccatgtcgttggatgagtgttctcatcagatggaactaatgacgatacggatagaaatgagagagataggaaagaagtgtaaggaattctatctttcgtgaacggtttgtgaagatgagaagggcgcactaaagttccaaatgaaagcaagattcgactgtgggaccgaaaatcgacaaaaacatccataacaatcaacattatcaacaggttttctgagacacaaaaacgtgggtctatcctgagggtctggacatacctgagaccatcgagtgttcatgtcagaattgattggttgactgatgatgtactgatccttttccaaaagataacacgccatccagtctgataggacgcacgagaggcgagcacaaagtcaatcaataagatcattatttgcctcttctaggaaaaaacagtacacacgctactttgaggaaaacaaagtacttacaatcaaaggcgctatctcccttctcgacaacaagcaccctgactactccctgtacgacgaagcactcggtctcctcgtcaaacaaatagatttctgccggtccactctcgacgtccatctcctcgctcgagaagatgacgggtagctcggcagtctcctcatcatcgacttctttactggtcgtcacaacagacatctggggggcaagaatctcgctatcaatctcggtttcctcgtcgtacgactcttgcacctcgggagcaagtccaacaggagcggctgctgctgccggagcaggcacagatgaggctttgacatgagtagtagtaggaggctcagaggatgtagtggtagctggatgtgcaacggagagtgctttgagcgtatttgccagctcatcttcgacctcggtcgaggtagtaggaagcttggtagacgtggggggtgggagccgagccggggtggaagggtaaatggaagacgcagcgggagagttaagttgagatcgcgaaggtctggatgcgtgtatatgttcatcattcggtcaacaaacaggtcggatagggtcgctcgagtgcgaagatatgagatgacacgacgactaacctatatcgaagagcatccaagtcattaggagtcgccaaatcgtggctttgttggaatttctacagaaaatacgtggatgattggatcaagctgaattaatcttccggggtgcaagaaccgacaacgattattgcaacaaagacagaacaacacgcaccctctcaaacatgcattgtaacagagtaacttcgaacacatcgattattctcttggacaccacatcagaatcaatgatgaattcgaagagctctccggccccttcggcttcatcatcgtcgtcttcagaatctgtaaagtccgaagagtgggaccttggggaggaaagcgagtcggactctggaagagatcgccagacgaatgagggttggccttcaaacgaggactgtctgatctgaagggaggggtccagcaggaaggatcgttcgtcttcggctgattagagagaagcataggaacggatggatagttataagaacgagagcacacgacccggtccacgtcatcaatgacgatattcgagggataaaagataacagcaagacgtactctcggcatcaccgtctaagagctcagcctctccttcttcatacgctctagtaatcacgagctgaaattgccactcgagagtggttctcctgacggtggcgacggcatccttgaagctgaaagaagagagatcaggcaagtagataaataagtaatccaaatcttatgtatagatagcggagtgaaagaagcccaacgaacatgcactctctggatcccttgatagaatccggccgaacgagaaaaagctgtccagctttgagttgaacaatttccggattttggggatcgcctggaaagatatatgcggatgaaaaacgatttagtccaaccgtatcagaaacagtgctatcttgaccctcggcgattgcttctgtgttgtgaatgaaagaccagaaagacattcatagaagagaagcagagaaagaacgtaccccacatcttcccgaggactgaaccaggacatagcaagaagagaccaaagggcggaaagagaagatgaaagcgtaatcagtctcaaagatagaggtccatgcggttttgtgcagttaggggtttcgtcctgtcaagaggaacggctatcaaggcgatcggatgggctggacgtacgggatttgatctgattgaaagaaaagattcaagaccagagatatgagtaagtcagcttggagggtaccaatattataacgagaaagcaatgtgagcattcaccataaacatgtcttctaattctaatggtcaaggatagtcactgttgggtggaggtgatggtggatgttgcgggttgaccggttgtttcacttttcgtctttctactagagaattgttccaaaactgtcttcgatagcagcacccggccggtccagcccattcgactctgtctttctgcttggctgatctaccaaacgtgcaaacataaatattcttgatggatatatgtacattaagatatgatctagtatggatccagctcaacagaacacatcgatcgaggttataaactagagcatggtgataatggatggacaacatcctgtttagttactaacccacaagcggctttgcctgctaagcgaaaaaaagtcatcgaaacttcgctcaattctctccagcccattctattattcctctatccggccgatcgtccttctcagtcagcatccttcttttcaacagaccactaaggatagagctgttgtggaacgttggatctattgatagttctaatcttggttctagttctggtcgtaagttggcctacctctgacgacttcttctatcctctttctgccgttcacctgtatacacacacacacacacacacgctcnnnnnnnnnnatcatttggttctctggttctgtctagccaacattgtgttcttcttcttgcatggtccttcgataaacgatcagtccttcacgtctaagtgcttatattcttgctacttgcggtgtaggtccctgcttgtttcacaccaacgctcggttgaaaaagagtatttatccatatcccgatcccaggctcaattcactgctttatacagaactcgatagaatgtccaaaccgaattgtctccttcaaacgttcccaaggcagatatcttctgcctcgatctcctcatacactccggtccttctgtttctctaccctccgtcggcccaattgagctttcggaaacattcaatccgtcgagtgtctcattcactctaccgtccgactcaatcgcgttccaagtcagggagagatcaatcgagccctctaactcagtcatcaacagacgatctatcatcatcttcttcttcatcgtcaatacaatcaccctcctctagtggaactactgattctacaaaccagtctacacctgtttactcaagttcaaccaggcgaatactcgccttgcttcaatctggggatatcgatctagcagaagcaatcttcaagcttgagaccgccgctcggaacaaaatccaaacagaactttcacccgagaaggaagatgaggagctcaaactcctcggtgaatctctcgtgttttccattctcaaccgtcgaaccttccagactccctcggcctcaacgttttctttcccctccgtcgacgatcgagatgctactctcttctacgcctctcctctcaccaggcgagtcatccacctcctacatttctttagaattcatagagttccccggacagaacacatgtacaaactcttacttggtcagctactagatgatggtgacatcgacatcgcggcgcgagtctatactgagcttgtcgaagaatgggcgtgggaagctcggctgggtcgaactcagcctggatcagaccaaactctagctacgaacgagctgactgcagaggtcaactggcttcgccgaccttcgacggcgccgtccagcccttcatctgactcgagcatggctggaccaaagctttcgggaggcatagattcggatcaggcaaggcggcagaaggaagagattgaggaaaaagacttgcttggcttttggggacttggtttacggtggaatcatcgggcggaagcacagaggcgtgccatgtgctgggctcccgaacccactcgagtcaatctttatcttcaacggtttccttctcccccacccagtcagaccgctcctggtgtggaaccccttcttccagagctcacccctttcccatctcaagaactccttgacttgatcctcgccaagctgtccttctcagaagtcgctcacccagaggtattccagaagtcagccgcagcgctagccatcctgagtaacactgtgttggctcggactctccctctgtttcgtattacttcactcatcaaggcgctctcatcccttcctaaacacccgaccgtctacccaccaatcccctctccagacaaggttgacaacacttcggcttacgctcacgtccaaggcgcgctttcttcgctcatttggggcctccccggaggaagcatggacgtcaatgctaccaggtacggcctccactttgtgtctgagacctcggcacgtactctgctctggttctccctcagcgacttaaaatcgcccctcggcggacagcgcgtgctgagatatatgcagggccagggctgggccgacaagagtgagactggacttgttctaatggaaggaggcttggccaccaaagtgtggaacctctttctcgatggactcaagggcgctgtcgggtcattgacggctggtatactagaattgtttcacaccaaaccggatatggagaggccggagatccaacatctagtgggttctagtcagtttggtcttccggttcgaagaataggagaactgccaaaatggaagtttgatgtcgaaccgagcgatggtcagtttcgaattttatctcctgatagtatggccaagagtgcattggctcattccgcttcaaaatttcgacctccttcttttcgtgatagaacacccatcggccttgatacactcgcgaccatttcaagtacaagaatatgacgaggaaaccaacgcatatatatcttccgtcccgaccaagccgttcgagctgttggaccctcatctcgttcaacactttgacaccttgatctcatcctcagcctacacagccgatcatctctccagacttacagttatcctcatccggtacggagtgtccaccagacgatttgatattgttactcagatcacaaattacttgctccgacagtcctggcgaccaattcagatgaacagatatatctatcacgcccttttcaacgcactggtcagcggcggactttttcgaacggccgaacagatcttctgtctcgctagagaggaagcctcttcacatggaaccaagttgtcatttggtttccatagagatctactcgagctgtatgctgccgagcgcaaattgttctttggcggaaaagcttatcccggagaaactgtcagagggaaccgggcgttaacatcaggctgggctctttatcgagggatcatgcgaggggattgggcagactgggaggaggtgcagactcgaatactgagcaacactcgattcaagagaatcgcttccgttcccagttccaaccggtcatccaaggttttaagccagacatctctgattgatcaagcttcccgatcaacggagaggtcgatcgtatctgacgatcccatctatttcttaggaacaaacagcccagagatcgttcggccgctccgactgcaaaactttttcaacgcggcgctttcgcttttctatgtgtgtcggtcggaagatacagttccagacaaatttttactcaatccaaagacgttcgaatctctacttcacgaacgccagcaagtcgctcagtcgttcgactcagcggacgaacccgattacgcggtggaagacgagatgcttactatggttgctcaggatgttgtgcgagcccgattaccgcttcctcccgggatcgaataccacctatctcgatacccctcgttcctggagaagctagcaaccctcagagagaccgttgtctcttctccgtccttcccagcccaaacggatgagttgaacgttcatcataaatacaacccttataggcttgttcccgctcgatcgtacttcaagggctcacttcaggtgtatgaacaagaggcgatggacaaccttgcgtcctctcccgaattcttcagcccgaccgatccgtctggcgagccgtatgcgattcatccgtcagactggcctttactcgtttgggctgcactaaaaggtcgaactgaggctgaatacggaaacctgccgcccggtctatgggcagaagctcaactattttctcagtcgttcgaggtttccaaatccgaccgataccttcttctcgtcggtcgggtgggtaagccagttccgttcattcctaagaggcatcgggaggaattcttacagggacattggccgagtcttcgaaaaacctactcggttgcagctgcgttggagcgattaggggaccttgggtggtggcctggttgtcagaaggattttatcgggttgaaatggaaggaatccggtaggggtcgatccgttcagaaacggacagagctcaaacaggcggtcgaggcgatcgagttgggatcgttggattcattgaaggaaatcgcgcaaaatctgaaagtatcgatagattagaaacaaggttagatccaaaagaggttgcttgatgtctcccccctttcctcggtcaggattcaactggcgtaatcttattcggatgtaaacatgattaatgcacatatttctttacagacaaacatcattcagtcatgttcagatgttattcttgtttcttctcatatctttctgtccactcatcaagagaatcgtcgcaaatcaaagacatatatgatacgccaaaggggagatcactccgacgccaattttgaagccagcctttggtgctcgttccaatcggctagggcctcgtcaatcttttcaacaacctgctcggccgtatggtctttgccgaaagcatcgacaaatgcgccgtccggatccatcagatagaagtaaatactgttcggacataaaagtaaaagcaggtcgatttgtcagaaaggaggaactcaagaaagaacagagaaagcattggagggagttcttcacctgtggtcaacgaggtaatcatcgtccggtccagctgtgggaggagtcgagaagtaaactcggaaggctttgcacatggccttgacggcgtcgaaaggtccagtgagaccaaccgttcggggatggaagtcttttatatagcatcccggtcataaatcagcgccagacatagggaaaccccaaccatatatgacaaactgagaaggcaaaaggaggcttaaggggacttaccagcaacatatgctttcacggtcggcacatcatctcgggcaggatcgcaagagatgaatacaggtcgcgaaatctttccgtgctttttgtctgaaagagatgaaggcgaggtaaggataaaggtcattgtcagatcaataagaagtggtacccttcagtttcctttctagagaaaccccacagccaacagaagagcaaagagacgcaccgacaatatccaccacttcactcatcttatcaagctcctccggacagatatcaggacagttggtgaacccaaagtacatcaaactccattgtccgagcaagtttttctcggtaaaaacattgccattatgatcgagcaatgagaatggtcctccgatcaggggttttccggtcttgaccgacttggcatgctgttggcctttgatatggaaagagagagataacccgagaggcgttgatttgttagcttcgatctctatgttaaatggacgaaactatatcactgcgggaaacatacgcttgagttcttgaatacgttccttctctccagtaaagtatacgtacaacccaactccagccgccacgaagagacctgctgccttccagttgaaaacctagatgtatcattccatccaaatcagaagcaaacgtaacgattctataagtttcgttgtcacgcgagataaaaacacaaccatttacgaagataatgtaggcagaaggagagaaagaagaaaatgacaggaggtaggaaaaaatccctccgatgaagaggaaacgaagaaactcaaacatcgactgaccccaatgagttcagaggaactagccggtcgtccagcatacggcttctccagaggagccttgaagttcgattcttctccattctgaggtgatacatgcgctgaggtcttcggaggaggggtcgacccggaaggggaagcagaacctggagaaacataagaccttcggaccaagggttgaagaggagaaaggcaaggtcggaaggatccggcggccgttcggtgagtggcccgaacggtgagctgtgataatcgagatgcagatggggtgaacatgaatatagtggaggaagagaagagaggatgggtgtggtggtacgaagaaatagtcaagatcggttgagtgtagttcaagaagccggcgggaaatatcgacaacggtcgtccgcggtcatccggtttatatcggccgcgatagcttctcaacacaacatctttgatcgcattgccttttcatcattaaagtcttcacaaagatgtttgatacatgtgatgatatataaggaatggtacaaagaccagcatacagaaaagaaacagcatacgttgcaactcatggcttatgagttgtgaagaaagacatcagagcaaatcgaaaaaagaaacagacaaagcgaaaagaaagacaaaaaagattcttggagaaatttggtagaaaggagcaaaggcaaagcatttctttcatctcggatgagcatagaccaagggcattttactcatccgccgctgtcttggcctttttctgctcgccatcttcagcaacgtcatcggtagcagcagcagcagcaggggaagccttacgcttgtccccagtctgcgcttcatcatccttgtggacttcattctagatttcccgatgagttgaccacgacgagaaagatacaagaaagaagaatgtatcattaacagtgttgtatgcagggttatgaatatcttaccgcaaatagaagatagacgaaccttcttcttcacttcgtcttcctttttggccgtatttctggtagactttcgagttccctctgcaggaggcgctgtcttcttttcagacttaggagtttttggctttgtcggcgaggatttgtcggacttgctctggggcttattcgcaggtcgaccccgcttagcctatttagcagatggcagagcagaacgaacgtgacaacatgaatgattggctggagattgtgttgaatgagtgtatagtggcaagactcacaggactctttttctctccctcctctgacttggattcttcgtcatctttccccttcttgtcttccttttgttctttctcatcgcccttcttctcttccttgttctccccatcaatcttcttgtctgcctctcctgatgcaggctccacgttatttaactcgtgagctaatttaaggactttgttgtcgccctaatgatacagttgatggacatcagcttcaggtaagacgaacacatgtatcagcaaaaacgactacgcaccttctccggttggctaatctcgacagccggatcttctttatctgtatgacgataaaaacccaatcagcatccagccaaacgggtaagtatataaatccgtgacgcggtcgctcgcgacattggctcagatctccatctacctccgtctcgattcttctaagtgtttacataaaacgtgaacagagcgaacaaacctccgtgtcgactaacggtatttccgttttttgtctcgatctcggcgtctccttcgacgactttgtcgactttcccttttggattagatgatccatatttccaactatatgattagagtcgagaaagaaagatccaaaagcacgttaaaccaagttctctatattgaaagaatccattctggtgagttgaaccagaggaaaccgaacgcacctgacgtcatctcctttttcaagctcggctggtccaggcatatggtctaattcgttctgagggacggatggatggatatatatatcaagggaacagagaacccctcggagggaggctagatggatgaagatagagattgtgatagctctaagtttgggtatggaatcaactggagatggaagttgatctggcccgatgacgcagtttgtaactatccgctgtgtagccatccgcctgatcgactcgtgaccttgcgagcaagtaagcacaagagagacttaacaacgtaaaaaagccttcaaccttgatcctggaatcagcgaggggctgcctttaaccacgtttagtccgagatatggcctcagaggtatgttttgctttggtggaggctggcacttctcatcactataatagtcaaatgatagattgtttcgcggatcgctttggaaggatatactacaggaagcagtgcagatagcgcagattgcttctgtcaacacgaacctattcatgaacaggggacttgatgaacgtttcttatcgatcgtcagatacgacgcatcgggatatcataaacagattctgtcacagtcatagtatgtcagcgagtggtcgaggcatcaaggatttttccaaacattctccctttttttttctttcttttttctttcttttttctttcacaagacgaacagcgcatagagaatagcagtgtcttgagaagatatctctcagttggccagagagagcgacttggaaacaacacatctcatgtgaagaggtcatgtaaagacatgacgctcgtacatacattcagattccgacaccaaatgattaaaagcaatccatgttgtggacatggattgtgaactagtccataaaacaaatagaccggatgactgatgcagactgacatgggcagaatagatattctggagagcttctccttgatctttccggcaagccaaagtcaatgacgatgcttgaaacgtttgctagttgatctgtaaacccgggtgcagacccacaactagagcgtgcacattcacatgggtatctatcgttcaaattctcatctgaaggaataccagctgaagttgcttcatgcttattgatttccgcccctagtctctgttctgtgctctctaccctctgctctctgcatgagaaaacgtttgttggctctgactgcacaggaaacaatctagggagttgactcaaacggtccctcaaactggaccgttcaatctccttgttaaagcttcgcaccagagttgaaggtaagtttgatcgcttgttccacatgcgcagctcagtctcgacgcgtacacgcgcagcatcagcgcgtacagaatacactgacacctctcggctctgggcgcgtgtttttactgatgtctcagttttcagccttttggtcattttgcttcttcttcctgtcgtttttctcgcttttcctcctttgattgtaatctattgtggctggatagattgttcttctctcgttagcttggattctagaagagccatcacccaatattcagaggcgaatttgttttaattaacaaagttttctacttttttactctcttcaacagaccatcctgctcttgattttgttctatcctcctcctcattctttcatactctagccatgttcagctcgccattcactccgacaggcagtgtcagccggagtcacagaacgtacaaacggaaaggatctgaacctctgatctcgcctctgcaatctcctctgcatccgagtttcggtcaatcatcgcagatgggaagaagggctagtaacccagtggtctacgtacaacgaaactcgcgttgggccgtctgcggtcttgtctccctccttgtctttggtcttttcatagtctcgtccagaacgcaagcaactccctggctctcgatatacaacaggaccgatgcccttgatgatagagctgatggtatgcctgccaatcactcttcctctgcactccatctgccaagtgaaccggctagctaacctgactctctttctcttcttccaagtctatcaaactattcatacaaaaatgcagagttctgatctcgcagcgatcaacaacgttccgccattaacgccgtcccaagagctctttgcccttgtgctacatctaacatcatccgacatgaacggtcttccgcctctcgatccgagtttacctcttaacccagacttcgtgcttgataccgctttgcctacagagcatgatgaccggcaggccgctctgagacggttggagaaagaatgttgggatgcatggccggtcgtcgtgcttggccggcagaacgacgtatttactgaggaggccgttagcctgcttcagcgagaagactatcttggaacgaacggacgggatctaggaatcgtctatctcgatggccgacgtacgtctctctttcttccccaaagtttcagttctctcgatcaatttatactaaaaatggatattcaactgtctatttcattctctcgtatgctcgccttccttccaacgcagccgacactgtcatcctgacatctctcctcaaccggctaacacgtcaaccgacactgcctaccatcctcatcggcggccatcctatcggaacattcggcgagctcaagtttctccacgatcagggtcggctggctattgttctgtcccatgcggggatacccattggggacgatcttcgatcaagaaaagcacgagaaagaagcgcagccattgtcgaaaagaacaacgctcgtcagtagaaccgatgacatcggttctgtcttgcttggctgtcgttccattcattttagacgtcgttcctctttcgttgcatccgcttatgtttccctcagcttccctcacatacacacattctctcttcttcgcatacacatatacttactcatacacacacatgtaccatcgagataactacctcatattctacctgcatcagaataatccggtctcgtttggccaactccttcatcctctgtccagttctacattgacggcagccattcttcgatttttcatttctttctttccacatgccttgcctaagataacgacgcttaacatatgtctagatttggactctttcactcagttgtcttgctttgcacatgccctttcatcttatgacagagatcccgacagagatctctgattttacaatcctaaccatgctctttgacattttggtgctattattcgcctgtctcttctgctgcatacctcgctcacaaacactctcttttcttcttgagcttcttcgatcggccactaacagaccctatcttgaccaacgatatgaatcatccgcgcgtacgttcctgagaacgttcctacgctctgtaccaggaacaggaactggcgaaagatcgattggggagaccgttcagtcaaccgaattgtgttgttgttgtgttgttttgggtgttctttgcgcgttctcgatcttcacagctagcctggcgctcgcttctctctctcttttcgtcccttaccaaatcctcaaaaggcatcaacgctgttcgaaatgttggctaccgaacatcgaccatcgcttcttccctcacttgatcttcattttctcttctttctttcgttcgtctctctttcttccttcgttactgctgcgatacccctcctttaattcttcagtgagtgatctccttcgttcattggtctacttgtccttgttcagtgatatgtcagatcggtcgatggctcacgccccgtacttcctctcattcgttccttcaagtcaacccttcctgatatagataccaacaggcacgatcccttccaattcaccctcaatcgttctaccttcaccaacctctactctttcaaagcattacctgtccttagtcacccatgacttccgtcatcatcactccagttactcctgtgaagcaaaagatgggccgcccagggacagccgccctcgctatcgacctgactgatatcccttcgccttctcctccccggagacaggcagtcaacggaccagcttccgcccggcccacatcatctctaggaagacgacctcctgcgactcggtttgagaaagaaatggcgagagatggaggactcgatccggagggtgacaagaaccccaaggtatgggtttatgatgataacatcagtcgataaagtctgaaagtcactgacggatacatgcgtatgtgtgttgatttcgttgcagttcatggggccatggcgctttggaaagatcattggtagaggcgctgcaggtctgtcgttctttcagtagtgaatgttgtgttcctaagagaacacgttgctgattgtttatgtctatacgatcaatctaacaggccgggtccggtttgcccggcatgcgcagactcaacgtcctgccgccatcaagattcttcccaagcagcttctccgagatgcctcggtctcgaggatgtccgctatggataggaccgatgagaagttgaagaagtacatccagggaatcgagcgcgagatcaccatcctgaaacttgtcgaccacccaaacatcatgcggctgttggatgtctttgaggacgacaaatacctgtatgatccatctatcaatcacccttactctcaggcccctagagtgaactctgatcgtgttgtctgtcatcttggttagatatctcgtcttggagtttgttcaaggtggagagctgttcgattacctcgtccagcgaagatatcttcaacctccagaggctttgcgatacttccaacagatcatccggggtgttgactattgtcatcactttaacatctgtcaccgagatctcaagtcagtctcttgttttcagcctaatggcatctgcccttagttcgagtcattgattcctttcctatgcacacatgtgacaggccagaaaatcttctgctcgatcagaacatgaacatcaagattgctgactttggcatggcagtccttcagccagttggagaatggctcgacacctcgtgcggatcgccccactatgccagtcccgagattgtagctgtaagtctattctcctatatcacttctttcctcacaccagctcggtctgggagataatggttggtttacgtcgtgttgttcctgctttgctatataaatactcagggaaagaaataccatggaggagctagcgacatctggtcttgtggagtcattctctttgctttgttgacaggacgactccccttcgacgatgccaacattgggattctccttcaaaaagtcaaggccggacgattcgaaattccctcgggagtacctcgatcagcgagggatctgatcgagaagatgctagtagtcgatcccaaaaagagaatcaaggtttgtacctctccatcaacagtcttgttctttatatccgccaagttgtattccaaattaacgacatgtatctttgatggcggcttcagatgtctgagatctttgcccaccccttcttcaactctaaggtggattactctattggaaaacggatccggattgttgagccgccttcgtttgatgagatctctaagcctgtctcatccaagcaggatatcgatcctgaaatcctcaaaaacctcaaagttctatggcacagtggacacgatgacttcttgaccaatgcactattgtctgacgagtaagtgaacagaaacatgggtgtatacaggttggtccaaccttattgattaaatctgggatctgggttttgatcataggaaaaacattgagaaggtctgtcgatttcctgtacgtttaggatgatgttttgatatcaagatctgacagttcttctgtcgcttcgtcccaatgaaggctttctacacgttactcgtccgatacaagaacaagcggctggagaatctagggtcaagtgatggcgaagacgatcttgaggaaccagtgcaggtcgttaggaacagatctacctcaagtgagtgtctggctctatcatggcatataaccaaatatacttatctcctttgttgatccattatcaaggcaggaagaaggagcggtcttctcgagaccgcaaagcctcaggccaaagacctgttcttgggtcctctaacgccgccaatgtgcctatcgttactgcgaaggattcaacatcacctaaaaatgtcaaatctatagctgctgaggcctttgctgaacctgctaagcctcacgttcgcgatagaagcttgacggtctctgtcgctccttcagctcctccggtgccttccaagtcagcttgtgatgatcgcatcgacttgagaatagaagagctggattctactgagagccacgactccacgtttgactacgacgcttcgactccgatactcactgcgaaacctcccacagatcagaaacgagcccgaactattattcctggtcctcgtcctctgtcggttgccagtcctagcatagagaagaatccgttcaaactgaacagcgtgtttaatgataactccgagtcggattgcgctaccagtgagtcggctgttggctcaacggtggacgtcgatcaaactatgagcaagatggcgcatgttatgcatggacttggactcggactacccaacggtactggactcgccacaccttccgtggaagtacctcctgacacgccagcatcgttcgatggctcggactcaggtcagatgcttcctccccatctagttcaatggatgcagaccgtcaatcgcagactcggtctcatccagtggacgccggattccaacgagaattctccaaacatcccgactgtcgaaatgcttgcctctgccacggatgcttcgcctcttctggaagctactcctcgtcctgccatcatgtctcgtcctaagtcagactatggctatcacagatctccttctgtcaagaagcaggtcagaatctcggtctcgggagatcactctcctactaagcccaactgtatgtctgcgctatgcacgtcctttgcctggcttgaacttatcagatcgattgactaattcgatgacttatgcccgtgtcagtctcgccgggcagcaagaattcggctggtcttctctctcctgcgtctacgttttcgaaagagccgtctccattgatcatccccactgcatctcgtcgtcagcaagggtggttttcgaacttgtttcactggaagggagccgtgagtaactcttgcctctgtctcttcttggcttcatttgtattctcaactagcgttgttgaccgtcttctttgtgattcaatcgacatcttttttgaaatagactgcgatgcttatttgtccccaggatgagatgtccacccgagcggattgtgacaaagcttttaaggctatgggcgtatctgtagctacccaggctatagatgggctttatgttctcagagtatttgtcaacgagatcgagggtatgtaccaaggtggttctttttctacagacacatgcttatcatgctttgttcgcacgatcctacaacagatatcgatggccagctccttcgcaagcccgtcaagctccgagtcgaatttagaccgcatgctttattccaatcgcccaacccggaatctgccggtacacttacctcaataacgcttgtgcaagaaaagggagctctttcgtcttttgaggtggtctgtggtcgccttcggaatgagtggccgtatgtgtctctcattttgtggctgcatatctgcctgcatataactaacctatttatctacacccatgtgctcgtccatatagcggccctggaattcgcactccgggtaatctggctccctcgaagtttcctagtcctcaggcttcgcccgcacctgagttcactgggcttgtggcctccccattctttgtctaaacgtcttgttatggttctctgtgtcttttgtttgtcgttctgtcctcgtgtgtgtgcatgtattctagataccagcggcctttgcggtctgcccacctgctttctcttcatgttgtttttttctcattcttggcgaattgttctgtccgcttgtatcactctcagacactccttttcgttctgaatctacgttatttcgcttagaatgtcttcctcttttgaatgttttcttatacattcggtattgtcgcatgttttttccttcctgttgattggattgatgcatggtttgtcttaggtcgattagtgccttgaacgaaggggcgtgacacaacgataaacatatataggtcacagcaagcttccatctgatcatgccagttctaggtatcaattttatatatcttgtattccggtcttgtcgtctatacacagatatcttgaggtaatgtcaacagctctttttcgccctccccaagctcgatcttgtcggcccagtagaccttgaactggtgattgagcgacttgttaccatggatgccgattggggtgctgaatccacctgaggaatttgggatgacatagataacctctcgtactctggaatgaacgagcgccatcgaacagagcacacagggttcatgggtaatgaacaaagtgagcgaagtaaggagataatccgctccatttctcgtcggtgcttcttccggtcctaaagggaggtttcgaatagaggcaatctgtgagatacaggacagagtggcgtgtcgaagtgggtgagaaagaagacgacggttgtcgagcgaggaagcttggatgaagggagtaggtggaatttcggattcgtcttgaggaaagatacttggtggaggagcggcaacatgagccgctatcggcagctacgtttgaattgagtaatgagaacgatgttggttcttctgttggacaatcaatcattccaattggttgagaacatttcgtcagaacttacctctccacgttggccagcattgattccagccttgacgactcgctcgataccagcctgaatccatgctgctttgccctttgaccagcctttctcttcttgaatagccctgaaaggtagatgaggaacgggccagagcgcagacttgatctttgtttgggacggcgttcggccgggttgcgcaggaacttgaacctcatatggtgccagggtagctagcaccaggctatagtccatgagttcagcttgaagatcagatgcgctgattatgttggtagcgcataaagctactgagctcttcatcctgtaatatacagacctccagacccagatcggtcgatgagggtgagcactaagaattagacattcgggaagaaacaaataaagacctacatacacaccggtttcactaccctggaattttcgaaccctctttaaatgctttgttgtctctcctttaggacccatctgcttagcaaactccataagaaccttcatgacagcgttcccagcgacaccctctggaagctcaaccgcccacattgaaatctcctcccaaccatggtctgctccagctaatttttgaagaacataatcatcgtttggcgttcggatcggcttgaaaggaagatcagcccaaaggatggtcttagaaagttcttttgactctaagtaatccgctggatctttcaggtaaggcacttgctcgacacatggtgtcgcctcaggaagaggctcaatgatttccatgttgatgttcttgacgaatggcatgaattatatgctgcaacgttagaaagcaaatatgaagtaaccaggacgtgaccggccaaagctgtgcatcgtgtaactacgctcggcgacctccgatgtgtattgacccggatttggtcgttcctctaaagacgaaccatcccgtcgtcctcggcctcttcctcttccttgttgtcattgtcgaagctagattcacgctgtttcttcttacacactgggtatataggtccttttgaactggttgcaccgggaagcaaacgcttacctgatatacatcgctcatgatataatggccaccgagccgccttctgtttcaacggaccccaaacaagggaagaccatcaacggttacttcaaaacatactccagactcgcgcccgccttaccttccgatcctacttgctcctacagatgcacatcaacatccaggacctctcggatacacgtctcaccaggtttggaatatatcatatctcaaggtgcatcaagtcaaactccaaacaaggctagacagagccgtgtggaaaggagggttcaacctagtccatgcaaagacgattggagtcaggaaaacaaagacaaggaaactcagagtttgagtctcaatatgcttggaaatactgagactctctgtagaagtaaagtcaaacgcgaacctccccttctgagcaggtcttctcttgagcgacctcatcagcctgcctcagcgtccctcacacagacccaaaccggccgttgctcactatccgagtcaactagcccacctcccttctaccctctcgctcgcaagatcgatacaacaagctttcgaaatttcgccctatacataccgcaaattcctccgtatcacatatcattatcgactctatcgggtgcgctccatactggtggccaggtgacctcaacaccgtcgaatgatgtcaatatatacgatacggacgtgatagtagactcgatgagtggctgtatattacacgacccttcctcaatatctttgttaacatgcgatagcgctcagacgaatggggactgcctatcatcttcgacagattcggtagcccatctggaggacctgagaggtggtactgagaagggctcgtcaaattggcatgaatcaggctcaactgtacgcaagcaaaccttgcccccggtagatacccgatcaccctctctttctaagaggagtcactatcacctaccgacttctggacgctcgaatctcaggtcaagtatatcttatggacaagaggctaccagctccacttctgcgtttcctggacgcgaacatacaccgcctattgagaaatcatcgttttctggtcactccacgccaccttctcagacttccagtttcactactgcttcggagctttctactcaagactatgcactccttctccgtcttccacgtttcaatcgagtgctgacactccaaagagctccatacgaagctcatcaagtctcgttctccgatataggcgcgacaactggtcatcctgtctttgtctttcttggcttgggaggcatacgctatctgaccgtactgtttgaagatttggccagcatgatgaacctacggttgatttgcgttgatagatggggactaggcaagacagatgaggtctcggctgagcgtagagggttcatcgagtgggcaaaggtgatcgaggaggtcactgatgagttgggcattgataaatttgggatcttagctcattcggcaggctcgccatacgcgatggctgtggcggcaacgtttccggacaggctggtaggcagtgttaatctactagcaccttgggtgggattagatatcgaaggaggtgagcggttatattcctaaccgttttcttctggcatgtcttcgatacacccttggaatcatgaacttacttgatggtttccatattgattgaaacagggtacaaatggttgaagtatgttccaactacaatcatcaaagcgacccaagctgcagagtggaagatgcaaggctggatgttagggaaagcatccaactctagccctactacttccagtccgcgctctgccacagaaagccctgtttctattcattcaaagatcatagaaggatgtgttcggaactctcaggaaagttacatatcaaccgaaagctctcggctttcccaatcacaacccattgcgtccctgagtcggtcgtcctccccatccaatgaagaacagcagccgtcatcgggagacactagccttggtacggctttgctgagagcatgtcatgctgagaatggaggacggacggaggatttgttggctattatgaggaaaccagcattgtgggggttcagttatatggatgttcagtcacaggtgaacgtctggtatggagatcgggatgatcggatcagtgagaagagtgagcgtttccctcttttctcttctttcttttggccgcgtaacctgtcctgattcgaatattgtacgtgataggtatactctggatggagagatcgcttccaaattgccaactttttctccgacctggagaaagccatgacttgctgtctagcacacatattgtgctggaggttctggaacgtttggcagaggatgccatagtcccatgaggttggtttgatcgtggactttcaggtcatgttagctgtgttctcaagagaaagattaaatacatatgtgtgtatatgtgcatctatatgaagtactgtgctgtgtgatcatccatcgcctcttgagatacggatagcgtcctcattgataaccgatagatacttggtatatctcggtcagacatactcacttccacttttgaacggcacgccgtttctgcttcttggcttctaaagtctaagcatcatctcgaaggacgattccaggtaggccaaaatctcttcgaagtctacttttgatgtattcgaagttttcctccgattcagccgtcaacagctcaaaacggatcaagaaatcgatcatgactttatgtaaattcgaaatcccaggatcatacatagtcagatgtttgaaagatctcaagaaataagcagcgatgactggatgaaagactcaccgagcgcgcagtttggcttgaactctcgtctgtgtagtaattcaataattcgcggaacggccatcaactatcaagataccggcacataaatacagaggagtacgatgagtagtcagtaagatcgatgtctgaacgatgatagtttacgagaagaaccccaacggaaagacttgcctcgaaggattctacttctccatcacaaggcgtcggtgtgaaaacgtcgggtgacggaagcttgaggtcaaagatgtattgaaattctgtgatttatgtcgtcctatgtcagttgcattcagctctttgacaacgggagaaggagagaaattgacataggttgaagataatgtattacctggttggatccatccggttccgtcgtcggtcctgatcaagtatttgacctctccttcaggctttagcctgcccttctccaggacgagtgactctggaatggatgcttcctcttgacattctttgacggcgcaaaccagaggatctaggccgtgtgtcaaccctcctgcgactgtctggtctaacatcaacggatacctatatgaagcgtaatcaaagccaagtgagaagaggacaccttataacgtgtcagcatgatgaagcgtcaggatgcgtcaaagaaggatagaaaggacaagatagaaacggacgtttgcttggtagcagctcgtcgagggatccataaagagatttgcccatcatcgcctacgacgtatccattgatatgaatcccaaatgtgacgacaccaaacagaccacaagctgctctttcgagggcctggaagtgaaagcaaaagaagggtatgttcagagcgcggtgaactgtctttatgctagccgttgattgtgtgtagcttatgaagagtggagacttacgaaagcggcgttctttccgaacgtaccgggcgtagagtcggagagttctttggtagagtcacattcttctaacgggccgtagatcgtgtatagttccttcgaaacatcaagcaaaacagaacagagacgtacacaaacatgttccaataccaggacgagatgtcagaacgcacggatgaaagaaaaaaaagaaagagacaaaacaatagatcgtagacagacatttcgccaaccatctagcggatttttaaactgcccgtccgccttccacctttcgaccaattctttcaatgccctgcttctcctttcgaaccctacgcattcacttccgaagtacacctttcccaagtcctctccatctttcgatctttcccataccagacttgtttggttggtgttgttaggcaggtactcaatcagtttgtcaaccacagatgtcaggagatgtccaataggtttagtggaagtagatgtgaggtagaacggggtttgaacaggaggtcgattggtagctggatcgaacgagataggaagatcggtgttgtcacatgtctgaacgattggaagaagggagggcatagtgtacgacgatagatggtagatggtagtgatagatggagagcggacggagggagtgtcaacgtgtcggcgctattcttcgtgtccgctgctcattgtttttccttctagacataacttggatttgctattaccttaatttttttcctcgcaggtcgtgtgctcttagcatgaagattgaagatacgtatacctcaaagagtgtttgttggaatcataaacatgcgaatcgtaaaaagatggtgatacaactaggggggatggactatagaatgcaaataaagattgaccggaaggtggagccttttttttttttttttt

SEQ ID NO: 1185 - DNA, 37995 bp, Xanthophyllomyces dendrorhous
tttttttttttttttttaacaagaaggatgagcgcaagcacaatggcgagactcttccattttgttcttcttctttttttatctactctttttgctcgaccttaccaatcagtcttcttgggcaaagccttcttgggagacgaagcgaccgggatcttttggccgatcttgacgtaaccgagtccgtccaaccaagggtagttggtcgatcgggagacctcgaacgactcaatagcagaagccttcttcaaagtcaatccaatatcgtccaaaccgtcgagcaagcatgaccgacggaagggatcaacatcgaacggcacagtctctccgttgggccttcgaatgagctgagcctggagatcgacctcgagctcctgcttagaagcggcgtcctggtagagcagctcgcaggtctcctctggaagaacaatgacgagcataccgttcttgaaacagttgttgaagaagatgtcaccggcagaaggggcgataatgcacctgattccaaaatcgttcaacgcccaaggcgcgtgctctctggaacttccacacccgaagttgggtccagtcgagaccaagatggaggagtttcggaagggatcctggttaaggacaaactcggggttctcggagccgtccgggaggtaccttctggaccagaacaaagcagaacccaacccggttcgcttcagggtcttgaggaactgcttaggaattaacagatcggtatcaacgttcggaattgagaacggagcggcgattcccttcagctgggtgaacgggggcattccagatggcgcagccgtctgggccggggtggggatcgacttgatcgacgtcacgtcctccgcggcggcctcagagagaggctggggctttggtggggcggtcacggcatcggtcaagtagtcaattccctgggtgatcttgacaccctcggttcgagggatggcagaaccagtgacctgtcggacgtccgacaagacacctgtcatggcagcggcggccaccatggcaggactcatcagatgggttcgaccaccagcaccctgtctgccttcgaagtttcggttcgaggtggatgcgcatcgctcctggggcttgagctgatcggggttcattccaaggcacatcgaacaaccagcctctcgccaatcccaaccagctgctttgaaaacgatgtcgagaccctcttcctctgcttgctgcttgatcaaaccagatccgggaacgaccatggcgtaaacgttggatgggatctttgaaccaacaggaagagagagaataaccgaggcagccgatcgaagatcctcaattcgagagtttgtgcacgatccgaggaaggctttgtcgatctttacggcgttgatcggctcgttcgcagtaaggcccatgtattggagggatcgctccataccagctcgcttgataggatccgactctttggaagggtcagggacggttccgttgatggggacaacatcctgaggagaagttccccaagtaacagttggaatgatgtcctctgctttaaggtgaacctcgatgtcgtactttgcgccctcgtccgccttgagacctttccagtactcaacggcctggttccactcggctcctgccttgggggccaagggtcgtccagtaaggtactcgaaagtaatctcatccggagcaatcataccagctcgggcaccggcctcgatcgacatgttgcaaacactcatcctggcctccatggagagagctcggatagctgaaccggagaattcgatgactgttccagttcctccagcagtaccaatgacaccgatgatgtgaaggacaacatccttggaggtcacgccggcaggaagctcaccctcgacagagacaagcatgttttgagatttcttttgaatgagggtctgggtagcgaggacgtgctcgacctccgaagttccgattccgaaagcgagagctccaaacgctccgtgagtagaggtgtgggagtctttagattgggaaaggagaaggggaagggcaaaggcaaaagtaaaagcataagctgagcactggggagaacacccaaaaaattaaatgagcagacttacctccgcaaacgacggtagtaccaggaagggtgaatccctgttccggtccaatgacgtggacaatacctgtccaatcagaagtaaagttttaaataagaaaaatattaagtacctaagccatagaaaactctttaaaaggcaagcataacgtgtagactgaaaacactaaccctgcctacgatctccaaaaccaaagtaggtcaatccaaactccttgacgttatcagatagggcctcacactgagccctagaatcttcttcgacaatttgagccgacatggacttcttggggtctcgaatcgatgtactaaagagtgaatgattatgaggatagcatctttggttgagcattgcactgctgtgtatcagaaatagacagactgccgaggcttacggaatgttgtggtccaaagtgacgagggtgcaatctggtcgtcgaaccggtcgctttgcatttcggctgatttgtgcgaaaagacaaatgaacaacgatatttgatttagttttctttggaaattagaatagacgagaagaacacgaaagaaggcaaaagaacgtacagtccttcgaaagcctgcggactggtcacctcgtgaacaagatgtctctagaaaagtgcgaagaggaggatggaagagaaaaagaagttaagttggggaagaaaaaatctcaaagaaaagtcttatggacgaacgtcaatgtagataagagtctctccgtttccctcgaaaacgacatggtcgtcccagacctaataccaaaggtaaggaatgagaacgcgtgagtacaagaattagcgattgaacgtaagaagaaagtcagagttaaaagaaaagaaacttggggaaaaaagcatagttgtggagccttgccacaaggatggggaaaagggtagggaacagaagataagcacccagagaaagaacaacgaaccttgtcatatagagtcctgggaccagacgaagtggcgataggcatgatatatttgtatgaatgtgtatgtgtatgagcgagtgtgtgctgatgaaagaagagaacctcaaacgaaggacaagatgttaatggtatggaagaacttggaggataagtgtaagaagaaatatataactgcaagattattggcccgatttcgctgcctcgtgcctgatatcttggttcctgacatactttttgtcggacatgccgaccgaagacttctgactcaattgactgactgacctctgaaatcgcatatcagctcatcggccgatagatagatgaccgcctgatgcatagagtgtgttccattagccattctacagcttcatggtgtttatgacgacctgttgagcgtccagagtctcatcatgtcgttgatgtgtatagcagaacgttcgatgcatatgagctttccaagactgtcagtatcagcctgtagtcttcttctcttacttgtagacatcgttcacttcagtgtttgatctcgttgagatttcaacgattgtatatctgtgtatatatatacatgcacacacatacacatatattctttttcatcttcatcatcgatcatggtgatgatgggaattcgtccgaagctcaaactcggaggggtctaggagaaaatgctgggttgtctttctgccgggatgcacggagtaacatcggaaccgtatctggttatgcatgaggttacactttgtgtgttagggttacactcaaccaaagccatcattcttgctcactcgctcacatttagaaagcaacaagacatctaatcgattgtcgtccatcgctttgacgactaaggatccacctactttgcaagtcatgtcacccgtagccaaacgagctcgactggaggagccagagactaatctggacaaaccacaaccgtcggaagttccatcggccactaccgtcgtcattccggtaacgaccgagacccacaaggccgatcaagaaataggcaaagtcgtcgaggagaagagccttgacgacaatatcaatggtgatattagtagcgaggacgaagcagaagaagtatatagagaagatgcgtccgatcagaaagctagaacagatttatacttagacacggtccgtgctcattcttgcaagcatgctcctttcacgtcatgctgaactcggacgtgattgatcttacccgtctcacagataaacagagagatgctcgactttgatttcgagaaactatgctcagtctcactctcaaacaacaatgtgtactgttgcctcgtcgacgggaaatatttccaaggccgagggaagaacagttgggcctacaagcatagcgtgaacgagggcaaacacgtctttctcaagctagacaccgaggaggtgagaaggttcttgtcggctctggtgttaaccttatagagaactttactctgacctctgtattctgcttcacttctagttcttcatccttccggatggctataaagtttctgatccgtcgttagaggatatcatcaaagtcctcgccccccggtacacccaccctcagatctctagactgtcctacctgccaagctcgccgtcgtacgatctatcggccaggccatacctgcccggctatatcggtctgaacaacatcaaagcgaatgattacgaaaacgtcatcatccactcactcctccatgtgcccccgcttagagacttcttccttgcgccagacaacaaactgctccagccagagtcaaagccgacagagcttgtcaaaaagtttgcagaactcgccagaaaggtttggaacccggatctgttcaaagcacaagtcagtccgcacgagttactccaggaggtctcagttgctagcgaaggaaagttcaaagtcacaaagcaaggcgacccgattgaattcctcggctggctccttaatcggcttcacaaagacctcggtggttctcgaaaaaagaactctagtaggtttttagtccttgatctgttcctttgcctcgtctggcatgttgtctcaaactgatgtgtcaaaaaatgaaatcacgaaaaaaggtataatatacaaaacgtttcagggagacctcaagatcgagacacagcagtatatggtcaaggcagattctggtggaagcaaacggccccagttcgatattggcagaggtcggtccacttcctcacactttgttttcatttttctttctaaagatggtgttgctgattggaaccaatctgtccggcatgcgcctcggataactccttctctttgtcacgtcctagaaacaaccacggctacccctccgttcctcttcctcgctttagacctccctcgaccaccattgttccaagattctgtagagaaaaacattatcccgcaagtctctttggcaagcattcttgccaaatatgatggaaacaccactcaggtatgtagttttctcattgttggttgtttgaatggaaggcgcgtcgagaaacctctgcctcttgtcttcttcggttctttggttcacccgctttgtttgcttcacataggaatttggtgatcaactcaagagacacaaattgactaggctcccgccttacttgatccttcacacaaagcggttcaccaagaacaactttgtagaggacaagaacccgacgatcgtcaacttcccgctgagaggggttgacatgcatgactgtacgtcttcttctgttctcattttttcttcttcgtctcgggagcaaatctctctaaaccctttgtcactatcacctcgtcatactatcgatgcccaagaagacgtcgagccacttccagcagctcctcattcgacggtttacgacttgttaatcaacattccgtacgagtcatcctccgcaagtaccactaccaaagtcggttccgctacggcgacgaacccgaagaagaaacaacaactggcggatggattggacaaccctaggtggaaagttcaccttagagcaggtggcggtggaggtgatggtgaaaagtggttcagtattgaaggtatcgaccccgctcttcttcttcttcatgatgaccggtacagctcaagggatctgatatatgtcttgtttcggggttgcatcacgtagatctcagggtggacgaggtccagagggagatggtcttcctaggagaaaccgttctccaggtcagtcaaatctcatatttgtcttccttcctaatctccttccttcaatcaaacctcggtcactcacgcttttgttctttggtttgagacagatctggcaacgtcgagatctaggacccaatggtgccggtctggtatgatttgacgaataattttccactgaaacatactgccttgtagaagccataaaaatgaacaaatcacgctttggatcctgacaagcgagcaaacatggaagtgtgtatgtgaatgaggagacaaacggatgccttcgacgaaaaagaacagaaagagacgcgtccaaaggatggagcaacgagacaacaggctaggcggtttgttgatctcgcgattttcccgtgccccatctgcaatttcctttccttccctgtaccctaattccgcctctttcgttcttcgttcttttctcttttcccttctttcctttgctcaaggcaaactacgacggccgatctgtttgataaggagacatacatatataggggattgtatggacagagataccgtcccacctacaccatcccttctggcatttgaacaagacgtccacgaaacttcgttggcttacgatcatccaaacatgcggtccggtggttccgaccttgacgccgaaggtgaagaagatgatgagagtgaggaagaagtcaaacatgccgatggctctgatgggctctatcagaacgacacagcagaaggagaggatgaagaagatgagggagaggaagcgatggattataaggatgtagacgatgacgatgatgacgacgatgatgaaggttcgttctttgtacattctttcaatgcctctcccttcagacaggaacggatgccagcttctttgcttggtcaacgattttggttcttctgttctgctctctttcttcttttgccactcgacgtacacgtttggtgcttattcataccgcgttgtattttcctttcttcctcttcctccctctgttcttgcaaaaacagatgaacaccctgtcggtcgcactcgatacccaagacgtcaacggcagcctgtagaacggtacaatccattagatccgacaccttccatagcgtctactaagccatcacgacaacttcgaaaccggtcagacagcctcggccaaacctcttcagccaccaacaatccaattccaaagatcagactcactcgtaactccctccgagcttcacagggtacagagcctgccacagacaatcaatcaccatcccatcagcttgacagtcaagcgtcaaaggtcacctaccgatcggacgacgaagatgagtatgacgaagatgaggcatcgattcggaaagcgccgatgcgtatcaaacttcggtcggtcactcgaccgtcccatggtcggacgacaaggagtacgaaaaagtacgaggaagaagacacaaacagacattcaggcgatgatgactatgaagaaggtgatcctgagccaactcaacaacgtcagcttagagagagaaaaaagatcaactacgcgatccttgcgccggaatacgatcaaccaagaaagtcatccatgaaggatggcctaggaaacgggatgggtagcaaaaaatcaagacttccttggagcgtctcgggaaaacatctggatagaatgtttggaggagctcctgcccaaggggatgattcagttcgtgtctcccctcttcttcctctctcttcactcctccctctcctcgtgatcgaagagcacatagcctccgaaaactccatttttcaggcctaatacgcgttcaaatgattctccttaggacgatgactttggtcccaaacgaaacacgtcgaatacctttgggcctacaggtgcgggtggaggtatgctaggtaattctatgccactcgatatgggaaccggaccgagtaatatgggcaaagttggggatgcaggtaaggttttcgccatcctcggcttcttccttatatcactgggaagttcacaccgctcacttgccaaacatgtctatccttctacactccggaatggacatagctttgtccgatgcggatccactagggacaaacactaatatcacattcgatgctgtagggggactagaccatcgtaagtcgcttccatcggtctttgtgtattccaccacatacttcactcgcgcaaattcttgacacttgcctttttccttcttattgaccgatttacacagatattcaacgactaaaagagatggtctcgttacctctattgtatcccgaattattccaacgcttcaatgtgactccgccgagaggcgtcctctttcacggacctcccggaacgggaaagacgctcgtcgcgagagctttggcagctagttgtagtacatctggtaccaagatatgttagtatatctagaagcttatctgcattactagaatgaagatgttcaccatcctaactcccatgtttcattcttttgaactctcagcattcttcatgcgaaagggagcagactgcctgagtaaatgggtaggagaagcagagaggcagctgagactgttattcgaggaggccaagacctgtcaacctagtatcatttttttcgacgagattgatggtgagtcttacaaatcgaactctgctgatatccgttcggtactgacaattcaagtctttatctcgactcactgtttcggttccaatgtggacaggattggcccccgttcgtagtagtaaacaagaccagattcatgcctcgattgtgtcaacacttctagcgctcatggatggaatggatggccgaggtacgttataccacataacatttacatttcttcaataagataacttttagattatctacgttcttctaatcggaactacatgcacacaaacaaactccatttaggtcaagtcatcatcattggtgcaacaaacagaccggacgcggtcgatcctgctctacgtcgtcctggacgatttgaccgagaattttacttccctcttccaaacaaggaggcaagacgaaagattctcgatataaacactgcgacttgggagccaaagctagaagatgccttgctagataatctggctgggttgacgaaaggatacggtggtgctgatcttagggttcgtctacctcgatttcttttcatgatgaaatctttcatatctggcgctaattgccaagtataacacgatggccctattctaaccaacatggttgttgataggcgctttgcactgaagcatcgctgaatgcaattcaaaggcgatatcctcagatatacaaatccaaagatcgattactccttcagcctgaaaccatccgagtccaagccaaggactttatgatttcaattaaaagtaaggggtttcagcctgaagaaaagacgtgtgacattgggtcttgctgacgtagtttgtttctcctcgaacagatctcattccctcctcggctcgttcagcttcatcggcagccgttatccttccgcaacatcttcaaccgctgttggctaaacctctagctcgaacaattgccgccatcgacaaggccttacctcccactaagaagacgagcgtactggaggatgcagaatgggagtctgatgaccctaaagacggctcgtttgaaagccatctgatgatgcagagtacgcgtttctccgattcttttttaaaaatgttaatgatactgatgacgtgtgcctatctctccgcatctgattatctttcacaatataggctttgaatcctctagagtctatcgcccacggatattgatccatggagaatctgggctaggtcaaacccatattgcggcagctgtgttacatcatcttgaaggatttcatgtccaaagtttagatctcgccacgttgatgtctgattctactcgagtaagtgtcctgagttgtttttatccaatggaagcagtcaatttgggctgatgtgaccgagagtttctgttttgcttgatggttgactatcctacttactcaatagacggtagaggccgctctggtccagctattcattgaggctaaaagacataaaccgtcggcgatattcattccgtcgttatctcaatgggcaagagtcgtctctgatatggcgcgatcgactgtcaagtctttgcttgacagtatctcttcctctgacccggttctcttgcttgctgtcgtggacggagagctggattctttaccgagagatgttaaatcttggttcgggtattccaaagacaatcgaatcgcgctgagtttaccgatcgatgtaagctatttatttccatttgaccatctcttattttgtatcaaatgtgtatggctgacatgtagccggtctgggcacttaaagtccgagcgacaagagtttttttcaaaggtggtagagaacgtacgaattcgccctgatgaattcccaggagggatgcctcgaaaagagagaattcttgaggagcttccaatcgctcctgcattgcctcctcgtcagccgagcgcggccgagattgcggcattgcaggagaatgacgcaaagttaattgagctcgttaagtggaagcttggcccggtgctgacggatctgaagcgaaagttcaagagtttttccaaacctgtccatgtacgttgaatgttctgacggagcgtgaataccttgacatagcgttgggagaaaccagatcgagactgacactacttgtgcgttcttgtatatacaccgcaaactaaaggacgagtaccgagtatactttgactatctggaggacattgaaaataagaatcgagcggtactcgaggcgaatgacgcgattggcttatcccctgagaaagcggcgctccattcatcccacaacacaaacgacgggttgaatccagagattatcgcgcagttgattgatgttcctcctcggctggtggacatcaatctggaaaagatgcactacgcgctttactataatcgatatctctccccggatgagtttctccatgatatcacccgaatagcggataacgcggagatcgcgacggacgatatggaacgaacaatcaaggcaaaacggatgatgaaccatgctttcctgttagttgatcagtcctgtgatcctcaatttagattggattgcagacggatggcagttcgggaaaagaacagggaggaggagaggttgaaggactcgacgtctggtcgaagggcgtcgatgagagcgagaggcaacagggagacgaacggggggtacagcccaaaggggacgagacattcgacccgaggtcaaggaaaagccccagagtttgacctgacggatcctgtggcgctagagcggacgctcaaaagacgacgggaaggatcgcaatcccgaggggtagattcttcagcgtccactccccaacgaggagattcgagtctgaagaagcctcgtccaacagaggacgaagagagtaacgagcgctctttgtctggcgtcgagccgttagacggagtccagggtgacgagatccatcctgagagtcattttaagatccatcctgagagtcattttaagattcatcttgagaatcatcctctaagccatgaagctgagtctgaaaagctctcttcgtttgatgtcgagagaacaacagatgtgtctgttgagatgaacggtgagggagcgatccggccagagtctccaatacctatcccgattccaattccagtgcctaccgcaaaatccgtgcctataccattccctgtacaccggccaactcgacagctctcgctctctgatctaatgcatccctcagctaccggtcgatcgacctctttggaagtcgtgtcacaagggcatggagatatgccaccgtcgtcgtcgtcgtccgctcgagtctcccggctgatacaccttccaacgatgtcgccgacatcatcattgtccgctacgggcactctgtcatcaaccgtgggccctctgtccgtgcccgctgtggctgtttctgtcgctcaaccgttgacaggttactctcaggagttgccagttttacagaacgggcatgtgccgtcgttgacaacgatgccgacaacaacggcggctcctgagcgcgtggtcgagatcgaggtcgagtctgtgtctttgcctactgttcctttaccatcatcaccgccgtcgctaccgcttccacctccttcgccacttcctccaccgccggtatttatctgctcgacatctagtctagaatccatcgaggctcagctcgttcgagactcagtctcattcaatgtggatgagctagaacagatccgggcgatcctgctagactgcatctggcgacaccggaccgaatgggaccgatctttgatgatggatgagatgagtcggctggccgaggagttcaaacatgaggtggacgggaatggaggagatgatggatgggatatcatgggataaataggagggaagtggaggagagacagaatcgatttgtaagacgagtgtgtactgtatagatctataaagattacaaaagtattagtgatgacaagaatgacaatgatgaaagactggctcgatacacgtgtgcaattctgtctgtacttggtttccctctcggagcaacacgatcatctttaaatctctcctttcttgactatatccctctccatccgactgacgacctgacagagatgacgttgacaaagcaagaagagtgagaggacacatcctgctctgcgtatacgacggatgccgtttcaacccatccctcatctccgatgaaacggatggaggattcagaagagtgagatccttcgcgtcgcttcgctttcgttcgttcatcctcgagcaaatcctatatgtacgtggggaggaaggaagaatggtggggatgcgcagccgagagatctcaaagtgccgccggcagatgcccaagcgcgccgcgcagcattatctatcaaagagggaccccttctcgttgtgcctggcttggcctgtgcctgtgtttctttcactcttcttcccgactgctctcgcgacgaatcgaacgaatcttctttgtaattttttttttctacgcccggccatttattttgttttattcgttttatattttttcgcttcaactctttctctcttccctctcacttctaacgttcacccagaaacatagacacacaatctccttctcttctttctcatagatcatgaccactcagcgagtaagtatcagtctacgtgatctctccttttcgttctcttccttctctttgagatcatctccatctcctctgatggagatcttctgatcgcagggaggaaagaaaggcacagaaagagaaacgagccttatctgtgcctgaatccccaacgagttttttttttttaattcgctcctgctcccacgttgtcatctctggactgggacgttgactgtctcttcctttcccatctcttctctagtcccacactcagtccaccctcgagtggctctcctccctcaacaccaggtacggcgtgtatttcttcttactcttcatagtgaccgatttgttctcgcgatctatagatactcacgtctacatcttccataccctttcctctagctttaacgctttccgagatgaggacaagtacatgcgaaaggtatgttcgccattattcttttcttgagcttctcttgcacgaacgttcatacagctggtctgacttgttttccaaccttgtttttactttgcttcaccatagacctccatcatcgccaccatcggtcctaagaccaacaacgttgagaagcttcaggagcttcgagaggccggtatgaacgttggtaagtagagattgaggacatcctgtctataaagctccgaatgcctggtaaagagatttgtagctgatgcgctcatgactattttcttctttcaaaagttcgaatgaacttctctcacggatcctacgagtaccaccagagcgtcatcgacaacgcccgagctgccgtcgctggtaggtcgaatctatagccagatgtgtattgagtatgtacaatcagtttatctaaccctcccgttttcgaatttttattttcatagccaacccgggaggtcgaccccttgccattgctttggataccgtacgtacattcatgtctagttctatcttcatagtaaacccaagctgacagcgttccctttctctacgcgcttccagaaaggacctgagatccgaaccggtcttatggccaacgacaccgatgtcaagatttctgccggtcacgagttctgggtcaccaccgacgaggctcacgccgagagcggatccgccgagatgatctacatggactacgtgagtattttgttggctttgacttctcctctttccaaactaaagctgaccaactgcccgcttgtatcattctattgcgccgaaatcctctcagaaaaacatcaccaaggtcacttctcctggcaagttgatctacgtcgacgacggagtgctctcccttaaggtgctctccatcgagggtgacaagctccgagtcaaggccgtcaacaacggatcgctctgctcccgaaagggtgttaacctccccaagaccgctgtcgaccttccccctctatccgagaaggataagcgagatctcgccttcggagtcaagaacggagttgacatgatcttcgcttccttcatccgaaccgccgatgatgtgctcaccatccgagaggtccttggacccgagggtgccaacatcaagatcatcgtcaagatcgagaacgagcagggtgtcaccaacttcgacgagatcctcgccgtcaccgatggtgtcatggtcgctcgaggagatcttggaattgagattccttcttcccaggtcttcatggctcagaagatgatgatcgccaagtgcaacgtcgctggaaagcccgtcatcgttgccacccagatgcttgagtctatgacctacaacccccgacctacccgagccgaggtttccgatgttgcaaacgccgtgttggacggagctgactgtgtcatgctttctggagagaccgctaagggttcctacccgatcgaggccgtcaagatgatggccgagacctgtttccttgccgagtcttccatctgctacccccctctcttcaacgatctccgaaacttgaccccccggccgaccgagaccgccgagactttggctattgccgccgtcgctgccgctgccgagcagggagccggtgccatccttgttatgtctaccagtggaaacaccgcccgattggtctccaagtaccgacctgaggcccctatcttggtcgtctcccgaaacgagcagacctctagacagatccacctccaccgaggatgctacccgtgctactaccctgagccccgaggagtcgaggcttctcagtggcagactgatgtggacaaccgaatccgattcggtctcaagtccgctctcgagctcggcatcatcaagcccggacagaccatcgtcgccgttcagggttggaagggaggactcggacacaccaacactcttcgtatactttctgttcctatggacttcaacgacctcgagctcgccccccttccccaagtccgaaagtagatgtgcgaaaatacttcgccttttcccctcctccgctaaaaagttgtctttaatccccccaggttgtttctttgttgatctaatatgataaattcatcatgtacactttagtaatggtagaacgtgatcttgttctctcttctatccgtcatatatctttcagcttgagaccattcggtagataagagacaatgatgctgttatcacaacagagagcaaaaatttgaaattgtgccgaggaaaagagtatgcaaagttcaaaaagaatgttagggttaaagaagtaactagtaactagttagatcatcaggcacgtttaacatctcctatctctccgcacacgtgaggtttcacgttctgctttgtttctttactacaacagaccaggaattaccagcatagaagagagacttgaaggaaaaaaaaaatgaacattctgaagaggttgagctttctttaacaatatctacactcggaccgattgagtccatccaccagtttgtgtttttctcgaacgttgaaagcagttgaaccttagtatagactgggagatttcttgatgggaagtaacaatgtagaaatgatcgccggtttcgttttatatgtttagaacagaggagggtgtgatacgtgatgatggcatagacaacgctgttcagagatgaatgtttcgactaagcactcggtctcatctctcagctttcctccaacttccaatcagccaggtcagctagtccttctgcttttctgaatcaccggactgatagaaccgtcgacagtcaacaggtactgacttgcgttccagaatgatctcaaacatagtgggaaggcttacccagaatcattatgaatctaatctaacaaatctccccgcttttacaaacgcaatcgtccacatggtagacatcctcgtggctgcatgtatacaagctcactaatcaaccgcaatcagtcatgctcacatacatttcccaaaacttgacatacaatatctccatgtccatcagatgaccaaacatgaccaagctcataggatgacgatgtggttgtatcctaatctggtcatcttaccgttgtctatgtgttcaattatatagagagactacacatgtgttaacaccatacataactcatctcgtcttccgtctaacaagcatcccaatctctcactctctaaacttctcattatctgagccaatttaacaatgtctaacaacaccgtatacctcagtcagtctttagtcactctgcatgcatctaggttactgctccgctggatatggactcataccatctctgacatctcttgcctccagtcactggtgccaaccgaggaatcggctttagcatcgtcaaagctctcgccagtgatcctggcaacattatctttgccggggctcgagttcctgccaaagcgattgctcttcacgatctcgcaaagactagccaggccaagatcaacgtcgttgagtttgtgtccgccgacacggagggtaacaagaaggcggccgaagagatcaagaaggctgctggcagagtcgatgtcattattgccaacgcaggtcagtccatatcatctctttttatttttatttttaaaactgttcattcgttcaaagcagcctctttgattgacatgcgacgttatgtaaacacccctaacatcactaggtatctctgagcccgacgcctttggacttgtgcatgaatcagaccccgcacagtggaccactcattacaacgtcaatgtaattggagttgtcgtgctttacaaagaattttattcccttctccatgcctctatcgtcgcacccaaattcatcgtcgtctcctcaggtgcgggatccgctgagctggcctttcaattcaagatgcctctcgcggtctacggcgcgtccaaagcggcggtcaactatacgaccgtcaagatgcatctggagagcgaagaatctggactgatcgtgttccctttgagcccaggttggtcccttaacattcatgcgcgtgttcttctaatctcagtgaatgagaaacatgcgactgacttaaacggagggcttgctctcacctttggtatcaggagtggtctcatccgacatgggcaatgcctccgctaagaagcttttcccagatggttcagagaacgcacttgctgcgatgatcatcactccggatgagagcgctcaacacattgtcaagcttgtcaaggaggctactagggaaacacacggaggaaagcattggaactatgacggcactgtcttaccttggtagatatatctatgtagccagtcctataacggttctgtgtacgtgttcaactattccatgatgtaaagtttcgatataaagcgaaagcatagtcattttactcaagaatagccaccggaagatggccctcactcgagtcagtcagagaggatgaaaagtttagatgcgactagataagataagatggtagatagttagggttattcggcgttgctacaacctcggttgcacgcgactaaaagatcaagagttctatgcgccctctaaatcagcacggccatcaatcttatctaccaaagcttcataactacctcctcttttatgtgctctttagtgccactgcatattcaccatctccaagtctctcatgcttcgcatcctgggttgccctcctggctgtcgatttgagcctggtcggacgtttgtacaacaacactgcttacgtaacaagcgtatctgaaaacgggcccttgctaatgctggctagcacaggcagattttctgggcgaggaatttcctttttctctttccttcgaacaaatccgtcggctcaagtcttctttctggtacgtgtgaacatatgttgatataaatgccagagtgaatgaaaggaacagagatgtccaaaaatctttttttgttcgtggtagccttgtttgctaaattttctctatctttttttctctttcgggtgtcgatcgaatttggttttttttctccttgctcttttttaatagccaaaatgcctttcgtcaagcttgtcaagaacgacgcctacttctcccggtaccaggttaagtaccgaagacgtcgtgagggaaagactgactgtaagtgttctgtctcgaaacgttaaactcaagactttcaatagaaatccttactggctttttttttcacttgctcctgcttttagactacgcccgaaagagactcgtggctcaggccaagaacaagtacaacgctcctaagtacagacttgtggtccgattcaccaacaaggaggtcatcgtccaggtcgtttacgccaagctccagggagatttcgtcttcgcccacgcccgatcccacgagctccccgctttcggaatcaagcacggattgaccaactggactgctggtgagattttcttttctttcttcttgcttgcttgctttctttcttttcctttgctcactttgaatccctttccagcctacgccaccggtctcctttgcgctcgacgagctcttaacaagctcggtcttgccgacaagtacgagggtgttcccgagcctgatggttcgctcgttcttaccgagaagctcgacgaggaggatgcccccaggcccttcaagtgcttcttggatgtcggtcttcgacgaacttccactggtaaccgagtgttcggtgccatgaagggagcctctgacggaggaatcttcattccccactctgagaaccgattccccggattcgaccccgagtccaaggagctcgatgccgaggtcctccacaagtacatctacggtggacacgtcgccgagtacatggagtccctcgaggaagaggatgacgagcgattcaagaagcagttcgccacctaccttgccgacgacattggatccgaggacatggaggagatctacgccaacgcctacgccgccatccgagaggaccccactttcaagcccaccgagaagtccaaggactggaaggccgagtccaagaagtacgccgtcgcccgattgacttacgacgagcgaaaggagaagatcgaccaaaagatcaagttctggaacgaggcccgagccaacggtgcccaggacgaggagtctgtcgagggatccgacgaggagtaaacttactcggtcgtcgtttttcactactgcttttcatcttgatcatgtctttcatgacttttttgtgtccccccgcattacgtctttccctacgtctcacgcacacgagcaaacttgaacttgaatgacacatcgtatacgttcagactacatgcaagaaagagagaaagaaagaaagaaagaattaagagtggggacgacagaaactctgtcgaggacgaaacaagaaaacgtttttctgagtcttggtcggtcaacccgtagatgtcgggttgtgcacaaacatgttctagtctgctcataataagtagcgactttcaaagcaagcagtgggagaggccaaggatcagcgattcaggtcgccagtccgatagagctgcctagagtttcgtatctgggtgaacgaacatgcggttttctgttcttccttacactctgtcggaacatcgctctcgtgtgcgaaaagagacgagacagctgatctagatacaggtacatgtacttagacaagggatgaatacacccctcttatcaagatcgtcaagtactcttcatgaagaaaagaagaacagacagctgttacaccaagcctagaaaataggatctcataaagacacgtttccttcgcgaaaaagaaggaaaaggaggagtagtccagaatatcccagtcagtcggtcagtcagtcaacacaacgagaaaccatccgtccgtcttgaaaccgtttcaagtagaggcgtctggctgaagtgtctctcatcaaggccatgtccgttcccacgtcgtcccgtgctgggctggttacgtatgggtgtggtcacttgcttgctttggaagaactgcttgtatcggacagtcatctaattgaagaaacccaatgaagaatccctaaacgaaggaaagtatcagaaggtcaaaccttgtcagtctaattaataaatctccacgtcatgtaagcagtccggctaggttatctgatctttcattatgtccctagagacaagaagactctaatttctttgtggttagtggtggcagagcagagagtccgagactatcacggtctatctgtccgattagcgactctcccttgtgcctgaagacgagcaagatcaaggtttcgggtgacgtttcttcttttccagctagttttccatcctactttatctctctctattgtcacttcttcttccctgttctcactcgacctccttcacgcctttttctcttgttgtccggaacgaattttgaatgaattctgggtttgttttgaaaagccatgcatgtgcacttcagcatcaactgcaatcccagccccaaccccatcaggatttatcgaagtcgtctgttgaacgcgaagagagatagtgagagagagagagatgacgagacaagaaccgataggatggttttcggatcaaaggaggagccaggggttgtagggtgattttcaggaagcggaaaaaaaacgagcgaatgtttggtgaattgcggattcaggcgagaggggtacatgtcgagagaaagttgaggggaaaaaaggagggaaacaaagaaaccagagcctggtcagtttctctgtatccgaccgagcacaaactcaaacacaagaaacgaaagatttcgagataagtactgaccgggcctctcgctcagactcaaggagagcaaggatatcgtgctctcggacgggtcccttgacgtttcggatgatggatcgcgaagtatcgtcgaggaactcaactcggacctgggtgactcctcctcgggatccggttcggccaaggaccttgatgactcgggcgagcttgacgggctgcttggaagattgagtatcctgttttgcgtgaaccaaggattggtgtgtttgcaggcacgcagaaaaaaaaaacgaggaaaaatcgggcgtcgagaaagaatgaagagacaacggattatcgaccaaacgataaaaacaagaaaaaatcaccaggtttccaaaccaaacgaaatgaaaaagatgactagatcagcatgtgtatcatcaacagaaagaccatagttatccgaccacgagacaacgagagaaaggacatgtctacacgcaccatgttggcgaagttagctgatggggagaaagtaaaacttgggggcgggatcagcaaagggcagaacaagtttgagagggccactcgattttctccgggggagagtagtaactaacctctaggtgaaaagctgtagtgcggactaggaaacgttcgtagttttcgtagtgaatactacaaaacccagaacattctctccacacggccaagtcccgagctgacttttcccaaaggtcaggcgggtagcgatagatgaatgatatccacttaacacagctcctagcttaagtattccgccctggccctgccccctggcggccctagcgcccgtgcgcgtttggccctgtctggccgcccaagttaggaaaaacccgtcgttctttttcctcttcccttcaagaccatcctcaagacagtcaaagtgaatagaaccctttcttctaagttcagccttcgcttcaccaaacacacatcccaaggaatcatcccgacaacgacaaatcgtatatatcccatctttacattttgggtcatgtctcagtagagaacgaggggtgaaaaaggaaggaggaaaaaatgatcacttcgcccttggtcgattggtcgtatggagaaaatttaaatgcaatcggacgacccttcactcgatcgatggagctcataccatcgagagggtcaggtcgtcagcgttgagggaggatgagaggaaaggaggaagaaaaaaaaaccccaaagtcttgctctctcttttacctcgtccgttccacgaacgaaacagagtggcaatagagagggcagttttggtctctttctgtgcatgattggaacggagctgttcaaacatgatggcaacgaaacccacatcggtatcacacattaacgcccctcgcaacgacctcacggacactcatacacacacacccaatacaaacatttttgtcagcttgatttattcccagagcttcctactgacatgcttgcctttgtctattcttcagatggccaagctctccgatcttcgcatccagaagcgactcgctgcctccgtggccggcgtcggtaagaggaagagtaagttcccgatcttcggtgtccagttaactatgctcgtaacgaatggtgttctcagacattgttgtcttttctctcctctcttgttctcagtctggcttgatccccaggaggccgccgagatctccaccgctaactcccgaaagggagttgcgaagctcatcaaggatggacacatgtaagaatcaagattacaaacactgtacaagaaactctgggaaaggtcattttttttctgaaggcactttcgctctctcttttcttttgcagcattgtcaagcccaccgtcatccactcccgagctcgaactcgtgacctcctcgcttccaagcgaaagggacgacacaccggaaccggtaagagaaagggtacggctgatgcccgattccccaccaaggttcagtggatgaggcgaatgcgagtcctccgacgacttctcaagaagtacagagacgccggaaagatcgacaagcacctctaccactctctctacctcaagtccaagggtaacgtcttcaagaacaagcgagttcttatggagttcatccacaaggccaaggccgagaagctccgaaccaagacgtgggtgtttcccttcaaagacctcgttaaccattctctttccatccaactcacccttgtactcttcaatttttttccagtcttggagaccagatggaggcccgacgagcccgaaacaaggctcttcgagagaggaagctccagcgacttaccgagaagcgatccggtatccacgccgtcgaggtcgaggccgcccaggagtaaacttctttttgaagcttgcgttctgtcttacggtctttgtttctctggagtggttatgttatggctttcgtgtaatgcgtaatgtgtctgtgacgtaagcaagaaaagtgacaaccggataggatgtgtgctaactagaaaccagacgtgtggctgactgaacgatacggatgcatgcttgctgaaaccgtagtgggtgtgtgtatctgtgtgctaatgttatgctctctttccttcctatccgtgtctgctgcctttttcactcacataccctgttatatactcatttggaaggggccgattgtgtcatgttactccggcacctgggaagatcatcaacgcagaatctaaaaccccttacggtatcaaacgtgaagagatacaattacagtcttgtcgatcgtcccatgaacgtaatcttgtccgaaagagcatattgcattcacttcccttttgtgttcgcgctcgacaacacaaccgctggttctgatgctgatgctgatgccgtaggcgtagatgtggctctctccaagacatccgttgcttgatgattgctgtcaccgtcactgcctatcggaatgaatggattgttggcagcaggaaagaaggtgaggctgacgctgtaccgatcggcaggtggatatccttgcgcgcagtttattaataattaaattattctgattgttctctctaacctcttttgttctctccatcaatccttttgtctgacgataggattgaggagatactttcatgagtgatcgaggctcgagagcgtcgtttgatatcggatactccttcgtttgtccagatgatgatgctttcatttaagttcttctagtatcggtgattttgaaatcagcatggcgggttcaggatgaagcctctctcttcctcattgatgttctcgcttcccaacgtttgtttctcttcctctttcattttctcttcttttcttctctttcttctcttttctctcggcgttggtctttttaaagcaagacgtcaggtcggcaggccacctctctctctcttcttcaactctcgtctcttttccttccacccccacatatgtctcctttgcctatatcagtcgtcctcccacacagtctgtttgcgaaacggcaagaagcttgcgctctgtcttgcttgacgaccgtgtcagccggttcatgtaccgcccaagacgcaagctgtctctgcccgagttcttcatggggaaccgaaattcttgtatgtccatcgcgttatgtccaaaaaaaaaaagaaaaagaaagatgtaccccagataccagaaaccgggattttgaaatagacttcgaattcaatttctaaagaaaacaccttttacttgttggtctttaacaaatctgatgatcggatagagctgtgtgcaagccacttgcgagactgaagatgtgttacatctggcgtacgaagaactcctcgcctactgtctcctctcggtaagctttctttctctcttctccagcttgcatcggccttcgcgcagacatgtactgatacagtataacctcaggacgtcacattcactcttcccgagccgtcctttacccgatcgtcagccggtttggctaccgcctctgcgtccatcactgcttctgcttccgtcgccgtgtctgctactgtcgctgcctctagctccgcggtcgtcgttcctacggcaattacctcaagtacatcgaccgcggacggtaatgtcgtcgccgcctctggtagttccatcattcatcccgaaccagtgaatgtcagcggcattgtgagtaccacttccgcttaatcttgattcgtgttgcaagaacaacatgcaacacagcaatgcgctatcgatctccgcttatgctttcttcttcttcttcgatctttgtgcgcgacagatggcaggggtgtgctccttgttctttgcaatcgccctcgtctttggatactttggcgttcgcgagaaactccgacatgacaaacagcacggcggatctaggtcgagagacaactggcctcgaggtccagtctcgacagataaggaagaaagaagatcgcccggtagctcagggaatcgaactgcttcctcagacgatcaatctcaacgatccgaacagccagagatgagctctaccggtggagtctcgacctctgctttcagtcttgaaccagaggagagctgttccgatttggatctcgagatagaggagcgccgagccaaacgtttgttcatttcatccattcatccattcattcattcattctttctttctttctttcgtcaccttggtctcctcggttcctacatagactttacttcctcgtcttagaaacttcctttttctaacgttcctcctttttcctccctctcctcagtccgacgagttcgactggaaagagcggaagcagcggacttgatccgtcgagaaaacctgcttcacatctttacgtccgctccctcgttagataatgcctctccgacatcaacgacctcttccgcttcggtcgcttctccggatgcgtaccggttctctgtcgaccaaagcgttgacgacaagaaattctctctggggttcaccgcacttgacgagaaagaggaagacgaggaggaagatcaataccgacttcagctccaagggcgcggcgaagacgatgcggaagcgcaatacgtggatatgccctcagcgagggattcgaccgtcttggatccgttcacaccgacgagcgttcagtcgaccgaagccgaggatggtatagaagatggtccgagaacctcaggagaaagtccatggttggtggacagaccgttgccaacgttgaaccgacagcggtagtagtagtagcagccgtagccgccgccgtcgaccaagtctctgaccgggttcaagtcaaggatcgtctagacaagggatgggcgcaaataatgttaatagatcacctccttctctcttttttttttttttctcctttcatttccctctgccacatattcgttcgtctttggttcctcttcctttcggatttgtttgtctatttgaattcatccaccaatccttgtccatcgtttgatgtacataccatcatcgtcaatatatacgtgttctcagagcgggcttcactcgagtgatgagttttcttacttccgtcttgtcgttgtttaccataagttgttgtgtatatatcctgtatctgtcttgttacgatcttgggtcctttcattattttttttgtatgtatttactttggggcttcatgttagctttcacttctggttctacctttgcttccacctttgctttagcctctactttcgctttcgcttctgcttctgctcctaatttcgattctgtttctgcttgtcctcgatatggatctggccatctatagcgagatcttgaagatgaaacactaaatactaaacgaggggctcacagagaagaaaaaaactccaccctgaagacgaaagtagggtaaaattcagtggctctgagctagtctagacggacgataggaatttctgcctcgtcttattcaaaagctgagatgtcggtttcattacgtacaacaaaagccaaagatagagacaacgcgaaacgagtggtttccttgtcgctcgatatgctcggccttcacagaaggttcatcaaaccatctttttgcttaatctaggtttaaggaagatccctataagatgagtatgtgtctgggaaacgtcaagacataaaaagatggagagctcattaaagaaagacctttcttcaacgagaatgtatttaaaccaaccggttctccaagctcgtctctcgagaacagagagttgagaaggggtaaacaggttttttatccaaaggagggagccgttagacgacaaaagattatacaatttgtagaaaaagatgaaaaggcggaggaagagcgagggaggggagatgttgatagagaattgaaaagaaaagatgacgacgggagggatattgaaaacgtagaagagcgaaagagaccggaaaagacacagaagatacaggccatacatgacaacacgtttacgaggtcatataagtggtagggtcgatgttctcagggagctcctcgaccttgacctcgaatcgagactggatagccttcaagatctcctggtcctcgtcactcgtgataaaggtgatggccaatcctcgggtaccgaatcgtccagcacgtccgactcggtggaggtaagagtccgcatctccagtcatgtcgtagttgataacgacgtttactcgctcaatatctgaaatcgacattcagaacaggaagaaagatatcttaataatacgcccttaaacaccgtgctttattaagaaaacctatactaaccgatacctcgaccgaaaatgtcggtggcaaccaagattcgcttctcgaaagccttgaactgtcggtatcgttcgattctaagagatgaacaagccagataaggatgtgtttagatatacaaatgatttaaatcctgacacaaaagacgctcaaccagggtgagcgtagacatccacttaccgctggtcctggctcattccggagtggatacagatggaagggaaactgcagtcctgcaagagcttgtccaactgatttgctcgggcaacagacttgacaaagatgcagacctgatagtatatggatccaacggagatatcagaattggaagagagtaggtcgaagaagacatgtgagacgcgtttatggacgaacctggttgaactcaagcgagtcgagcaagtcattgagctttcggttcttctccttctcctcaagcttgacgtagtactgctggagaccgtggagcgtaagcttggtctcatcatcgacgtagatctccagtggctatgcgatcagaagcaaggagagaaggattcatattgatcaactgtttttctcaaagaagagaagcgacagcactaaccgactgcatgaatcgcttgcaggtagctcggatctccttgctgagagtagcggagaacatcatgacctattaaagaagcaggtgagcggtgatcaagactcagacatcacgatctttgacagaagcgtacctgcttgtggtgaggggtcattcggaagatctcctggacgtcacgtcgcatatctacaccatcgatcgaaaaagcatcagtactggagcacatgcattttgcttgaatagagtataaagacaaacataccaagagactcgagaagcttgtcacactcgtccaagacaaagtgcttaacggtggctccgttaagagccttgtctcggacgagggcgttcaatcgaccaggggttccgacgacaatgtgggggcacttgtccttggacttgagcaagtcgacatcgttcttctgttgggttccgccgtagaagacagaggttcgaagttcaggcatgaactttgtgaatcgggcgtactcattcttgatctggtaggccaactctcgggtgtggcaaagaacgatgacagagacctctccatctacgggctcgatctgctggagagtcgcaaggacaaagacggcggtctttcccataccagacttggcctggcagagaacatccattccaaggatggactgaggaacacactcctgttggactaggtgaataaaacaagcgagatgcaaaagaggatagacacaaaagaggaaaaaggggcaggcaacgacgcgtccggaaacggaatggttagtttgacaaaagtttcccggcctggtaggtcctgattatgattagcaagggaagggaaaggaaagttaccctcagaggggtgctcgaatccaagatcagagatagctcgtagcaattcgggcttcaacaagaaatccctgtagacaagcagaggagagaaaaaaaaaacaagattagttgctgattcgtttcttcaaacggctctttgctagacacaacctggacaggcatatccaacggcgaaccaacgataagaaggccaacgtacctgaagccagtagagtggattccaacataggatcccttcttgtccttgtcaccatcggcagtcaactcgctggtaggctcagccttgacctcagggacgatgacctcgtcctcctcgtaatcgacaagctcttcgttatcggccatttttggatatatatatatatatgtgtacggttgaaggtttctaaataggatgcccgttcgagaacaacatgtttttttttcgagaccagaccgaaaacgagcgggtgtgtgtgagaaaaccgaacaacaatttatttatttcattttaaaaggggaagggccgccgaagagatgggacggattcaagggtctctgatagatgggatccttccgagcagttgacaccggacccattcgagaaagaggtcgaaggatccacaaccatcgtctggagagacagacgtgttctttgatgggaaaacttgggagatgagatgggacggaaggcgattcttacaagacttgggttgttgctgggttctttgatttcctttttgggtggcgacaggaaaaaaaggaagaaagaaaaaggcgagaggcaccaggggcagatgtgcctgggagatcacgtggaggtttggtggttacgcgtgggagttacgaacgcgtgggagttcgcgtaagagttgacctgattgtcgcgtcgcgtcgcgttgcctgatcgcgtgcatgtcattcaacatgaggagaccgacgcgtcattcggttcctatcctcccttcatacccgttctcaccgtctgtttcgtcagttccgtcttgaaacccttacccgtccaggcggactcgtcgtccactaacatacatacatacagacccgggcacatacgttgtcgcatcatcagcatcacgctaccaccccatcgataccctcagtaaacccgatccgaatcactcaccacaatgtctcgtccagccaaaaggaagcccagagctacactgttcgcagtttcctatctcttgtgtcccttgtctcttgtcctggccatcggattcactgacatttttcactgtctgttccgctcttaggctcttgttcgatcctctgaactctccagtcaaacccgtggctccccggaagtctccgctttctttgtctgtattcgccgaggaggaggaaggagaaggagaagaagaagaagaggaagaggaagaggaggaagtaacaagagagctcgcatcccaagatcgcgaaggccagccaggtctattcgcccaggtcgacaactcgctatactcgatctactctgatccatcttccagctcgtcccttgcttcccattcttttccttcttcccactctggatttctcgtcgatgtcggctctccggagaaacaagggtcgctcgtaggagatctcattggagactttgacgaccatgggatctcgcgtaccagatacatcgacgaaaacgaggttgactcactcctgatgagcttggattctcccgtccagtctaaaacgaccgacaagcccggtcccgatcgaacctcgtcgatggagacacccgtccggacgaaatacgcttcgcaaccctcctttgattctccctcgacaccttccactgtcatccgtccttcgcactcgaccgagcggccttttgctgaatcagtgcgcgccgagattccagacttcgtgatggctacacctgtggttcttagaactaccaggacgtcgtcacctcctcacaaatcaaaccttgagcttccagaaccgggcccctcagttcaatctgctgacgcatgttcagtttcacaagatgcgaacgagtctacctttgctcattcatcaaccgagaattcttctctcccatcagtacacaccatttctcaccaaacaattaatccttgggaggtcccccttccgtccagtccaccttccgaactgttcttcttcttgactgcccctgataaacaaagagacgagggttctctccttctggaccctcctcaactcccacccgcttcacgtgctcccaccccatcattcttctttgacgtcacagacacgtcctttgacctcctggccgacgcaaccctacccgaaggcctctctatgtctacactcagagcaccatcgccaatgctccacgcctctcaagatctcactgaagaaacttcgttcatcatgaaatcccctgcgacatctagaagtccggctcctaaacgaccagacggacgcgctccgtccccttttgcggactcctcgttcgacttactagacgaatctttgccggatattccaccagaaacgtcgtttgctcttcctccacctactccccgatcaggggcggctactagatttacgcacacccatgcggctctgctgagtactccttcccaagctactccgacagcgccttcaaagatccaacgcaatccacccccttcttcatctccattgtcgttcactcctcggggtccgtccatcaccctgtcggtcccgtctcctaatcagaaattcactcaaagggacgctctggcagacgaaggggacaccactctcaatctggacgaccacttcaaaaatgaagatatgagcttctgtcatttgcctggaatgagccttgaattggatggagaagacgatcggtgggacgtctcgtttgcaggctttgcagctcaaacacagaagaaaaaatcttccgtctcaaacgatctagaagctaggtacgctcttgttcttttacctacataccttcccctttttgatataactatactcaccttgtttctttccctattggattgaccgtgccattctcttcttccgacgcgtatagtcttgctccctctcgtctagctctagctaccgctcagcctgatctcttgactgcttctctgcctcctccagaagaaacagtatctcatgatccgtgggatgtcgtgttcgtccatgataaggcacgagtcaaaggagagagctcaaagccttccctctccagtaagtgacaacgaagcgtctgtctgattaagatggcaaagactagcttgactgactgtagacacatatgatcacaccgttcacagcgtcgacttcttcgaactcctcaaccctctcggcttcttcgtctcgaactgcaaccttagcttatccgtcctctcaacgttcgatcttggctccgaccaatcgagaggcgccagtcccacacaaacgaactccctctttgcctcgagagaattctcgacctccatcctcctctacaaaaattctcgcacccagtgcgcaagcaactcctcgacctattcgaaaatcgccctccatctcttcgacccttgactttcaacaaacccctcgatcgagcgttcaaagctcccacggccgatccaaatctcttgcgagccatcctcaccttgattcaccttctttgaccgagacacccattcactcgaaaccgctccctttcagcaggctaaacgtccgactaagcgcggcctcctcccccaggactactcgagatgcatcatgcgagaaacccgtttctagagaagaacccgagagaatccaatcaaggataaaaccttcggcttcgataggatctcttgctcgagaagcccccggcttgccgtcgagtagatctagctcgatatcgcgatctgcgtccggttcatctacgctcaaccacacgcagcccatcaaaccatctatatcgacgccttctgctcctagacgaacgtctcgtcctgtctcgacgcctaaattctctctcacttcatccatccagccagctccatccaaccctcctcctctcaccctacgcccttcggcctcggtgtctctggtcccttctcgatcgattcccaagccttcaatcaaggctgccatcggcgcccagccgggcacaactgcagctggtgccccaactaaggtgcataccatagaaagtatcagagcagctttggctaatttagaagcgagacggggaaagcattgagccaggcttgtggtatgttatatatgtttattcctagagaaagaaagagagtatgtgtaggcttgtgtgacaaccgttgctagggttatgagtgctggcaaacaatgaccaaaagaaataagaagtcatctctcatcttatttcttgccttacgaccatccatctctgcctttaccttccttccttctttcacttcctcttgtttgtccaaaaatgaagctttatatgcttcttctaggcctggccctctgtctgacgtctgtctgggcgtgagtttcttgtggataccgtgtttgaacgattgcccgtcttgaaaacgacgcgactgacctcaagctccatttctttatcgtctggctttcgacagttgggacaaggagtaagtatcaagctatcccttacttctgaatgtacttctcgtgaatgtctgttgccagcaagactgatccttatcgcacttcttgggcttccctacttcgatcagtgaccatgagatctttgacatcgttgccgctcttgagaaggctgagggttcgtccttcatctgtgcttgtgttctatatcagcttgaccttctgtgtttgacttcctatatgcttcgaactgtctccgcatgtaggcaaaggaaccacgttctactccttcctcgatgtccctccctctgcttctaagaaggagatcggaaaggcttatcgaactaaatcggtagctatgcagtcagcattcttcatttgctttgctggatggctgtgaacgaagaaagcaaactgaacttgacgatcttgctctgatcttagcccggataagaaccctggagacaagaccatccaggatagatttgccaggcttggtgtgatttccaccatcttgagagatgatgccggccgaaagcgatacgacgtaagctcctcttttcttcctctattccatcccatcttcaccaaacgggacacattggaaaaaatcgggtttgcgtcgatggtcagagcgctgatgactcaatcgcttggggtttcttcagttcttttacaaaaatggagttcccaaatggaaaggttagttgcatctgattttaaacggagagagatcattcactaattgtgggtttgctcttgttgggtctgtcgtcctttctcaggtaccggatacttttgtgagtcgattgcttttccttccttcattctgttgatgcaaacatttttgctcatgacttaccgttcacttctttttgtctccaaccttttctccagacgctagatggcgacctggattcttcttcactgtcttcttcctcgcgctcgtctcttctggcttccaatatatcttccagaggatgaaccacagccaggacctcggccggatcaacgatctgatctctaaagctcaactggccgcttggggtccgaacgaaaagttcagagattcgttcgcgaggaaaaaagtcacggtccctgttggaacggcgggtcgacaggcagatctactcgtcatgcaagatggggatgtgctcatggtacgtttcctcatctttgtccgccttatctactctgtctgtttgtcctctcgattaataatgaaggaacattaacatgaatctattctccttgcttctcttcttcttgtccttcttcagctcgaccctcctaatgaacccacgttgctttccgcttcgatgctcgttcgaccgacatacgccggcacttggcccgtcgccctcggtcgatctcttggagaaaagtttggactgatcaagcctgatcctaatgcgaccgtctcggagtctgactctgaggtcgagctatccggggcgtcggcgtcagacggagaggttgttgccgagtcgagcgcagtgtccactgggaagaaggccaagaagggaaagccaaccaagagacggtaatgaaccaggaaagagtcggtcggtgcattcaaacaggaatatgtcggtggaaagacagaagaatggagaggaagaagaaggagaaagaacatggcgtgaattgcatcctctatttttactcgagttgatagatatgaagattcggcttcctttttctagcgtctccggcgctcgcgtctggtgagcccgactgggctttaccgactgtatgttccgtatgatcatacacgtcggctacgaacaaggactgatgaacggagaggggcactagttgtcgagacattcattcttgaggcgacatagattcaaatctcccctctttacacctgctctgtgatgaatgaggagcatgataaagatcaagtcggtctcatcgcggtcgaccggctggacgattggagaatcgtcttcaaccatccaaagcgttgcgcacgtcttttagccgagcttgaagctctcgatggcctgccggaccgatgaaccgtcccccgccctgaccaccaaagaggatttggagaccagagtgaatgtctgcccattgacctttgctaggcggtttccctgtagtctgtatatccgtccagaaagatacttgggtaggcaggatcttcgtacggacgtacgatgccgagggtggagtatacgtttgcgagccagacggatccttctcagccaaacattgcgttgaaagggacgaagcctttcgaggagcgtggacgctttgagttgtggaggatgtctgccaggccgaagcggcgtcgtttgagaaggaaggatgaggaggtgaaagtgaagactctgaggattgtaggatccgacctagatcagaccctcgccagccaccatgttcgtttccccatatccgcctgagagcctcgaaacaggattcaaccggccaatcagtcgtatcggttgacgatagccctgcgttcaagatgatggccgggttgatcatcgaaatttgacagagatgtcgttcgagactggaaggcaggaattgacataaggtttcaaagagcatgaagaacgggtttgacgaatcagatgggatgtctatctccatcgactccatcatggctggctcgtcagaagaggaagatgtatagaccgggtgaccaggaggtgatgttacgggtgatgagcgagcaggcgcttgaacgcgagccggaagagtcaagccggaagacgtgaaaatgtctgccaagaatgtggtcgggtctcgagataggctagaagtgttggtagtttctaggccgttcatctctgccttgagcgctaaattgatatcttgtgtccagaggatcagccgaagggtaccatcgagagaccttaacgccgactggaggatccgatcatcattcgttacagactgagagaagcgcagacaggtaggcatgcaggcgggcagacgagcgggcgaataacaggcaagttgagcgagagaacatgacttaggttagcaagtttggatctcctttactgactggatcaattgttctgtcaagctctaaatcgcctctgattagtcctataccgattgattctgttcgttcggcccgtttcacatccaaaagccaacggttagctctctgggcaagatatcctacggtgatggcatgggtcgatctatctgtgccgggttgtccgggtatacgagactgctgaaccagcttggtcgaagacttgagaccgtccagctcgcgcaagactgcgaacgggatgaggaacgagatgggcgagggctcggccggatacatggtgagcacgagatgatggacggaccggaggagcggtagctgagaaaggatcactgcatatcgaaggatgaaagagagcccagatcaagctgagtgtcagagcatcgaaggattgaagagaacagcgaagatagcatgctcaaaagagccggacggaccgttggtgtccagacataacacgatgtaaggtttctagaagggtgaccaaacgttcatacatgctcagtgcgccggaatctcggagatgaaacaaagaaatggagaacagaatggcatgctacctgatgatggtcgtgggattttataccccagtcgtcctgataccaaccatgagacaatgcagtccgctgctcgcattccttatggagtgatgatggagaccaagcatcctctgtgacggtccattcgatgtccattccgaggtcgagctcgaggaactcttcatctttgccgtctacggagattatgactgggacatcgtgtgtagctgagaaaggagaggtgacagggtgtgtgaatgcgtatgccatgtgtgtgtgtgtgtgtgtgtgtgtgtgtgtgtgtgtgtgtgtgtgtgtgtgtg

SEQ ID NO: 1186 - DNA, 6361 bp, Xanthophyllomyces dendrorhous
tgtgtgtgtgtgtgtttgttgtgctctatcttcttgtcgtcgtcgtctgatggtgataacgtcaaaggtcaaaagaattctgacgtaaacgcgcgaacgtcatcaatctctttttttgtttcttcccttgccgactcttccttctcttgtcttgttgccaccaccatcgttaatcgataaacagctatagagaacataatgtcagagacagtcatcagatccatcactcccgccattagtatcttttccgttcccttcaagcggttcggtttgatgaagatgtaggcgttttttcttttcttttttttcgcctttccattctccgtctctctttccgataactaaatggatctcgtttcctttcttctcacgatcgatcggaccaaaaaaccacttccgacagtggtggaaggagcacagcggtcaagcttgcgaacaatgacattttcatcatcccatcctctcctcttggagaagatgtcaaggccgagatcgctcggctcggaggacaggtcaagtaagtcccaatgaaattcgatcgtgtgggtcggacatgggtactgacctcttagtctggttcgattttcttcctggtcttcaaaagatatctggtagctcctgactttgagttagtgatccgtcgtgtctcgtgttttctgctttgttctttcttgcgcgggtcaacggatgaatccatatgctgacaccgggattggctttcccgtttgtctatagacacaccatgttcaccaaggtttactccaaggagtacccgtccgcgctctgcattggaccagagggtgtagacacaaagattccagaggtcaaatgggccgggacgtacaagacgaacggactggctggggccgatgagaaattcggatacgaagacgagatcgagacctgctactgttagtttccgctctctgatctctttttcctgaaaatgagaagaaaggtctgctttgaggtcgacctgtctgacgatctctcatctttgcactgtcgatcccttccgtcttcatccacaccttacagtcaagagccacgccaacaaggatatcgcgttcctccacaaaccgtccaagacgctgatcgaagccgatctgctgttcaacctgccttgtcccgagcagggtattcctgcgggtggcctgtttggtttcatgaacatctcgcccggaggtgcagcccatcgaggggtggtctcgatggtctcttctgccgacaaaaagctttacggtcagtctgcagccatcgttgccggctgggatttcgacaggatcatcccttgtcacggagccgtcatcgagaccggaggaaaggaggcctgggtttctaccaacaagaacgtcatcgatgccgcttccgcttgagaggcgaaccgttttttgcttctttttttttgtttcttttccttttccctttgtccttgtacagggtaagagtttcatcgcgtcaagggttgaagaggtgagagctaggagggtgggagttacgattttttttcttctttttgtttggttccctcttctttcttgtgcgtgttgtgtatactctagttcttatgcgatgtatcgtttgttgcatctgtctctatcgacctcgatatgttcttcccgtggacgcagtgaaagggtcccgtgaagggtcgttccttgctcttttgctcttatgctccatatccagctcgagatgaaagaaaaagaaatccaaacgaacgatatgccgtttttaaggggaaaaacagggtagtttcttttgtataagaacggttcgtgatgaaccgattcggcggtagcgaggggaaaaaaaagaacaacaaagggggagaagaaagtgagaaggaagaaaaagaaacatgacaagagggttggaagtaagacgaggaaagaggataaacggtcgtagccgagtgaaagaagagtgagggaggaaagcgccctgcgcctagcgtgatgtcaaacgaaggaacaggaggaggagcaagggccaacgatggggaggaaaacaagttttagtttaaagattttacttgattcgggagaggatggcctcggtgaactcggtggtcgaagcctttcctccgagatcaccggtgatggtctttccctcggcgatcgtgctgagcacggcgttctcaatgttctgagcgaccgagtcaagcgacatgtgtcgaagcatcatcaacgacgagaggagcaaagccgaagggttcgccttgttctgcccctcgatatcaggagccgatccgtggacggcctcgaagatggaggcatcccgaccgatgtttccggaaggagtcaaaccaagacctccgataagaccggcggccatgtcggaaagaatgtctccgtacaagttgggggaaacgagcacggtgttggagaagggagcagggtcctggaccatctgtgatagaccaaaagtcaagcgcgacagggcgatgggatcagacggtctgttcttggatgtgcggtagacgagagcagaaaagaagaagaaacgcgtccgtcgataagaacacaggcacacgtactcggaggcagactcggtcgaggagatcctcatcgtaagcgacatcggggtagtccttggcaacctctcggcaggcctggaggaacataccatcggacatcttcctgtagatggtccagatcagaaacaatagagagcgtcagaccgtgtatcccttgggtcacggtggtagagaagaacagtcaaagacacgcacataacggtggccttgtggacggcggtgactcggtttcgaccgcagaccttggcgtagtggaaggcgtatcgagcgactcgctcagaggcctcgtgggtgataagcttgatggactggacgacaccggggacgagctcgtgctcgattccagagtactctccctcggtgttctctcggatgaggacggagttgacgttgtcgtacgcggtcttgtaaccctcgatggacacacagggtcggacgttggcgaaaaggttgaaagtccgtcggagggtcaagttgagggagacgtgtccctttccgactaggtgaagtgagatgtagcagagagagagagaaaaggaaagaggttcgaattccggacttgtcagcaacacctcaaagccgtgtacatgtatgcatcagagacgaaccaggagtggcgagaggtcctgggtatcacaaagaaacatatacaacattcaggttagggacgtgatccgatccgatccgatccaatccaatcgaaaagaggcagaggcaaagaaactcacccttcaaggcaacggtgttcttcttgatggacttgatggccttctcggggatgacggactttccgttgacgatgatcgggttaacctcgacctcctcccactcgatgggagcctgagaggatgagagagcgagagcgagcgatgatcagcaagagaaacgtaagggaaagaaagtagcaagggagagcaccgaccttggcagccttgaagatctgcttaacagactcggcgatctcgggtccgatacctgaaaagaggaacgatgtgagtttctagtgacctaagaacggttcagacaaagaacgacacctaccatctccaggaatcaaggtgacggtgtagtttccctagaagagaaggaatcgcaagagaaaagaaagagaaaaaacccgtgtcagttggattgtgaatcccaattgatgtagttcatgaacacagttgcttaccctgtcgttcttcttggcagcgaacacactggtgggagctccctgaacggtggccgagttgaaggcggtagcgtatcctcgggcagggatctagaggatgtaggtgaatgtgacaaaagcagaagcgttcagtcattgtctcatcatgctggtcagatggagaggctgcagagaaaaaaggcgaggaaaagatcctgattcaaacaatttttgtcaaaaaaaatattcctgaaaaccccaaccaacactcacagcagagaacctggcggcggtgttgaagatagatcgggaaagcatgacagagagagtgggtgagagagagagtgggatgaagagggtggtagtcgaacggggagatggatggatgggaggaaaaaaaaggcgcgcccaaggcggagaaaaataaaaacgaaaaataaaataaaataaaaattaaaacggcttaaacaccagcacagatgagatctctccgatgagacccgatgcgattttagatctggtctgtggaacgacagagggcgcatatatccatctgaattacacagaaatcttcggttgaatctcctctttcgactggtggtagttgaacctgctgaaacggtctgtgaaggatacgggagcgcatatagtcagtccggtttctggatcccacacacggaggacgacagaaatgtgcggtcaatttcgcgccggattttttcctcctttttttctttttttctttttttcttttcttttcatcctcatcacttccatcctccatcccatccctcatcccatccttcatcctcactccatcctcactcgccatgttcagagcctccctccgacagaccacctcggtcgcatctgccttccagaaggctaccttggtgggtgctgatttttaagagatttttctcggtcgatagagtgatttctcttctactcatcaagctgatgagatggtcttgatgggtctttttttttttcttttcttttttcccttcctctttcctctgttctttcctgctcttctctgctccttcctgttctctctcgtcgttctctctagccctcggtcactcgatcgtacgccacccttccctcggtcacctcccgagtatgtcatttgttcttatcctctttggaccgcgtatgcctcttagtttcgagaaatacagactgatcggtacacgactccttcttctttctctcctcgtccattaaagggacccgccaagtacggaggagtctacactgtgagtgtagcgacgctcgtccaactttgtctgattttgagtacatacagcttacctcgatctcgcttcgcccacacaggtcaccctcatccccggagacggtgtcggacccgagatcaccgactctgtgaaggagatcttctcgcacatcaacgctcccgtcgagttcgaccagtacaacgtgtctggagagaccggtggtgatgagactcttttcaagcaggccatggagtccctcaagaggaacaaggtcggactcaagggaactttgaccaccaacgttggacccggagagcacaactcgtggaacattgccatgcgacaaaagctcgacatctacgcctccgtcgttgtctgcaagtcccttcccggtctcaagaccagacatgacaatgtcgactttgccatcatccgagagaacactgagggagagtacgccggactcgagcaccagtcctacccgggtgtcgtcgagagcttgaaggtctcgacaaagtacaagatcgagcgaatcgcccgattcgcctttgactttgccgtcaagaacggccgaaagaaggtcacctgtgtccacaaggcaaacatcatgaagcttggagacggtctcttcctccgaacttgccaggaggtcgccaaggagtacgagtctgccggtatcaagtttgagcagatgatcgtcgacaacacgtccatgcagcttgtcgccaagcccggacagttcgacaccgtgctccttcccaacttgtacggtaacatcgtgtccaacatcggtgccgccctcgtcggtggaccgggtgtcgtccctggatgcaacatcggtcgagagtttgccttgttcgagcccggttgccgacacgtcgccaaggacatcatgggcaagaacgtcgccaacccgacggccatgattctctccgcctcgttgatgctccgacaccttggtctcggagatcaggccaacagcgtcgccaccgccgtctacgacgtcatcaaggacggaaagatccgaactggtgacatgggtggaaacgcctccaccaaggagttcacccaggccatcatctccaagatcgactccaaccgagcttaaatctaatctgatttcgttcaagggttctttctctctctatctctccttccttctcttctttcatttcccgtaatcccttcgatcaactcatcattttatgtagacgggatctttttcttttcattattattgttgttgtttcctctcttatatccttcctttccttttccttccgatgggttcatgttccgcccttctgccttctacctaccatctttcctctccctcaccaatcctcccccatttccttcccttttttttccacgctcgaccttttacctcgatctggagacccaaaactcattcggaaggctcgcttc

SEQ ID NO: 1187 - DNA, 519 bp, Xanthophyllomyces dendrorhous
acaaagcgcaaaacaaagagtagaagaaaaggatgtgtggccaaactctgatgtttcatcttgaatctttttttaaaaagcataacatatttcatctctaatccctgatggccgttccaactcactcgggtaccttctcccctcccttttttttcttttctttctccccctcttgtcctggtgaactagaacgatgatgatgacgacgactgaatctgcatctgatgaggctgacctcctggccactcgaccacatcactcacatccatctctctcacctggttatcgtcatcgtcaaacgtcaccagatatttagccaaaccggtaggtttcgccttgaccgatccccggacgacagctttgtagaaggaagtcgtatcgggaaagatggccatgacgaacgagccgaccggatggggcgcgtacgcgttcggatgggatggatggttggcaggcaccgtcgggtcgggtagagggatcaacgtcttgaacgtcgtgttcgtcagactttgaggaggg

SEQ ID NO: 1188 - DNA, 19973 bp, Xanthophyllomyces dendrorhous
tatatatataacgagaagaggaactcacgaggcgtcgtctacatcttggacttcatatctgtttgaaaaagagacatgatggcacaggaagaacaagaacaagaaaagaaaaggaagagaccgaaaaaacagacccgttagaatgctaactgagaggtgatgaaaggacaagcagagccagcgagctctaccgaccagccagtcaaggaaaaaaaaagacaagcagagacaaagaaaacaagggtctacccaccgattggtatcctgatgtaagcacctcttgacgacggccagaatccaaccctcgccttcatcgggttcatccgtcctgtcggcagccgacacacccgccggtttttgatgcatcttgaaagcaaccctcctaccgggtgtcagcggtaattgtgccgcatatgtctgtttgcgctctcgagaatcacgtttcgaaaatggaacaggatgactggccggaatccgaggatgtgtcgacgtagaaccggtcgaatcaacagaagaagaggatgaagaaagatgatagtttgagccggcggtagatgtactcgggttaccgccggtcaaatcggcgttggcggcagcagcagtagatgtattggagagatttggaggttgaggagattgatgggttgatttcgtctttaactttgaggaaaagtgggacactccggtcgacggtggggattctgttcgaagggcaagcaggatggacaatgattctgcggccgattcataaattctagattgatttcccccaacccaaagcaacacatgcacagaatcatcagtccagttcacaaaggtttcttcctcgtccttccttgacaatagaagaaaagaagggaaggaaagggggaagaagaaagagaaagagaggagcatctcggacgtactgaagctcatgtctcgctatcctttcttcctcctccaactttctcaatgctagatccctcgatgctctcggaatttctgaatctgttcctccttcgtccatgatggcctgaaaccttttgtgcgccgagaagtcctgttgagctggtagagcccggagagtgctcacaatttgactccataggctcgcgactaggtttgtaaaaacgcatgtacatcatcaagttagaattttgtgaaagtcttgaaagatcaaatccgacgggctcacgttgttggttatctgacggacgactatttcgatttgatctgctcatagggcgaaacagtgaaaggagagaggacctgtatagcactaacaagaacgacggctgttgatcaagaaggcaaagaatagacaagaggacgactaaaatattggatgataatgatggtgatgatgatgatagttcggatggaggtgatgaccgttatcagttcggtgtgccatcagattacgcggcagcttgtagatcactcattgacccatccttttatttggcctgacaaacctatacatatgatcgactataccataatcaaccactcaataaggagcaggatgagcagagatatgggaggatacgaaagaaatgtaaagcagagagaacagagaatatatcataaatggatggaggaaaaattgttcaaatatcgcacgcgcttcccaacaaaataactaaagcctaagaaaagcaagatgctatcaacatggtagagaagaggcaagccgtcgcgaaagagagatttctggaaagaaaagagggagtgtacagaacagcgaacgatatttgtacatgtggcatgcggatcaagacgttgagagccagagggtaagacatggaatcatatgaaaatacaaaaaggaactggaagaagtcgaagacagaagggtatatagaatgagagtgatcgaaagcgagaacaagaagtatagcccacggcgggcaaaggatacattaatggttgatgtcagcaatagagagagctgccataccagagcatccacacaaaacgcatccacacacatgcacgataaccaaaaacaagtagatgttagcaaagcgaacatcatcctaaataaaagtagataacatgtccttacagcttctccttcgtctcacaacccgggtcttttctgcaagcctcgacagtacaccggttttcgtgctggatgtcacattcagacctgttgacgctcctgcagatggtccggcgaacgagcgtttcgttccgagcgaaaacgttggaagcttagaattaggagaactaccgaccgtagcggcagaagctttcgacagtgatccactccgtggagtaggagacccagggagcttccgttctatcactacgcttcgggttactctcgactctgtagcaggcacgaccttcggtctcgatcttgacactggtactgcgatcctcgagctcgacgccgcggcaactcgtcggcgcgcacgctcttccaccgatgccgggttggactttttgctgggactcgaaggaggtagcgtaattgggattgaaccgttcgttcggttgatgggttgtcgagtgggtgaaccaacaagtggccccactgatgctggcttcatccgttgagatctgtacggatcaggtggaagtcgacccagcggatcgtcatccatatcttcctccagagcggtcgctgtacgtttagcaagaggcgtctgcagagagaacaatcgagacgtcaaacacaaatgaagaggcatagttaacatcgagggaaaaaagctgttggagtttattgctatacaagaggaggctgtacctttcgaggttgaagaggcgggctaatgttatctgctgttcttgcatgtcgacaaggggtcacgttcggtaaattgtgcaaaggccttcgatcaccatcagaagagtttggctcattcggcggtgtcagtgtcctggaaacattggcgagcgcggatgaggcacgttcggaagcctggtaggcagctaccgctgcgtccgcggcagcccatttgacccaggtaaggtgatttaggaggatgtattgttgttggggctaaaagataattacacgatggatgaatggggttagatcctctcggtcttggatgaactctttatgatatggaaaatcttctaagaataagatagaacttactcccacgaccatgccaggctgcaagaatggaaacgttagattcaggtcagtttgcccacagttgaacgagagaatcttgacacaaccaatggacttactcggcagattctcatgaacccaattgcttctgtagccgtaaagtcgtgtcgatagaccaaccaagctgcgatcaagcatcctgtacgaccaagccctgccttgcagtggatcttttagtaatgacaaagagaatcagagatccgcgcaagagagtatattcaaacgaatataagaaagctggttcttcacttactgcaatgacacccccagcagatatctaaacaagtaacgacaacactcatgatcaactcgtgctgtctgacacaagagcagcgaggagataggaactaaatatgggatttagaaaagcagaactaaccactctgtcggcgtctttcagaaattcccgaaccatctgttcaggcgggttcgttccgtcgtcaaaatctacagaacataatgattcacaaaactcagtcgaacgccgacagtttggatgaccaaacaacttatgcatgcacaaagctgaacatacacatatccttgaattccattcctctcgactcgaaatcttgcttatcataaagagggttgttcaatcgaaccactagctttacattgtggtcggcgaagtagttcaacacgttggtgtaagcgcgggccagcttcttggtaggaaaggaggaaactgatttcggatcagtcaaagaccgaacgtagttgttgtctgtctccaacaaaaaagaaagggtcagcgaagactcgtttcaaagaacgaatgattgacaccgaccttggggagaagcgaatgctatgaaatctttggaaacatgattgaagtctccattttggacttgctcatagtatagatactcttcttcattgaagtcgtctatttgatgatacaatcaagtaagtctaagcgaagtttgttgagcaagctcttgtcgaagtactagtcctcacctagtctaagcagcccggcgttgagagctttccaaacgccataaaggcagtcctgaaatacatggtacagtcagtaaggttccatgagcatagccgagtgataagatcgcctacttgaatgctgagattaaaatctcctggtcctcggccagcgtctcgaaaaggcatgaactctagatgagctattgggtgaaaggcctcccacgggttcttccgattcaccatcatctgttgaaaatgaaggtgatcaagagtaagtttatacatatcgaaggatttgattgcatcgcgatcaaggagaaaaaaggaccgacgacatagagagccattaataaagccgcgttggccttctttgtaggctctgtggacgtgtagagaacgacgctgaattctccaaaggcgggatcctaccagatagtaacaataattggtcatccttccatcgaccattgcgttgccgccttgtcgtaatattcaatagcggctgaagaattccgacatgttaatgatacgtacttgcatgatctcgtgaatgtcttgaatcgagaagaggattggttgaagcatcatcagatcgtcgacacgctatatctattaatgatacgcaagataatgatcgattcaatactcacgaacgcagaaccggaaaaccattgccaggttgagactagaatatcccgtaatcaacccaaggagaatatgaaggaagacaagagacagccattgtacgggtccacattgagaaggtcagcgagacgacgacgactgacccatgacccaatgcacacacttgataggcaactcagactcacggcccaaaatcctttccagaaaagctctgatagataaactcttcatccacacataaccaatgcatcttcgatctatccttcttattcttcacacccgagtctcttgcagtgtttcctatgctctcggtagcttcagcctctttttcatcctcactactgctaggtggaggagatgatgtctgggcgccttcggcaattgaaccggcggcaaacttggttgattgtctagttctgtgataagtcgatgatgacgccgacgtttgattcaaagacaactgggatggaacaggagaagggaacgtagtgaaaaacagcctaaaagacgaggatatgcaagaaccgtctggtcagaatatacttctctcaatcggttctgatcaaggtccggtccgagagatataaaatgatgaaggaaagagacgagaccaactgacctatcgtcgaaccggatgagtttcgaggcagccatgattgtccacacaggaacgaagacgagcaagagacaacttgggaggccaaatgttgtctttagaaagatgacagactgattgtcagactagctatctagttggccagttggtatgaacgatgaggcggatacagacgacggtgctgggaaagagttgttgggtggatctttcagcgaacacgccgcgcagtagatccaaacgactgcctattcctctcaagcatgcacgcgcacgcacacacagcccattctggagaaacacacggtagtcaacacgcagatcaaacatgacacatacatacattcctcatagatagatagatccaaaaccgaaataaagagcgacagtatatatagagagagcgcatccatcaaggacgacgatgagagagaaaacatacaaaagaatattagaagagaattgtagagtaaagacggaagagagcgttcagatagagagagaaagaaggaatagtcatcgagcaagctctacatcctgaagaggaaggagagatcctcctgcgtcctgtattacccaaacaagtatcgtcagtctctcggtgacatctagactcgtacagacaacaatgcgaacactgacagtttacccatggcagacgcatcagggttcaaagtagcttctgtcatggcgagctggataacacaatgcgaagaaagatcagctgagcgcccctcgtcttcttctaccacggatacagaaatggcaaggctaacttttttctcctgcaattggctgaaaagcggggttaaaattaaatacggatgatcatcagtctacttcaactttaggacactgaaaaaggcattatgagatcgaaactcacatgattttggactcgatcgaatcttctacggcgaacttggtacatattacaggccgatgctgacccaatcgatggattcgatccatggcttgatatctaccagcaacgcgtcaaagagcccataagcgttttgcacagaacgttgagcgaaatattcttttgccgaatgataaggaaattctcaacactcactcaactattggccggaaagataaacgaaatgaattaaaatcgatatcagtggttacgttatattgtcgtaaagagccagtgcaaaacatatcacgcactagcagggttccaccaactggaccgataaagagcggaacagcctcccatatcagtaactgtttttaatgaagcacatgaatgacaaacacttacctgtccatcatgaaaaccctagatgctgcggtgaggttcaaagcaactgaaggtggcatttggcagtcagcaatcttcatattgcgatcatgtcggatacaagacggatgcacttacctcctccagccttgagggagatcaggaagatggtgacgtcaggagattcaatgaaccggtcaattgttgcagctcgtgcctccatcgacataccacctgttcattcgccagaagatcagcatcggttcagaacgtcgctctctcaaaaaatgatatttatcaagatcaaagacataccttccaaccgacagactttgaatcctgcacgcttcagacggaaggcgataatgtccaagaacgacacaaactgtgaaaagaccagactcttggtcgtcacgtcgtcggcccgaagtttcgataactcttcaataagcgcctcgacctttgtactagagcgccatttctatcagataccaggatgtgtcttgttagtttatcgaaccaagcaaccaatgaccagcaaaaagaaggaaatctgaaccaacctccacatctagacgacctaggattccctgacgagcacgtcgaaccttttcttcgtcctgctccagaggctcggcctccagatctatcgtcaatgtggcattgcacacaggacaaggtgcctaaaccatgaaccccaacgaatataatgtcagttgggttatgcaccgaggttgtgcaaaaaagtaaatacgaaccttgctttctccatagcctaaaaggaaatttctaatacacgctcggtcgaaacagtgggaacatttagacataatcacgtcctcgccgacctcgttgcagagtcgacagagcgtagctgcaaaggatgaggagagagacaatgaagttgagtaaaccaggcaaataagaaaattctcaagaggtgctgtaaaccttactttctcctagatcctctatgtacgtagcagtttttgatcttaatacaagatctgggtggcaagccaattgtcgcattctcgtgataagcgagaaaatattggaatctagaagtgatacagaaaaacaaaatattaagatgctatccatctaggtacaatgagcaagacgaagcgacatacagttgttcagaacagttccagaatcaacataagtcgtgaactgcctctttgcatctgagaagagcgagagatacagctccctttcctctggggagaagaagtctcgacgaacgagcaatgttcgaggagggagcccgagatcatcggctcgctccaactgttttaatttgaatggcatggtgaacaaagagggttaaattatgacgataaaggttcaagtaacacaccttggttcgacgaagcatcattcgatctagtaataactgatgattgaatgacacaaaaattaagtcacgagttcgacgatacaacaaaaggacacaaagcctgccaaccttaagcttcttccatgcgtgctttccttcgccgattgtggtaccatatttgacaataggattcaagatttcgttctaaacgtgagaaacgcatatgcgatgtcaacagagggacccacaaaatactaaggtatgtatgtatgactcacattccatagacactatgtgaaagacatcacacaaaaaaagggcatatgagctagtttcaaacatacagatggtctgtttggagacttacaacgtgctgcatagggttatgtccgcattcgtcgcagtgccgtctgtcttggaaactccagtgcagcgactgtgacacccggatgaaatcaggatctaaagccgaacaggacgactgatactctcaggttgtaggtttttttatttaactcaccttgcacgggcactttttacagaagtagaaagagtatgctacgcaagagagagttatttagcctcaggtcttggtctgctataagatcatcggacataactcacgatcacccccaaggaacctgattaatgagtaaagctctcccacacggttctgtcagttatagatgagaaagagatcacactatcaacactattcacgaattgacaatgcagaaagaagccatagaaacaaacctgaagaggagtccccgagagacaccatttgtatgaagcacttgatttatagtaaatcaaagagtaagttgagaattaatcaatcagcagagagcctttgaccgtttgtagagttttaatggggttctcactcgagggcgaaacaagctttggctacgttggtcgttcgatccttgatgttgtgcgcttcgtccagctgcaaaggtaaatttggtcagattctggccgcctttggatatgacgatacagcgcttgcactcacgatgatcctccaccatttgaccatgtgcaacaaacttttgcatatcgaaaaacaaagttagaggcataaaaataaggtgttagcaaatctatggcattgtgccaccacctactagatcagatattcactaacctcttctctttgacaatttgtgagtttcttttgaagcctttctcctgcttagtataaccagactgcagcgtcccaaaactgaaacaaacaaaaacagcgaatattagattcctacagcccaatccacatcctcgggttgtatagatgcgaacgccaagcgaggggcaaactgacctggtaagaatgacatcatatttcttgagctctgcgactcctttgtcgctggactttgctcgggtcgttccatggtagatcatcactttaagaccctgagagaaagcaagaaaaaatgcaagcaaaataagagtttatcaaccatctctttagaagatcgaccgggacttacatccgtgtgcgtctcaatttcactcttccattgcttcagcgcaacgacgggtctatgtacaaacgcacgaaaacatcagtcgactatagattggtctactagggggatataaacgtacgccactaccatgcaaggcatgtctctctctttgtggtcgctgagaagcaacgcgatggtttggatggtctggagaattaatcatatttgtaacagttgtggacctgatgttcagctcccgaaagatctttaaccgaatcgaggtggagagtacttactttacccatacccatttcatcggccagcattccccctctccagattcccttttcctgttccttcatccaatatagactttctttctggaacggaagcaactggagacgcaagccaggagggggaggaatctggatgggttttatgatcggaatttctgattcgagatcgccccacaaggttcgcagctcaggatgatactcccatagcgcgatctgattcttttccccctgagtgagttttctccccacccgcttcttcatcgcagcctgctgcttgataacgctagcttgctcaatctgcccaattttcttgacgagcgatccgagcttctttcgaatggtcgtactaccctctgttttgttcaactccaacaattgaacatactctttctgcatctccgctaacctcatgctgtctgatccagtctccgcctggtactcaaaattgtcctcatccgaagatccatccggatctgagacactagaggaaaggttctcgtcgccatcattggccttgcctttgcctttgcctttgtatctatgagcgggcttccgtttagagacagcctttgcttgcttgacgtcctgtgaaaggctgagagaagcggccatttcggcatccatgtcgatgttgtagcctggaccagatccagacgcgagggcattcatccgagcttgggcggcgtctgctctctgagcagcatttcgagaaagctaaacacacgtatggacaaagatgacggtcagacaccgcgagtactgctaaagaagagaaatacataccagaagagcagcgacaagtgcttcatcttcctcttcttctttttcagcgacatcagaatctactgcaaaatcgctatcatcatcctcgtctgaagtaggaggaatgtcaagatcggaggaaccaattacattgcgaattggtgtctttcccttagccaaacgcttctttgaaggatccaaacctgtctttctacggcgggacatctaatttcgatcaaccgcaatatcagcataaagatctgcgccgggaacgaagagaattcgacgaaaaagtagaccaaccggcacatcactattctcttcgtctgtctcagaaggaacccggtggttggtttcattttttgcagctcgagccggtcgagagagagcctacaaatgttaggaatcaactcatctatttagtatgtaccttgatattctcaagtggatgaaaatgaaaaacaacccctactgatataagaggagaggacaaaccagagggacatcgtcgtcttcttcctcctcaagctcttgcttgatagacagagaatgcttcagcgacagtgttgcggatttctttgccggagagaaatagctctgtggcttcataataagctgatgagaagtatattcggaaagagcgttaagtatgttcaagctacaagccaagattaaaatcaagacggacctcatcatcactctggtccattgcaccagtatactccaacggtgtctcgccttcttcttctttggtcaaaggttcgtccttctcttcctcctcctttcccttaggaagggacaaaaccggacgctcagtttgagacaaatcaagaggctagaatagcaggacgtcggcttcgaaatgagtggccgcgatgcgaaggtgatacatagatactcaaaacagtcactaaccttgataggtaccttgggcctcatcctagaagtgacagccggctttgcaaccactccaacattctgcatgatttctctccttttcaaaggaagtctgccactaccgtcggcctcagacaccattcgttcttttgaactggttggtgtgagcttggttggtcgtgaaggcgcgctatctaggtcgtctgaatctaagtcagagtctgatagaaattaaacaaacaaaaagataagaaggaagaaagaaacagacggctgagtctgttagtaataaggccgcttccagaaccctagaagccaggcaccagctaaagagcaagagaccaaccatcagacacttttcttttatggctcttctgagatatggtcactgtgctcccgacgctattcaatcgactggaccttctagtttctggaggagtgggcaaagccttggcgatcattgaggctggtgttctgaccgatcgccgaacgatagggtcggggatgaacggcggaggctctgaatctgggacggtgctaagggatcgtgtggagtcaggggaatagtcgcctacgaagtacaagagaggatatgtcaaattttgtgcacatataacctgaataatgaaacttggagagcaacctaagccaaaacgagggcttaccttgaatggaatgaggattggagctcgaaataacgatgatatcttgattgatagtggtggcggcgccgccggcggcggtagcagcagcagcggctgctcttcttggaggcatgatccgaaagatttccttttgtttttcctgaagaatatagaataagaaaagactgaagagagaaagttaaagagggagagacagacgcttcaaaagaaagaacgatccaaaagaggcaaaggctggatgaacgaggagaaaaagagagaaggtgaggcaagaaccgattcgccacacgattaacgcgaggcgggcatagccgaccctgaccggatacgtcacgtgtttaattcatttatctttcgacgcgtcgcgcgtcgcgcgtctcaaacacgtgtgaggcaagttagggttactaaccccaagttcgtatttccgttatgatcatcctcttcggatgatgcttgctttttttgttgctcgaacacaacaataatcttacaaccctcgatgtaagtgcatattataggttgctacatgggtcgagtcatacccgatattgacaacagaaagctcctgcaacctatacatctttaggtctactcagatcgataagcctagaggaagcgtggctagtttgttggaaaagttttcacaggcggatgaatcctccaaacaagccaagattcgagatgaacgaatgagttctgttcggacatcagttggaaagagagtgtccgatcgagtctcctctggaccatggacatcgtcgtcgtcatcatcatcaacaattttgacttttaatggagcctgccgacccagtttgaacgacaacaacatcctgccggcgcaatcgggccctgagccgaagaagcccctgaaggattggctatcggtttcatctgtggttacaggtagaaagagtcctggcgaagtaatcagtgtcgatttagaaaggatctggggagcaaagcttgctggagttcgagcagaagacttggaggagaagtcactttcggatcagcagccggttccttcggtggaagtcatcaagccttcctcccctcctcgtcctcggcaggatcaaatcaagacggatccatacaccatagactctgaatccatcaagcttagtccacccttgaatccacccagcgcacaaagccaatcagctattccgaacccagcccctagtccaccaattatggccaagtacactgttgatgagccacccctatcggtgacttccgatcagatcgctagtccggctgtcaatatttcaaagaaatccgagacattctgtgagcccaaagcgttgcctaggttggcttccgccaagacgacttcatcgagacctatccgtgctaccgaggcacattctaaaaacggtcgtgactccgtaagcgtagcgcacttgcctaaaaagatttctgcttcaccagcagatttgactccaccgcgcaagtctcgttcacactcgactccatctaaagcagaggcttctttgtcaagacctcgaacgtctacagcagagcgacccctggccaatgctcattcccaacgtccaggaaatgtaacctctgtccgaaagactaccactcctcaagcaaccactcccagaacgaccatccttgcgccgacttcccgcctgtactcaccaacagcatcctcgctagccaaagcgaagagtcctggtctctcatcttcctcttcgtcaacggcgaccattcaaaaatcgcctctctccggctcaagaacttctttgcatggagagtctaagacagctgattcgccctctgtatcttctcgatctatcagaactagtcctatcgggtcagcatcgaaggctgtctcgattccggctgaacagttgggacgagtgaagagtattccctccagtctcaaatacacctccaaacatccttccgttagaccctcaatgacatcctccggaaaagcacttcgcccgtctcagtcgtcgccaatcatcaagtcgccggctcagaaacaatcttcaacatcggctgccgtttctcgaaagcgagcttctccaaagcctgaaactttgaacgtgaaggtgcaaccgatggccgagcgagacgcctccgaagacattacggaagtgggtgtggttgaggtagctaagaatgatgctcttgttggtcaagagatcgagactgaggtcaatgctgaggccagtcagacagaaatacgacaggtataggcggaaaagagccaaaggtcgtcttggtccagtgactgtacttgtctagataagtggagattatgagaccgaaccatggggtttctccttcaccactctttcgtactctttgcatttgttcctattattccctattgttccgtttttttttattctttcttgctcagttcagtgtaaatttaatcctctcttctactccttctaaccatttggatcggtctggtccttcttgcattcagcgttcgtcctttcggggttcgttccacatccacagtcttttatgaccttgtttctgtgttttttcctcgcttctcttcaggttcttatgaatatgcatatatagtttgtcactatggtttgttcgacggacatgccatgttgtgttgatcccggttacgatttcctcacatcatctccacggttctaatttcgccgagaaccgaagagtagcttaagaaagatataaatacaatgctttcttcccacttccatctcttcaccatccatcttcgccatatctcgatacaacatgtcttttgtgagttccaatttgtccaagtctatccttccgacaaaatatcagccttataaatctgtgtttaaataatagatcgcctcagaactagccgagcaggagaaatctctcgtcctttcttcctttgactccaatgtcgcgttcgaaattggaactcgaattagatcgcatatccagtcgaccttccccaacaagccacaggtcatcattcaaataactgccgacacatccacccagctctatttctttgcgacagtcggacagggaacattaccggataatgcccattgggccgagagaaaacgaaaatctgtgaggagatcgtagctactttacgcatttcctaccttttctgatatcagagacctctctatgttgatcatatggcctaatacatccgttcgaacgccgttgtcacaccaaatgaacgtggggctttctcgtctgtatcataggtctgtcgatggaagacgagcactgccagtttgaggattaagtacaaggacggcatgcctgaaaagtacgggacgttcgaggccgaggtaggtactatatcctaaacaaactcttatgattgtttcggtttctatggggtctttaaaaaagttctgaaattccttgatcccctctgtcccgtccagtacgctacgcatggaggaggatgtaagtttgtcatctgtcctctctttggttctcgcgttggaagaaacatccccttcctttgaaatgaagaaaacccctactgacctatcaacacttccttacttcttattctctcaaactcaccactctatccttttatatatagtccctttgagagtgaagggtgtagagccactcgtcggagttgtcatcgtgagcggacttgctcaggaggaagaccatcagtcgatcgtggacgtgttgaggaagtacattgaagaagaacagaagaccgctttatcttagatcctagattccgctttgacaaagctctggctcatcttctgtcgtttgtaaaactctcgatgactttgaacatgattggaaaaaaaagtcaatatgaaaaatgagacaagggttgggacgtgaaagccaaagggaagttcgggccggtgagccgaagaggagtgaaatcctcataaaggatatcttgaccgaccatccatcctctcttcacttttcctcctcctcttttcaagatccacactcagaacacacccttagaaacaagtttaaaacatctaagaacatgtctacagatccccgcgttatcattgtcaccggtgcctcttctggttcgtcgttcatctgactttgctcccttcctcgtttcttatcatctagatttctttatctcgacaagaagaaagtctcttagagctatctcggaggctgatagtattcattcctatccattctccgttttccactcacgaaatataggtatcggcagagctacatccatcgcgctctccaaagcaggattccaagttgtcctagttggaagacgtcaggaagaattagaggtcacgaaagaatcatgccccgagaaatcagtaattgtagcggccgacgtgtcgtctgaggagggagtcaaattggttttcaagaagagcgtagaagcttttggtatgtatttacatctttctttcacgtatgcgtgcatgtgtgtgtgttttgtcttagagagaccataacaactaataagagctgctggttggaaacattcggtgctctaggtcgagtggatgcaatcttcaacgtacgctcacctcttgcttatcttcttccaactcaaaatcaaagattctgatcccgaaattctttgcatttattcagaacgccggatgtgatagcagcaagcacattatagaagatcttcccctatcagaattcgataaggtctttgcgcttaacgtccgaggagccttcatgatgacacaagaagctgtccgacagatgaaggctcagagtcctcaaggcggccgaatcatcagtgcgtacccttccatccattgacagtcgattcgacgaagatgccatctttgagaccgagcctaattcttattcatctctcgatcagacaatggatcaatatctgcttacgcccctcgacctggtacgtgctcttccaatctctatctttcaataaagtcgtcaaattcaaattcaaacccaatcccttttctctccctagactctgctccttacacaatgtcaaaacacgctattcttggtttgaccaaatgcacgcagcttgatggacgaccgttcaacatcgcctgttctcagatcgatattggaaatgcagtgacttcccttggtaacaccaatgcacccaaggttcgttgtccttctgctctcaatcatccttcacgcccagacaagagagactgacggactgattatttctcacttcattgatttatcccaatcttatctttattttcacatcaagattcaagcatcaggtcatcagctcgtggagcctgcgttcccagttgaccaagtcgcaaacgctgtcgtctacatggctagtttaccgttgggaacgaacgttgctaacatgaccatcatgttcgttacttcccactctatcgacttctctgttctttcctttcaagaaatcatcacgatggtatagaacttgttgacattaaattcttttcggttggttgtgtgacaaatacagggctaccaacatgcctttcattggacgaggttaagccccccaatgtgacactcagattaggctttgatagaacaaccctacgccttgtcttgcgtcccttctccctcgcctctatgccttttatccccagccaattcaaagatttctgtttattggcatcataattattatattcattataagactatgacattcgttcaaaaccattgagaacataacacgcagacggagcagaagcatctatcgtcagtacgtgttgacagtgaccggcgccagaagaaaaagaaaagaaaacgaacagtactcgggtaacggtctttttgccggtattcctttcgcatcctgaggggccgcctcgaatactttatacgattggttcagattctcattaagttctagtatcgatgctacgtttccacatcgataacagtaatttggtgctgcgaggatatcagaatcgaaccgagagtgtcaggccatttcgttcctgattcgaaaaaagagaagaaagacacacctgaccaaacggtcacaatttgtttatcaaacatcatcttgtaaccttccatcacgagttgatgtgctcgtgcaaccaggtctatatcgtttgctctgttgaactgtgagacgatatcggctgtaatgattgcgagtatcgaagagagtatgagcctcgaaagaaaagaaagagttgatcgaaagaaaagcatggtccgacactaaccaccgaacaagaagcctgctccccttggagaaacaccccatgcttcgatatctacatagtcaaagaagtcagtatgagttgtttgaagtgatatctcgattcccagtaggatttcaagagagtatcagagaagatgcggacaaaccatcagggtcggaccataacaggtcacacatcgctccatcatgaggaacttcctgttttctatctatcagtcgaatctggaaagttgcaaacacaaagcagttattgagtgatcagaattgtctgcgagtgcaatacttcagcaagctgggaggtctagaatgctagtctcgaagggtagagatgtcgattcgcgcttggtgacttttaagtttgcgtggtcttccagtcttttcctaacccttacacctgcacagcgactaattcccgcacacacatccacaatttcaaaccctcttgattctctcgcttctccaaccctgtatccgtttcccaagaatcaaatggattggtcactatagagaagaggaaactaacctgatctaatgttaccacactcggactcaaccctccatgcacacagaacacccttccatctactaccgcgcctagacaaagataatcaaacacatcgcagcaatacctccacacattcacgctcccaaattttcgctgacattcatcgtagaaaccatagacctgcgtgatctgccgggattcatgatttcctcggatgagcgtgattcgatccggatatcggactttataaaggagtaggagtaggaaagtttcgacagagtagaaccctcggtcgacaaaatcaccctgtgttgttgacatgcggagaacacaaggcgtcaacaaggtttagttggtcaagggcagaggacagctggaggacgaaccatgaataagtaggatgtttgtggcggttcgccgcctactcgaaagagttctatcaggtcgaagaattggccatggatgtctccacatatctaaaatgcggatcagagtcatgttacattcagaagaaatggtaaaggttcagtacggggtgttacaggtcgagaatatgatggtcatgatcaatagtgtagatgcaatcttgtcgtgtgtccttcagacactatccttcggctccaacttcgttgctccataaggacgaacacggttccttctctggttcacacatgtccgttcccgcccatccagccgacacacaccgcatgaggcaggcaaaaggttgattgtaagaaagacgagagcttaccgtaacaggactatcgacatactgaacgttgccttcctctattaagatctctctagccttcgagcaaagcaccttgacctcttcctctgatattggttcgcatctcttgagctgctcgatctgtctagaaactcataatcacaagggtacatccccaagagtttcagaacaattgattgttagacgccatttaaaatcatcgaacagaaagcttacagcaagacgcaccgatcaagatcactggtaaacatggattataggacgaagactgtctcggcacgacacgcgtttttcttgagagtaaaagcttggagttagacagatgtattatatcgattcgatcaggcgaattcttttcttcgtatggcttcctcttgtttacttggcagagtggtcgtcctggttctaagcagataaactataggagacgagaaatacagaaagagaacgatgaggacgatgggatggttgttcaatgatggtgatgattcaattgacgctcaatcaagtcgcaagaattatcatttaatttaattaagtg

SEQ ID NO: 1189 - DNA, 32207 bp, Xanthophyllomyces dendrorhous
ctccttacatgaccacacagtccccgttcttgttttctatctggttgttcaattctcggcctctagatcgacctcctctgttgcctgcctgtagttgaacaacaagtacaccagagttgtgaggatcaagctgggcgtccaggttgtacctgtagaacaagagatgatgacgttaggacagccattgaaccagcaagcatggacagataagatcaagcaaacgaaaacgaatacacaattatggaaattcttacttttccattaaatcctcgatagcaggcttgatcttggccgtatgctgggcactatggttccctttacctgtcaaaggaaagaagagaaggtcgaatatatgataaatcggtcttcttaggatacatcatcatagaaataagagatatgacgaaccaacgatgaatttgatctcctgatcacctcgttgttgagccttttgtatttcttgctccgacatctcgatggctgaaatatccgaccaaagattgaaagtttcgtggtgaatgtcctgttgttataaccggtagagtctagatgctcttgtgcttaccttccttgacgtatagaccatgcaagtcgatcgttcccggaggtgagtccgtgttgttttctatgacaagagtcgtccaaccgaacgtcaaaaatttgaaacaatataaagcgctcggacaagaaaagaagtttagaaaacacacggtagtagatccaatcccgagcctctttatcgatctgagcctttcgcctctgatgttctttcccctcttcactcaacgagtgagcggccgcaccatctccagaagcataagcctgtttagatcggtcgaaacaactgatttgttccaacgccgaaagaacaggaagacgaaaaagttaagccaaggtcaatacttcacgggcacatgtttggttctacaaatttttctcctgattataaatgtagatatgggcccacctagccataagactagcctctgttcgggcctgagcgcgcatagccatatatttctcgtttgactggttgatcatattgggatcctgaagatagagtcatgaaagccgttcaagcaagtttcctcagccttgattgaatctagaaagaaactaaacacgcccattgcattccaaagatgaagaataaaaaagactgcaagcgtaagcgaaacctacttgagaatgataaggcccagcaacctgcccatattggcccgcagactgctgatgattgacctgttgatgaggcttagttgtcccgggatgagcatatgacggctgctgttgagggggataactcgtctgttgattgctgtaaggttgctgtatatgtaagagagccggaacattttgagaagacgaaacgataagcattcggtgtattctggatgcagtagacaagacgcagcaactagcgcacctgttgatgataagtttgattctggttctggttctgattctgattctgattctgattggaggaagagcagaagagttgctggatgcatgagaacagcaagccaagcagctttgcgttatcgttgttgttgttgtttgtcatcgtggaggtgtattatgatgatgaccgatggacggatgtatggatggatgtcaaagatgatgaatgaaagacgttcaaggcaagcaggctcgttcggaaagaataagaaaaaacagaaaaaacgcccaggcgggtaatttcatccaattgtcgatcaccgttctcgtccggcccgagatttgctgcgcatccggtcatatggagtccggtctaggtcggcccttgatttcggcatgattacctaagcaggtctcttctatcaatctcaaccttcactccatccgttttcaccagccggatccaaggcaacagtgttgtagatccaggagaaaggagatatcgtctcagccgataacatgttttccgtgtcgctcagacgatctcaggcaatcagctgttatcggaggtcattatctagtaccactcccaaagtcagtccaacgaagcttgaatcagaggaaggtcgatgctcaacttttctcccttcattcttatataccagccgtttcaacttcctgatgatcagcaaatctttgtctcgcgatcgaatgatccttggttcaacctggctttcgaaaactggtcagtgtctcttgttatcgttattgtctatccaataaccgatcggttgctgaccttgtctaaatctataccaaagcgcaggctattcacaaagacaaaccccgccattccgatcctctttctctaccgaaacaaggcttgtgtagttcttggtcgaaatcaggtatgtgcttcatgataaatagctgtagagactataatgaatcaaactacttgtggcacttacctgttatgattttcgtttcgcgactccaagaacccgtggaaagagatcaaccttccgttgctaaaagaacttgaaatcccgttcattcgtagaaaatcaggcggaggaacggtctaccatgtatgtctatgatttttcatcaactatcagtaggaccggtctgacgtggtctgatatatgatctacttgacgtatatatcaggatatgggaaataccaattactcgatacttattcccaaagattcgttcgatagacgacccaatgcagagctcgtagcccgagcgctgaataccctcaacgttgacgctagagtcaatgaccgtaatgatatcactctagacggcttcaagatgagttgttcattctttctgccttctggacatgtcacaaatgaagcttatattagaccaagccccactggccttctccttttcctttaatggcatcacgtctccggctcggcttacaagctcaacaatcgacgagcgtaccatcacggaaccatgcttctcgacgctcaactcggccgtcttggcaaatcactaaaatctgatagggtccgtattatgttgtttctttctcactgggcctacataaatgctcacattttctgtctcacagtcattcacgatgaacaaagcgaccgattctgtaccctcaccagtatcgaacatcagttcaaaacatccaaatgtgaacaacgagacgtttatcggcgccgtcgtcaaagaattcacctcagtttatggagcacaaacggaagtgatcgatgtcgatgagcaatacatcgatagagaaggaggacagatgaaggaacttgtcgagaaagaggttgctgagttgaaggtcagtctccttctccttttttcttctcttctttctctttaatctatcagatctgacgagcatctctcccaatatatactcatgaccatgaaaacccaatttgcctttcaaaaaagacctggaactgggcttttggtcaaacacctgaattttcaatagatgtccaatcacctattttgaacactctcggtcactctcttgttcgtctagcctttcgtcatttcttttttccttgttcttatctctgagatcatcgtttcccgtctacttattcttcatggggttactcggcctctctttcaccaatgccataacaaaaaagaacgcatcggtgacatccagaaagggcctcatcacgaaaatcgacctgtcgttcccttcatccccttccccgttatacccatcagcaaagtcagaatcaagcccgggctctcgaaccgatctggagaaactagccagctcgttgataggcaggaggtttggagatttggatatcaattcagaaggaaagagacaagaactcgagaacaaaggagtagagagagaagttatagagtggttgggccgatcaatgtagacctttgctcgtcgctttcttgagatactggcaaaagcgagatggttgacaaccttaaacttcatttacatcccataaaaaggaaagaattgagccgacgtgttctcacgcaattcattttaaattcaacatttcattttcttttctatctaaagatattatttcccgaacgaaaacatcgacccagctgacccagccgacccacccatcgctccgaaattgaatgcacccggattcgctccagttcctgtacccgatgtaggcggaagtccactaggcttcgccccgaatgagaatgctgctggtgctgccgttgtcgtggatgatgtcgccgccggtcctgaagatgctccaaagttgaacgccggtttagatatcacaggaggagtacttgtggatgacgttccaaatgaaaatgcaggcgcagaacccgacgtagatgaagcaaaagatgttccagagccaggcggatttgacgaaggcgcaggagcggacgacgtcgagccgaatgagaaggaaggtgcgcttgagctcgctgtagatccagatggagtggctaccttggaaggcgctccgaatgagaaagaagacgcaggtgcagtggtggtaggggcagatacagcaacctttggggctccgaacgagaaagatgaagctggcgaagacgctgcttccgccgatgtggcattgctcgctcctccaaacgagaaagatccagcggcaggagcagctaccgatgaagaccctactgctggctttgaggaagacccaaaggaaaaagaaggcgcagaagccgcaccggttgacgaagcacgctctgctggctttgaaggcgcaccaaacgcgaaagctggagttgagggtttagccggctcagagacagaactagcagcgggggtggatgaagtagcagcagaaggagtagacgctccaaatgagaatgaagactgtttggatggaggagcgggttctgacgactttccgaatgagaagccagctgatcctcctccagtactgttactagctccgaaactaagggctggtgtcttgggagcaggtgtaggagcagcagaagcggaagacggagcaggagcagccgtggaagtcgtcacagaagtagaaccagaggctgcaggcgccccaaagctaaacttctcctttccagtcgaaggagcaaccgatggggcagaactatccaaggctttgggtccaccaaagctgaatgaaggtgcgctgacagcaggcgcaggcgcagtgttggcaggttttgattctgcaacagcgggagtagtagcaggagatgctccgaaggagaggggattactggagcttgcgggagcgggggcagttaaggatgttgtcgcaggagatggagccgcggaagttgcgctggctgtcgttgtcacggcaggcttcgcaaaaaagttgggaatgcttgatgcagatgatggcttgtcgtccgccgcaggtttggattccgaagtgaaagagggagcaggaagagacttagaggccgaaggagttgccgtcgaaagaggaggttgaggaggaggagtagctgatccaggcgaagccggtcctgacgaggtccctgatttgttatttcttcccaacaatctgacacctttaggagcctcatccttatccgccgagttagaggaagccaccgactcggctctcaatcgatctagcattttcgcctctctagctctccgttctctttctcctagcgctcgagggttcatcgccgccttaggtccatcgccaatcttacttgcaaaatcgctatgatagagtgctctaagacccaaagacgaagttgacatgcgaagtttgtcagaggcggaagcagatcggacaggggtgcctggaccactagactgggaaggggaggtcgtcgaaataacaccagagaaagactgtcggaggtcagcaagggaggtcgaagagcggaggggagtggccgatcgaccgatccgctgataaagtcctggtgactcggcactaccgatcgagttggaacggctctgtagatttggtcagagatgatatgcacgatgattgagaaatttttctttcgcgctggcatactatgactcgacaagatgaacgaacttaccagaggtgtccctctagaacctacgtcgctcacactccccgatcgctcttttcgactatccatatcctgatcatcgtcggactgccaagccaatcttttttgagctttaagctgtcaaatgaggaaagttgtccgaaatgatgaataaccaaaaagccaggacaaatccatcagctttgagactcaggagaattagacgatgccagcgcaatttaaaaagtacggacctcagcaaactcagattcggttacccattgctcaacatttccgacaatagtttggtatctatctggatgctcagagtcgataggctagaatcccgtccggttttgttcagtacacgaagtcaggagctcgatagacatgtcatagcggaaacaaaaagtatacggaccatatcgtattttctcatcgtcttcttgacaagtacaagtcgctctcttcccgtaccgttcttcccaactctgaatctgatcccgtttggatcgttccagatgtctccctcttttcttccgttctcatcgactctctcgctttcgctttcgtcctcttcatcttcctcgcttacgtcctcctcttcgacctcctcatcaatcttcaacctgggatcgcccactgtaccgcctgcattgctcttggttcgttttctgaacgaccgtttagaacttacagactcgacgtccgagatctgtcttttttgcttggtcgatttctttgccacaagcggcggaggtgacggcctctcagcctcatcagatgaagatgacatcatgttgtcatcccaatcgatggcgcgcccgttatggagcgaaatagatccttcgtcttcgtcagacatggccgatccagtatcctcgtctgagaacggaccggtttcaacctccatagtggtcgtctgatcatcatcatcctcgctcgtcggttcgagcttgacaacctgttttctccttttccttcctccatcggcctttacttgatttctaaccttactgtgaagttcttcttcggatagagacccctcagattcatcatctttgtcgagggatcttttcctaatccggttcggtttagcgatagaggagcgccgcgaggagacagtcggaatgtgtgtgctagttcgcgcaatcttgtcttgaccagaactcgagatcgatgaagcggtaagatttctctctgcaaagtctttggagaaggatcgatcaagaatagatccgctagtggcagcaaacacgatgatgtcagaggaagtcacagtgatatgtactggagcaagtcaagatgatctcaccttccgaaactattgtatttgtaaacaggggtatcaaatacaggtccagtgttataggaaccatacttgctgctggaagcataggcgagagcttgaggcgatagagtttctttggcaggtaccaaagacattgtgtccctaagcttctctggagctgatcaagacaaagaagagaaacaagcagaaaccatgaaatcagccaactgtgctttatgtcgaactaaacattcactgcaaagctatgaacagccaactcactctgtggcttgaccttcctggtcctcgagatacctgcctccccagcgagggtgcgcctttccaccatctctctacttttgatcagcgcttcggctgcggcctctctaaaaggtctcgtgtcactgtccgggatcccatgtcttcttcttttctcgagtttatactttccaatcttgttctgcaaccgaaagtagtcgactgctttccttgtgtagaagatgaggccaccgagcagaccaagaactacccaccatggaagctttcctaggacggtgagcgagaacgacaagagagagaaaggaggatcaatgacctgcatggtctggtccacagtctctgtatccgtgtaccaggacatcgagggcaaaaggactcctgaagatggtgggtgggatgtatggttgaccgtcaagtcagccaaaatgatggctaacgaaagagccagtcaagtttcgagttacctaagattattttgaattatatatgaataaacaaccggttagtcaccgtttgacccctcagtcagcatttctcctgcttgctatcccacaccttcaaccacccacataaaactcactctgtttggtctagattacctctcaactggccttcagcgaccttgataacatagcattggtagtcaagaccttgaaataggagtcgtcaagcacttggatcattcatatcgtaaaaaggcaaaagattttcaatagctttcacgccatggctttctccgctactctcgttcgtttgtcctcaaggcttcggttcgttggtcaatcatgtactgaccactttcgctttatactttacagacactcagcgatctaaatgattacctcgctccgtctcaagcatgtatccgtcctgtggaggaggaagataaggttgagcagatcgatggcgctgtacgttcaagttctcccagctttttctcatgaccaatcaagatactctcaaaacgactctttcttgatgctgaccaactaagacatttttccctttcttattcttcctccttcctttgcttttttctttcttttgcaatccccaatgtattgtctcgacttcttcctgttcacctcctcttgacgttcaaatgttccacagaaaacacaaattcatattgacgaatcgacaggagcgtactacgaactcgctcttccgaataatctgccttccaccgtctcctccacttccaccgtacctgcgccttcgactgagaagaagaaactcaaaaaggcagagatcagcttgaacgattgtctagcctgctcgtgtgtatctgttatacctattcaaccgtcaattatgactcaaacttacatataactttcctgactttgcccatgtctcactcagaggatgcatcacgacctcccaagaactcctcctccagacgcattcgctcacgcctctcttggaactcttacctccaaacgaaccaaccaagacgttgttcctatcgatctcacctcaatctctctcatcgatttctgcctccttaccgactccacttcctctctccaccttgctccaccggatacagagctttctcccctcaataggcatccctcatatcgccgatcttacgttcgcaagacacctctccttgagcgaaaccgttcaggagttctatgaacgaaaagccggacaaggcggtggactgccgatgttggcaagcggttgtccggggtggatctgctatgcggaaaaagcacacggcgaggtgcttgaaaaagtcggaaaaggaaggagcgcgatgggtatcatgggaggtctcgtgaaaggttggtgggctagaaggaactcgatcgactcgaaggcgatctaccacgtatctgttcaaccgtgttacgatcgaaagcttgaatcatcccgaacccaattcatttcgaccatgacgaaccaaccggaaaccgatcttgttctgaccactggcgagtttcacagtttcctactcgaacgagggttcgatcccaatcaaccgacaaaccttgagaaagctgaaggtgaggtgatccttccggaaacttacgaaggatttccgagcatggtcgatcacccaggaagcagtagcgatgcatacctccatgcgcttcttttccatttcatcgaaaaatatccgccagggtcgttgacgttagcgaccactcctatacgtggaagtccggattacattgagtattctctgacggtcaactcacaacctgcgccttctctttctccgtcatccacttcgaataccctaccacctgtaacactatcaccatctgcatccacatccgcatcgacctcaacaatagcatccataatacccacttccacatcgttatcatcaccccaagcaaacacgtcaactgcatcgtcatccttaccgggttatcttccccttccaccaccgaatacacaaatcttccgagccgctaaatgctacggcttcaaaaatctccaaaacgttgtgcgcaaaagcaaacctacgagttccgcactatcttcccgacctggccttggccgtgcggcggctaaggataagacgtatgactatgtggaagtgatggcctgtccttcaggttgcgtcaacggaggaggtcaactcaaaccaccttctcctcttacttctaactcgggggagcagcaacagccccagagaggggtcaagagggacgaagaagggtttgttagaccttgggaggaaacggatacccaactagctcaggtccagaccgggcctacaggggttgacgtagagatgagatggtccactaaagagtgggttgccagggtggaagccatctactggggtgacctctcctcttcctcctcttcttcatcgacaacgacatcggcaaagacgaaggaagcttcggttgctccacttcgacctgcgaaagcagccgccgccgtgccatctatgtcagcccgtcgaatccaagcgaacgaactggaaaacgttgttcgggatgaaatgtcatctgctgaacttgcctctggtacgagcgacgggaaaggatggatcagaacgtcatacgaggctatcaagcaggaaggagatggtctccttttagggagtggagtcgtttggtagttttcccccagcttccgcttccaatttcgatttctcatttttgcagaaggacgaaccagttcatccttctttcctattcttcatcatatgattctttgtattctcaatagatgactgtttatcttttttcttataggcgtttgatgtgctttaaggtgcctctttcagtctttacataaaaagcgaatgaaattcgatagttaggggacgaaaacaagcctggtttgatacaaaaagcgatgatacaatcacgtccaccataagccaacccaagacttgctcactccttattccactccttcacggcggccatgacgtcctgatccaaccaatcccatacgacttcagtatcttcccaacctaccaactctttcccattgacgcttttccccacgctcgttcccagctgtagggcgccttgtttgttcgagtaccccatatctggacctttgtatttatctctcgcaattccaaccgatccaccttcggatagtagtccgtgggcatagagtatgtcaccgactttggcggataggtctttccaagagtgaggcccagaggtggaggttccaaagatgtagtgagagaaaccatggtggggtgggggaggagcagagggagagaggaggagtttgattagagaaacgtagagcttggtgaggctgtcaatgtgaacattggacctgtgtaagaagaaagaagagaggaatcttgagatgagctcagctagatcaaaagcgaacaagatggtaggacacgcaccaaacgttctttccggctgtaaataagaacaacaatgagtaaagataaatcagccggaaaatctatgactgtttcgaatgcaatcaatgatgacggacgctcgatgtaagccgatcgcttattggtcaacgcatgattgaccaagttggggatctgctgcgagaccgtatgaatgggtccgtttccctgcatccgagaaaatacaaaacatctttttaactcgcaattctcctcgaacccaaagaagaagcgacaaagacaaagcgagaagcgaacaatgccgtagatggtggagggcagaacgatgtaacccaggaaatgacctcgctcaagagcatctgtcactctgtgaacagaagcttgttagtgtttttgctcgcgcactgatatataggcatgaaaacgaagcagccacgagacgcacattatgtcaacctctcgatggggcctgctaggtgcaattccttcgatctgcttcaagtcagagtcctgcaatgcacaaagctcacattgagtcatcctgaaggaaagagggaagaagacggaggaaggcaagacaaacatcataaactgtgttatcctcctctccggcagggatgtccccatcgaccaggacaccagttccagaggtatgaatgtaaactgcctttaatttcttttccagtttcctcttctcagagctagcttcgagaccggcaatgagagacttggcggagggaacatcatcgcaatctgccgcggacacgactgaagaaacagaccgagagggtcagccaatcgagcgagacgaatagagaagatatgtatatatagagtcaacgcaccgacatcggcgatggaagcataatgtttaagaatatcgccatcttgcaaagtagctaaaaatctcgttcattccaagcaacactatataagcatcatcttcagatctgacagggaaaacatatatggacacgcaccttttacaggctctatgttggatgaaaacttctcaagaagagacttgtgctcgtcccttctgtactggacataaaacttgccctttgggtattcatgaatgaggcctgccaagatcgcgcctccgatgtagcctttttcggtgatatcatcgcaatcgcatcagcaggtgaatgatgtcacagttgcgaacaaaagtgtagacatagtcgagtgaaagaagatggaccgtaccggatgcgcccagtaagaagactgagggagcgaccttctgagcttgagtctctgctgtggacatgatgatgtgagtaattttccttgttgattctttagttcttttggaatatcagaagagagagataaattggacagatggaagttgaaggcgaagagagagatatttatcgacctatttgaatggtagatggaaaagtggagggcaagatgttggtgacggatatggtgagctgctgatcgaatgaacacattgtcgtcgtcatcgtcctcgttgccgtcgtatcatgaatgtcctactcttttttaaatcctcggatatctgtccatgatactatcaacgtcttcttctctccgcttctcctggttcaagatcctcatcttcaacggttcagtactatctctgagctaggcaaatgctaatctgacaagggaatgaaaacccggacatgtccgagatggttgatcgatggtctgtcattatatctcgtcaccatcgtcgtcatcatcagaactacaatcttgaagccgacttgagcgcatgcttgtaaagggttccgtagaacctttgtatgacaaagaagcattgatacaacaaaggatgatacaacaactggctcatctgccgctcttcatttctgcttcctcaaccgtctttctgaccttttacaatttagctcagagcctggtgacatgatgaaaacagagttctgatgattgaaagtcgagcgccaggtatggccagtgaattttggggcaggtagatgacgaaatgagtgagagacgccgtgctgatgatctgtttagcgaggcgtctgtgactcaagagtatttcttttatctatccatctatggatgggagaataattcgatgagacatctcagcatctgatttcttcaaattcacctctgcaaaggcgtggtgaagacgaacggagtcaactcacaatagcaggacaggatctagatgaaagatcaccgaagtggttggtgatatctgctcgaagattttctttccgttgtttggatgttgtttttggtttcctatctactacacctgcctctccctgttcctcctgatctgcccatcgactcatttgtctccctcttcaacatcggcctcgtcatcgccttcgaccccttctgcgtcctcttctgcatcctcttcttcttcgtcttctggctcttcttcatcctcgtcctcctcttcttcgtcctcctcatcttctgcatcgtcatcttctacatcttgtccatcgtctgtcaccttccttgtccgcttggagccagatttggcagcagatccagcactagaccgactagctctagccgacgatcgtctaggtttctcactctgagactgattgttgaagaatgaagcgcgaaaaagtttttggattaccaaacagcgcgtgctgagaaaatgagacgaaagcgatattaagacggaccattcggtatttcgcaagatatatcctcaaggcttccaccgagttatcgaatcctacaaccagaaggagggatccaaggagttgcgttgaatactggttctgaagtcatgaaaaactggaagatgtccatgactgacctaatgctttcatcgcttccaggatgtctgtagacgcaaaaaggaaaggtaaaacacataagtcatttgaatgttggaatcaaaggatgagaagagacctgaacgaaccttcaccattcattgtcttccgtttgttgtctagacaccgctcggatgcctcggaagtgatgaaggcgataaactcagagacgcctatgattatcgtgtgtgttataaagggtgtgtatggtgagatgattaggtcgacccccatatgaatgatggacaaaaagaggcaatggatgccaacgtacattcctgtagacattctttcgattcctttgcaatttttgctgacggaggcaagcagtccctcatgatacggctcacatttgctatctaaatttgagattcccatcgcaaatcaacatccaaagtcaattgtaagcgggacaaatctgagttaaaggtcaacaactgttaagctagaggggtcagacgacgtacgggtagaaatctatcctgctctctgtactcgtctacttgggtctctgtgaattcgtgggagacatccttcagatctgttcccgtttgtctctgaagaagaacacgctgaggcatttgcttcccgacgaccggaactatcggctcgacatctgagtctgtctctggggaaagggatgacactgctgacggtgatgacattgatctggaagagggagagatccaggaggctgtggtcggacagaaaagatagcgaaaagagacaaacggcaaagaaatagaaaatgagaagaagaagagaaaccacttccttggaaaaaagagagggggacaaatcaaaacgttcgagaatcggttttcgccgtctggccaatggtagtcagccagattcgaatttgattctaaaccctctggggttcggccgtcagatcaggtcggacaggtttgagtactttaagtgctcatccgtccatgtttggtcatgacatggatatagagtatgttaccagaaggatctacaacatgtgtatataggtcaggctacgccgtaaggagagccgtcggatagacggcgtcgacagattatgtgacccacgacgtaagaacatccagagtccgcttttgcactcggagagttttcatcctcatttgagagaaccatagcagaacagaacatagtgctgaatgtaattctatagtcatatacacgccaatggtgttgttcgacctgctctgctgacgatacctgcccggctgatactatcgctgaatataccaatattcctcgcttcataagcacacactttgatctaactttatgctgattgataccagatccctctattgcgatgagataccagtcgatatactgacgatatgctgttatatatctaaccatatttcgatcgtctgtgttctagaagtgtgtcagagcatctttatatccaggtgaagccaaattcttctcaatgtgaagaccatccaatctcatactatcagtcctacataccatccagtccaactaagatatttcatgttacatcgttgactctcgttgctacagatgttgagtttgtcttgaaatctattctggtgtgcttggtgtttgcataaatataatgagctccgttcctttacaaaaaaactatattgactcaagtcattcccgatatatccttcaagtcgattgaaattaggactatttccatctacgtaggtcaccttgtggtcgacaagagtgttttctcaccgtctagaagcaaaaaggtctcatagaaaccaattgggataggagtgcaaccttgattatctccatcttggttcaagtcagtacccactgcagtcgagtcagcgcgctggtcgagggtggtgcagagtcaggtttccaggtctcctcagtgctccaaatagaaactagcacttcttttgaaacgacgactcgtcgtgtccttcgttacacatgccaatcgtacatgtatcatgaaacattgctccttctcagcttagagatccataaaatatatactcacgctttcctcgcctcattcggagaagcaaggctcgaagggaaaacattagcctgctgcttacataatgccaaaggaaacatggaacgttgcactttccccatagctaccatcacccatcatccatccaacaatacggcttgggacaagctctgaacgatgggctcagtatcctcgccctatgtgctatacgcaacttttacaattctggccttcgctcttgttcaggtagaactcccggatccctatatggtttgttctttcgtcatttgcttccttgctttaatcatcattcattgtcgaggctgactggctattcggctatgtccgtcatcgatggcttcgataggatgaaatctttcatgtaccacaagctcagagatactgtactggcgactacttcacttgggatccaaagttgacaacccctcctggtctgtgagtggtttttccgttcgtgaacgagtctggcttccagatgacaatcacccctcttcccctaaactcactggtgacgcgaaggattttgaaaacccagatacattctctccgtgataccggcaaaagtctttcatatcagttgcacaacggaatatctccggggaacaaaccttgtcctgagtctccttcttcctgctattatccggtttgttctctccaccttcccacctcgaacgtcgtcaacttctacgtccctacaggtgagcagttcggcaaacaccctggaatcggtgtcgatcgcgctctttccggcaacatggttctttggaaacctgtattacacggatctaggttcgctcgtgctcgttcttctcagttggggaatggcaagaaaagaacggttctgggtttccagtttggtatgatcacaccatattctctccaaatgttcttgtgaatttcaacttgagctcacgctgatgcaagcatacactgatttgagtaacaggtagggctgctctcgttagcatttagacaaacaaacgtcatctggatgatcttcatctttgcagtctctgttcttcacgagcttgatgtcgtccaggatctagagcgatctcgggcgatgactatcaatgggcggactcgccggcaagctgagaaggagagggacgagctcacgataggtaagtaccactgccatcttgaaatcttcccccctaaatgattctgaaccatataccaacttgtctcgtgatcgaatctgatttccaggtgaaatacttagtgaaacaatcaagattccctcgagattattgacgtcctggaaagagttgatgccagtggcggtaccatatatacccacgctgatcgctttcggagcattcatccgctggaacggaggaattgtactcggtttgtagaactctatttccatctttaactcatctctggtcatgcgctgacattgaactgcattacatcatccttgtaggccataaagaaatgcacgaagccacgcttcatttccctcaactaggttactttctagcgtttgctactttgctcggatggcccatcctactggataggggagtgactgaacttctgaaaagggccatcaaagatgggttcggtggcatcaggtttgttctcttgtttagttttcttcttggtttttttttgtttctcttctttcagcttcatactttttaggagagtcgatcgaacccggaaaaaatgatctcgctaatccggagagtatgtttcaatatgggcggaaacagacaagcattgacaacgagcgttctaacgagagtaacgatgttagctatcaaacataccacgttcgtctcacgttctaatctttattcgtctcttcgttcttttccgctgacactgtcactcttcctgatcgatcggactggaaaataaactataggatcgtccatccattcctcttagcggataacagacactacgcattttacgtttggcgtcgagtcatcaatccattccctgcagcgaggtttttattgggagtaggctacgtaggttgtgcgatcatttgggccggtagactttgttcgtattcaatttcctccacctctgtcctgctcatcaccttgtgcatggcttacctatggggtttgtatctctctcattccgttaaaagtccggacgcaaccgccgttgacagtattgggtctattcacagctaccctactcactttgacaccttctccgttgatcgaacctcgatatttccttatccctttcaccatccttcgtatattggcttccccttctcctcttccttccgtctcggcagcttctgagtcaaaaccagtagacggtgttgcatcaacaacagtatcaacatcgacatcgacaaaaaggactgccaagctagatgcggacgataagaaacgcagaataatcattgtcgaactcctatcgtacaccttcatcaacattctcacactgactgtgttcctgacagtcaagttcaagtgggattctgaacctggggtttggcagagattcatgtggtaatctccttttctgtggctgacaacggttctctagatggcaagatatgatgtgatacatccaatagataaaacaaaattccgcattactgagtacaaacgatcgtgtttgatgtaggaagagtacattggagtggtctaaaaggaattgaaaaatgcttcagatgaacagaaaagagcaaaaagcatatgacaaagatgaagagctgatagctggatatagagatatgaaaaagaaaatgaaaaagaagaaaaaaaatcgagagaggaacgacattcaaacagagacccaaccggctgctctcgctcgtttctcacattccactctagcctcttcacaccgtctggccagccaaactccgaagtgttcttttcggttttagtagaaagacaaagaagagatcagccaacttccctttcgtcttagaaaagatcgtttgaatgggcgatgcctaggaagagaagagaaacgagattgggacgcactacttttcaaaaatgtgtcgtagaaactttgggcagatccagtcgttgaacccagccctgactttctaaacgacaaagctgatccgtgagctcttaatgaagagagaaatgaggctgaggaaaatggtttgaggggaggtaattgattcgagctgtcaggtgtgctaagaatacgatagaatacaatgaaggaaagagagtgaggtcaggacctatcaaaggaaggtgttgaacgcgcgatgagagagacaaacagatcagtagggatgagcgaagcaaagtatcgattgagtggctgcaaaaacttttctgtcaaatcggcaaaatggaaccgaatttgatcgtttgcttctggatctgatggggaaaaaatcatcagtttgatgagaaactcaacattcccatatgaaaggcaagaagagaacacgaactttgaagatcaccagctgctacgacggcctccaacttctttaatagaattctgtcttttgacacctgtcgctttcgtttcgactgaaaactctctactagagcagctttgggaggaattggactgggactaggtctagcgctattactgctggggttcgggccggaggcttgtctaatcggtcctgtattgggttttgatagactgaactcgaaaaaaggacgaacaaagaagtctggttgacaacgggttcatgatcgatatcaagaaaactggcaaaaagacgaactatgaactaattttgtctcctaacgtgatcacatttgaccaattcacgcaagcttgtctaaagtatggattagttgcaccaatgaccgcaccagccggcggactgtgtgcgtttacaagcagagaaaatgaagcgtcgtggatgtgaaagtacgggcggagatcgccggaaggaggtagctggataaaagaggaaacagttttagctcaaatcagagtcaaaagaagagacccttggaaagaagatatcacaaacaggccggatccaatctcttaaccaccaaacaagctctgaacatgactttggatccggtgcaatgataagaattggttcggccaggataaggcactcccaaatcaaccaaatcgaagacaaaatctttccgagaagtattagaggtggtatcgatggaagcgaagccaatatctgtttgatgatcaacgatgaaagaaaatgttgagcgcaggtcgacagattttctttgaatgtagcttcaaatgaaaggacaactgaaaacacccacgacaccgctcgtacgtaaggctctcgcgtgaggcaacattgtacgtcctgatattggtactgggagtgacggtgcgcttggtaggctatccgaagagggcactctcgcaacaggtcctagagaaagttgagtagactgattgggcgacggtagttgaacgttgaatgttgatcctagaaagggaagcgacaaggaggctgaaggtgtcggtgggggcctgagagtttaaaatatatcacagacagaagtttcagaagactcccgatgtcaaaaatttcatgcttaaacaggatttaggaagggtgcttaccatgaggcaatttcctgacaagcagcttcaagtacggacgggcctctactaaagaagtgcggcgccagatgcatcacgagttggttgaagaatgaggggtagggtaatgtgcttaagatgaccacagatttctgatgatcatgaatgaaggcgtttcagattgattttacagaaaggaaaaaaaaaccgtaacgaatctatcagaaattgtccagatgtacaaacggcgctcaaattgattgactcacttgaaagaatcctcgtttgatcgtaccgtctctcttctgcaagaacaatacaaatccaaacagcctgccttcctgctgtccacctccttctccaccgtttggatcaagtttctccttgttgattttctcttcctcgcccttgtcccttacaattgagctgcctcctccattgggtaacggcgcaaatgctgcttctctcgaggcctgacatcccaatccatcgttcaatttgaaactccacgagagctgaccttcagtgaacaagctcgtatctgggaaactcgagaacgcgatattctcagccactccgatcccccatctcctttctggtacactgagctccataactggtccgatatcgagatcaaagttgatgatcacaagtgcttcgatccatcgtctcaagtttgcccggtatgtttggacgaggaccggatcgagcgcagggtccgttcggactgatccaaggtcttgagataatccacgattggttctacaaaatcgaggaggaattgaatttgatctggagagtgctctttgggttcttattctaggaggagataatggatggacaggtaatgaagactttgtgttcatggctaatgaatcggagatatcctgatggtgactgttcgatagcggaagttctgaggatgatggagagaaaggtattctaggtgatgattgtaatctctctatcacatacggttttggcggtaccggagggggcagctctgagagggagagcaagccaatgtcttcctccatggtcggtcaggatgtgtcgcctttgtgatggtccaagtagaaccgatgaagtagttcgaagagaaacaagagaacgtcagatggttacgcagtttacatgaaggttacgatttgtaacgcctctctggctcgcttgctttcgttctctctttgcctggcggttgctctgctgttcatagtagaaatatgtttgggtacatcttagctatcaaaggaatcttcaagtctgattcatcagtaaatgatcaactgctcgactctggtcgaaatcactgtctcagcccaggatttgttatgattgcaaagaattgaaacaaaaaagttttcagtcattgagaggaagatgatgaaagctttgaataaaaagccattgctcaaagatataaagtacaagatgagaaaaagacacacctttgctgcaaggcgcgaatgacctgatctcttgtgtagttgggaaacatctctctcaacctgcagcgccatttataggtttgaaagaggatggtgtaagagtcaatcaacaaactcaagtagccacaattagatatacactcgagaaagaagtatattggactgactcagtgatttctgcttcggtaggagctctcactggacttgatgaactcaaattctccacccactgagacatcctagtccccgtcgaggtggtagcagcagtcgtcgacggccctgccggtggatttggcgttagtatcgtaggtatctccgtactgggaccattatttgtcggagaattctctgcagacggagtggcctctgattccaactgcccctgcgcagagctggacaatgtctcaactatattttctcttggcgataaagcgggtacagccacaactgctgttcttctttctacccctcggcctggaacagacgcgacagtgtttgcctctactcctatccgtcttctgaacctacccagtaagtttctacccactacgatccctggtccatctcttctcgtatcgttttctggccaggcaactatacttcgtttaggagggacggtgcttcctaggagaggtgaaataaaccgatttgacagtcggactagaggtaagggaactctgaaaaatgaaagaagaggatgtcgatcgatcaagtaggatatcaacaggccaattagaggcattgtcagggtggtgtagagaaactgaaggttaccgaaaaagaatatcagcgcatccagccagaaaggaagaaatgatggcttcgaatagagaccaacaaacctgagtggaaaggccatagagaaagactttgtcgcccaactcaatcggaccgattcgaacagtatacaaatccggaacaagttgtccgtatctgaataaaatggcgaacaagattgacgtgggtccaggatgtatgttgttgatgccgaacattcggtgagctgccaacagaaagagaaaggaaaacgcgctcgagagtacggcagatagaataacgaaggacttgatcacacaaaaatcaggaccaggatgagctgtaggcatagtctgttcttttttctagtaacatgatgtgactaactgcgaatttccgggaaccatatgctcgttcgacatgtcttgatactgtgtacataagaatctcgaacagtacaagctccgacatgttgacataacatacaggttgaataaagagtctccagaactgaaaaaaagcagtagatacgtcatgtcaatatatattgagaggtcaagatcaagaaatggttcacatatgatacctacctgatggtacttcgtcaggtgaggactcaagatcaccggaacgtatggtttcacttgagcaatcgatacggccaaagataacaggccaacagagaccatcaaaaactacagagaacccagtgatgtcagcgggtgtcacatccaatacgaccctccagaatcaagctaaccttggtcaccgagacatgatgaaaccccgacgacattatatcttcctcgtttttctgtcctcttggagaaatactcaggaaggaaagtgtgtatgagatgatgatgaggaaggtacgattgcacagcttgcagtgcgaggttgaaccgccacgaaagatttcacgtgatctcggtgtatgtcggcaattgagtgcgccgaggttcccggcattgaccgaatgtcaatccggcaatcgtggattcgtccaagtgaagaatacctgctagtttccttgccgtccacatccttcattttgtactcgttctacttactcagacatcgtcagttcggaaactatgccagacaaagaagttactgctcaagagcttgccaagcattctaccaaagaggattgttggatcactattcatggtacgtctggatcattgtctggatatattgttcttcatcggagagagatagtccgatctgaactctgcgatcccctttttctccatattgtttgtctctctcggtgaattgtttgttctaggaaatgtatatgatatcactagcttcatagaagtaagttcgagttagcgttcctctggaatgtgccagggcaagggtgaaacttatcgaacttgattttcttcttcaaggatcatccgggtggagaaaagattctgcttaaagtatgtaaatcctacgataataccggggtctttgaagtgaggtctcatgaacaggatgattaagccaaatatattctgcatttttgaacgtctgtatagtatgctggaaaggatgctacagaggtgcgtgatttgagtgttatgtgcgattttggaactcgcaactaatgatgtactgatgaaacacctattcatataggaatttgatgaaattcactcacctgatataccgacaaaatacttggacgaaagccgttcgtttattgtccacctgctttgccaccagtctttgtttgtaatgacctcatgcatttcaacatttctaacctcgctttctctcataccggcttgtagaacaacttgggcccctcaagacggagccaacatctgcgccttcggccgagtccatctctggagtagttgagcaaaagctgctcggtagggaattgacagcagtcgagatgaggcgtcgactcaagatggaagaacgaccagcgctgggtgaggtgctcagtcttcatgatttcgaaggaattgctagagaggttatggagcccagaggttgggcgtacgtatctcaagtttcatcttgatatccctttcaagtccggggagagctgactgaatcgtctgagaatcgacagttactattcttctggagccgatgatgaggtgactatgagagaaaatcacatggcctacggacgagtcttcttccgaccgcgtattcttcgggatgttgtaagtttgcgaatacacgccacacgttctcttcattgcagaatgaccaatttgaacagttgaatcttgaacgcaacgtttgtttttaatgtatgttccagaccgaggtggattactctactaccattctgggccagaagtctagtatgccaatttatgttggtccttctatatcttaacacattcaagaaatccgacatcccaactcgaagctgacaatgtaatttcatctcgtatcagatcactgctaccgctctcggaaaactgggacatccagaaggagagaaaaacctgacccgagcgggtggcaagcatggtgtcattcagatggtacttctctcttttgcctctttgcatctaaaggcaagcgtggtgctgaggctgatgttttaccaaatttagataccgacgctagcaagttgctcgttcgatgagattgtcgacgctgccatccctggccaagtccaatttatgcaactgtgcgtagtctctttggtttcatgggacacaaagacgcaagttattaattacaaggttatcatttacttccttcaccatacataccagatatgtcaacaaagatcgagaaaagacaaagaagattgtccagcatgctgaatcgcgaggcatcaaggtcatacctttcttttctttctgatagactctctcgacgacagtttggactgactatttttcttgcaatcggatgatgacatcagggtctctttatcactgtcgatgctcctcaacttggccggcgggagaaggacatgcgtcagaagtttgacaactctgagggagccagcgttcaacgatcggattcagtcgaacagaatcagggagctgcgcgtgctatatcaagcttcattgatccagggttaagctggaaggacatggcgttcttcagagagatcacgaagagtatgtatttcttttactgtaatggtcgcattgtaacacagtcagtcgattgaatcatatgtttgatttctctgtggcatcaaaagtgcccctcatcttaaagggggtgcagacctgggaggtgagttctacatcctctgttcaaatttatctctcttttcgttgaacattttctatttctagcgctaggctaatccatattgttgtttttgacacaccgttcaggatgctgttatggcagctgaagctggcttggatggagttgttctttctaaccacgggtaagtcctctcccattatcctgttcgaaatcttcgatgatagggttatcttgacgaaccatttggtgtgcgattggcctacatgacactaagtggacgtcaattggactcttcccggtccggtctagaagtcttggttgaagttgtaagggaactcaaaaagagaaagctattcccgaacccaaagtttgagattatgattgatggaggaatccgaagggcttctggttcgtctatcctttcacttccactaccttagccatgctcttaatatagtttgccacattgcatcgtacacaatctaccagacgtcctgaaggctgtggcattgggggccacgagtgtcggaatcggacgaccattgctttatgcgtatagcgcctacggccaggaaggagttgagcatgctttccagcttcttaaagatggtgcgcttcttctctcaatcaatttaatgaacggtaatcatctttttgagggctgacatcgccaattttgctctggtctgttgatagaatttgagatgaacatgcgtctactcggcgctcggtcgatcgaggaggtcgtacctgagatggtcgatgcttccgctttgacgcaacacaacagctcgcccagagatgagaagtttgcttctacttgtacgtctagcttctcctatgtgatatattgaaaagtcttcaaaaactgtccactgatggacctcttattctatacacgaatgacgtaaatatagacgagaggctgcaaccttcgacattgcgagccaagctctgaacgaacctcattttgtggctctctcttccttctctacttcttttcttgcattctttatcctttgtgattccacgtgtcgatagtgttgtatgaacctgtttggattttatgtatgttgaaaacgcgtccaagagaaaaatcagtcgcgttgttttctcgtgttcctcgacgcgtcttcagaaatcaacgcgactaacgaatattcagcaactggcattgaccgaccactaacgaccaacgatcaatctctcatcaattcatcaagagtaacgagaagcatagagtgtgcgggtgatgtattccaccaatgttcgtctctcaatcaatctgttcttggagagtttggtctcgtatttttgtggtgaacggaactagacctgacgttccttctacacgagacgtttgatagacgaagagcgtccgtacatacggcaagagtaaaacggttggtggtttattcgcttcacatctaactttcgaggcagctcttaattttcttctttcggtgtgatgtttcaaaacagcgagttgtcaaaattcatcgagaccatgactttcccgaatctcctgctccgcctcctataaagaagatcgccatccatcaagtcgccccacgaacgcatatcgctgtgtcccctagcaggaccagcgcagtcttcagacctaccagattacgttctgagtttgctgtggaccaggcatcaccggtcaaattcctaaaagatgtccaaaacacgccggtcaagatcagcatagtagacaaagagaacagaaaggggttgaaggctaggtcgaagctcggactactaaatttcaacaatctggaagccgacacggatgatgaggagcctgactcgaagattgagaaacctatgaagaccaagtcgaaaggaatcgtgaaggagaaggctagattgaggatggttggagagaaggagaacgcccaagtggaggatgagcggaaggcaaacaagaaatccgggaaagagaagtctataatagcacgacccggaaaacttcaagcgaccagatcatcatcggctagttctctaaagtctgttatgcctcttgagccgggacgaaccttgtcctcgacatataaaccagtgatttcctcggaaaacatcagttccgctcctatatcaaccctggctcctgcttctatctcagctcctgaccttaacattccgaaacatccgaagcgcacttctcgtaacgttcggatctctccttcttcaaaaattgttttctctccaccggctcgccggtacagtaattccaaggagtcgactccgccctggcttacttctcggctgaaaggactagccatgctagatacccctccttcatctgcttcttcgcccgggacaggcttgggagaccgatactcagatcccattcttatcgatgaggatgaacttgagcgcgcactcctttcttcctctttgatgccaaacgaacttcctccgatatcacgcatgatcaaaccctcctccgaactagacgaagtagctgaagagttgtacgatttgtcgctcatcgaggttgaatcgcctccactagatactgctttgtatgacgatggcgaggatgaagttgaatgtgaacaggtcgattctgctgttcggctaccaatcgatcaccttttagaagcctgccatcaaatcgatcctcctctctcgttcaccgagtttgtaacgacccatcagttcttccctcattcaacatccagaaccaaagtcacattcaacaaggtgggcgaggcgacatattcagaagttttttccgtgggacttgctaagcaaaaggcaatagtgatgaagatcattccgcttttaacggacgaagaatgtgtcaagttggacatgatgggaagaggcggaaaatcaaaggagcgtcgagaggaggaggaggaggaggaggaagaggttggaccagaacccacttggtccgatccaagggatgtcgcgaaagagattagcttgggaaagctcgtcggcgagctagatgggttctgtgaggtcaagaggtatgtttttttcttcttttgggatcaacatagatctttaacctgccatcagaaacagctaaatctttctttgactgttgtaacgaagtgcatttgtggtgcaagggttttaccccaaggcgctcgtcaaagaatgggatgctttcgcaaagtcatttccagagcagtgtgagaatgcccgaccctgtaagcttcatctgtttgttgtgattgttatcaattcgcgttttcaagctgagcgcgatgtttttggtgtatcatcacattccttggtcttcttctttgatagctgtatttggtgcgtcacaacgatatgcggtactcttcatgtcgtacgcaggaaaggacttggaatcgttcgccttctcaaaaacacacgaactctcgcaatcggcaggggttttctggtcgatctgtaaaagtgtaggtgacgctgaaaagattcacaagttcgaggtgagtttcccatcaaggtgttggtaaaatgtgtcttgacatatagtatgactgacaacttcgataacgaatcaacgtggcagcatcgggatcttcaccttggtcagattcttgtcgaaccaacggattgccaaccatacgcgcccaccggtcctttcgactcgtcctctggattagggctcacactgattgactttggactctctagagtggagatgcctgatggaaacattctttggtcgcctatcgacgaggaagtctttgatggcgttggtgagtgatcttgactatatactgtgagcagttgcgggtgaattgatattgatattgatcctgaccgaaccggttggaccaaaaaaaggaaaacaatgggatgtgtacagagcgatcagaagccatattggtgatcgaaattgggaaggattctttcccaaaacgaatctctttgtatgtccctaatcttttccttactctcaacatgtatagtcaacaagagctcatccgtcttcgagggtcgtcaaacgaatgaacagtggctgtcgtttatcctatcgtctcttcttcaatcccccgaatcggtcgctctcgtaaaatcgacccgatcgacttcctcatcccgatcgaaaccgcgcgtgtcgataacgacggcgcgtgaaaaagaagcgctgaagtcgatggaagccacaaaaagggaattgacgaaaatgttgagtggaacaggaaagtacggagagttcgagccaggggcgaaagagttggtgttgtggggtcagtcaaaagggtggtgttcggtctgaaccatccttgcctctttctctccctgttttactcttcctcgctttgttgcgcttgctgtttctccaaacttgcctatcgactgggactgctgaggcgatctctaccaaccttgacgagagattaaccttttgctgaattctcatgtaaacatcctactcacctcaatcgcatacttcttcgacaactctgggctcaacatgtatgtttcgcataatcgaacgaaccaccctaaacgctacacgtccatgctatcctccatacgatacccctcttacttgacttaaaatccgtgcgacctacctctcgttctgatgcttcactagtatgttctcttgaaccgtatacaaatagttttctttctttctttctttcttcgtgctcgatgttgtatactatgccctaagctttctggacgacggatgatgattggcggtcgacgatcatgaccaagagaaggacctttatgcgatttgcccttacctttctacaatagagaagatatttcactgccatgggtgactgaaatggaagactacatcaagtgatatataaatatatacaaaacaacacaacatatgcacgattcgtttcatcccttgtctttgtgagatgacattggagggaactgacaaggaagatggagagaacgtaaagatccgataatcaagtagacgggggagtggagaagagtgcttgaggaacaaagcaagacgagagagagagagagagaaagagaagcaaaggagcggccgaagccagagatcaaaggaaaggaaaggaagagacccggttggttcagaaaggagggtccagatcaagattcatctcgcttaaccccagactctgcctctgcaggagaaccgctctgacggcactgacgacggcctcggcggtcatctgaagggtccacacgcctacagaacgcatccgttgttggttagcttgttgagatgtcacatgatgtgctagggctgcgtagacttggtttgaagtggcatcgagtaggccggctagggagggaaacagaaaggggagaaagcaaaggaaggaggattagctttttttgaggtttagatgacgatgagaagagagggggataggagacttactttcgaaaggctggtttgagatatgtgcaacgaaatccacaaagaaaccatgtatcagtgtcggtcttccaaggaagaattaaacaaatctttaaaaagaacaggcgacatacagtccaagagccatcgaattcgctaagatcagagattacctggcattgaataggcaacagtgttctgtttgcactacagttgttatcgttgtttcgatgtgaaccaaagacaatataaatcagattttggtgcgattgttacaggttcctcctccgaaagagagaaccgagagaacgaagagggatgaaaaagaaaaaagagacaaacttgatgaaggcgacgatgggtctgatgagcgcggcgttaacataactcaattcgctcggcatataaggcacggccgctttgagatcccggaatctgaggtctacatcaaccaccacaactcttctctcttcttgattttcgcttccctgtttgtcatttgcacctgtgtgtgcgtcacgagtcggttctttggtgggagacgatccggggccgggagcaactaacgctggctttcctagcggccgctgaccgggattgatcaccaatcgttggtcggccgcccaggaagaggaatgcggagagtttccagaagcgatttcgttgacgtttccgatgatttcagtgaggacggacgtaaagtcaacttcatcatctggatgacggggaaacttgacgtccatcacgccgtctagctttccagaagtaatccaggcgagtggaccagaggaggaagatccttggaggtgatcgatcgggagtccatcgattcggagtcgagcctgatgatatgatgggatgaga

SEQ ID NO: 1190 - DNA, 63594 bp, Xanthophyllomyces dendrorhous
tgagaagaacgcgtagtcagacggcagattgagaaaagagcaaacgggaacagaaaaaaagaaaaaaagaaaaaaagaaaaaaagattgtaccattcgttgccaacgaccttccttgagatcttcgcccacagttttaccgattcgttggggtttatgtaacgaaaagagacagttgtcgtattgacctgttatcgagtctgctgactgtgtatacggacgatacgacgtctcacgtcagctttcaggaagagataggaccgtacggcgagacacaagaacgagagaaatgagaacaagaagaaagccaaaacacgtaccaaaacatcatagaacagccatttcttcctgaaccttcccaactcggccttgaagatactgacgttgaacggtctgaacccgccgggctggtagactgtacagagcagatcctcaacttggaaggaagaaagattgaaagaaccatcacctggctgggttggatgtctccactcggaaggaatccaggggtccgaaggatcccatacgacgtttcggcgatctgaggttcgtgtgaggacaagagtgcaaagaggcgtgagatgaagagcgtcaggcaaacgtctttctgagacagagtagaccacataccaaatacgcctcggacgcctttgacgagcgcgcgtttgactagaccttctccattgagccaactgacgaaactgagctcgacgtcgatctgatcaacgttgacatcaaacattgtataatttgtgtcttcttcttcttcttcgttcttctcctctttctcatctaacgaaacggacgaagcagatggaagaggatcgggatcaggagcgataagtgagggatcgccgtctgacgaaacatctcgaaggacttgaggtatggaagaatatgatggggacgtgagtggccgtcgggagatgtagacgtttcgaagggtgattgtggactttaataaattgggtaccaaggctgactcaaagctaaacaggacgtgtccaggaaggctttctcagtacagacagcatcacgggacccttgaggtaaaagaagacggtccggatcaaccaaggacgtacacgacggtgatgccagagccttgtgtgaagtaatccgagagcgcgcgagcgatataatctgcggaaaccgttcagaaggaagggattgagctggtctgttctgagttcgctcatctaaatagctagaaaaagagaggatcctttacgaaccttgtaaatccagactgttggccgtccaaaggaccataccgacgaaagtggttgttcccaaaaccaaccagcccagatggccgacaagaatccagctgacgagggcgctccactcatcagcgttgaactttctgaaacctcggatggtgagccatttccatctgattcggagtcgttcgaaccagtttgtcgagagtttgagcaggtcgtgcttcgacggacggctctgagactctggtaggagtgaggccaatcgacgcaacgacggtggatatgtctggatgagagcttcgtgagaatagggagaaggagatgcagaagagggagagggactagttgaaggcggactggaagactgcgaagaagaagaagaaggaagagagaaagtggaggacgaggaagaagaagagggaaccgatgcgggatcatcaggtggaggttcaggaggctgggaggaagaggccggtggatgcgagtgaccgaacgtcccacgtccatctgaaagcgagccatcgacagaaggtggcgaacgcgacgaaggagttggtgggacggctgctgatctgaacaacgaatgagagaacgacctgtaggaaagctgactgaacaagaaagacgagggaggacgagaagaccgtcctaacgaacgggatgttcccaacaccaacggagctgaacgacgctggacatggaagaacgtctgaacgatagcgtatcgttcgaacgatgccgacgacagcaggcgccttgacgatctatcgagcgttctacgagacacggacattggcgtatgctatcgacccaagcgattcctctctcggtctggtctgatggtggctgcctaaagagaggcgaggcctgggttgagtgctgacgacgggctgggtgtgaaaaattcaaactccggtcgagcgcgcaaaggctgggtgatgatgaggagggggggacgaggtgaggtgaggtgaggagagaagagatcagatcagatgaggaaggagtgaggaggataggtgtgagtagaggagtgtatgttggtgtgctagcaaagatgggcagcaacgtaccagatgagcacttggccatgaggatgtcgtccgtgttgatgatggagagcatgttcatccagagccgacgccttggattcctatcgtctcttccctcggacacacacacatacacatatgtatatatatttatagacacttttatgcgcttgacagtgctcagcaaggatacatggcttgctcacagactgcacccagagatgagcccgaacggaaagagatcgaacgtacagactcatcgcgctcacagaacaaggaaggagagcagccaggtcgctttcgattcttcatcatctttaccttgacatcgacctccatctttcgttcgccttgctttggctcattctttctcgcttatactatcattatgggagtccaacagtcgatccttcaggcctttaacggttctcctgcttctactccagtcagattcatcaaggtgtccatccaggacgaacaggccgtgctcgcaacctccgttccgcctagaggatctgtgaaggaagactttgctctcatcgaggagaacgctcagatctcgattacagaaccttgctatctgctctacaggctcgatgggaacaacgcctggctctttatcacctatgtgagtcttctatcgaggtttgcttgtatctcgttcacacagttcagagatggaacgatggaccgatggaccgatggaacggttgtctcaggcaatttaccagtcaaccaaccaaccaaacattgagctgatctctatccgatgaaacaggtgccagatgccgcaaaggtaagagacaagatgctctactcgtccagcaagtctcgactcgtcaaagctcttggagagaccaattttgtgcgtgtttctccctggtgtatatcccatgtccgtccagattcaagtcctcacgtcacattcgcctgatcggccgtcggccgtgtcgaatcttagaccgacaccatccatgccacctcgccttcggacttgactcctcgggcatacgaactccatctcgcagcactcgccgctcccaagccactcacagagaaggagaaggcgatggcagaggttcgggcggccgagtacgaagcttcgaaggagggatcgatgaggggcaccggtggaggcgtcagaggtggagccggtccgttgagcggtgtcatgggcgtcggcaagggactcgtctgggctgaaggtatcgagcaggctctcgaaggactcaaacaggatggaaagctcgtcggtctggtaagcttcgttttgctctatctcgttcatcatctctcccttttttttttttactggctcagcagggcatacacccttcttaactctggtccaagaagctgatccatctattgtgatcactttcacttcacgactgtgaacgcgcacacccacgtccacaaccacacagacgatagacccaaaatcgccaaccaatttgacgttggccgtgaacgagtccagcacacttgccctattccatacccatctccccccgtcgtcccctcaatacacattcttctcttaccgaccgacggatgcgtcagccgagtcaaccccgatcgtattattcgtgtacacatgtccaccaaaatctccgatcaagatgcgaatgatctactcgagcagcgtcggtagtctggtcgccaacgtcaagacaaaagtcgggattgaggttggcaagaaggtgagaagatggatcattcagattcacacaaatgcccgctaacccagcttattattttgtttttgtttttctctttcatttctcctcatagattgagtcctccgagcccgactcactgacagagtccgaactgctatccgagatcaagcctttgatcagtacaaaccctatccggtctttctccgttccgactccggcaccgacccgaccgtcaggcgttgctccgaacgcttttgcctcatccttttctggttcaactacagaatcaacaaacactcttccttcgtctatgcctctcggttcaggtcaacccacgagctctggaggaccgaacggaggaaacacatttgccaggccgagaggaccggcaaggaggccggttggcggaagggtggcggctgccagaagcgcgttcgaggcggccaatcaataagatctgattcatttcttcgtctgtagactcttcgagggcttctctcttccttatttttcttttttttcctcctttcctcaacttgttgtcttgataaagatggatgttttctgtcgagacgttgtgatcaactttgccttggggaaatttgttatcttatcgctcaacggttttatccgatctcgcttcttccttttcgtcatcaacgtccatcatccttcgtctaggccacattcgctttcgtccttctacatatagaaacactcacacacatacacatacacatacacatacacatacacatacacatacacatacactcactcgacacagaccactcagatggacgctaaggacgcactgcatctctcgtcctcggttgctggaagtggcataggtcttgctgtcaaagggactcggtttggtgtatgttcagtgctggccactttcaatctctcctttcgttcctccttctttatcaacaaagcgtgtggctattctatgctgactcgctcgttgaactctgcttcttgatacttctgtctcctctttcttcaaccgtcggcagcttggtatcgcccggaaggtgtcttctgggttcgccaccgtggcgggcacagttctcgaccagacgttctctctcggcccaccctctgaaaacttcatgtccggcccgacttctacgttcttccaagcagccacgacctcatcgtttgatctgatagagacattagcgatcgctcctttgcttctcactcaaaagttcacgacgtctgctctttcgacagctgccgaggtcgcaccctacttcttccgttcatcctcgtcgtccctcgacgatcggtcgttagaccaagaagggttttctctcgctgctttcgtcagactggtacaaagagagctgaacgacccaactcagggcctggaaggagtcacctatagtctgacaggcgtgctgacctcgatcagcgcctgggcaggcttgcaagctgtgacagccgaaagatggggcgacaacagattgctgtctggtctaaggcagattgatgtcggtagagagtgggagggagtcaaccaggatgttcttaaaggagaatgcagagaaggagagagggctgcagatgactcttcatcaatattgacacctccaccgtcgtcgtcgccgccgccgccgccatatgaatgtccgacaggccaagggcaaagtgttctgcaggaagaggcgggaaaccaggtgaaggatatagatgacgaaaaggtcaaggtaacagccaccgaagaaatcacttcttcactcttaggaggttcctttacctcctgtgtcatctcagcagaagtgggcacgaaacgaccaccatcttctccttcgtcccaagcgacttcctcgacgtcgacgtccagtcaaaagcaggaggtgtctttcagaacgaacgtgatcaggttttcgaggatctgtctaggatcgtacggaggatccggactcttgtttttcggtgtccctgttcctgtcaaagaaggttcggtagaagcagataagaaggagaaggaaaggcaagaggagatggcaaaggagaaggagaaagcaaagaacgctggccctggattttgggatactgtttgggggaaacacgaccaaattatttgtaagtactatactcatgatgaacacactggtgttctcgtctctgacagctcttggccttgatgaacgaacaacgctcttttccttctcttctggcgcgccagtcgagcattacgcggagataggtgctgagaatgaagtatcgatagaaccaacggatgtgcctgcttcaccgagcacagcagcagcttctgcagaactcttgagtgaccaaatgactgagacagaatcgaaagtctctggagcggtcgtccagtccgtccagggccttccccggttttggattctcaccggtttgtctgttatcctgctgtatgtgatcgtgcgatctggatgcttaccctttctcttgttttccttttccgtcactctggtcaatcacagatcatcgacggcaagaagttgtgctggctctaagaggaacgatgtcgctaaatgaagttcggcgcattatctttactctcttcattgatgtaccaggtactgatgtgtgattgcgcgaatcgtctcattcagttggctatagacctaacgtgcgactcctccctcttcacgccggcctcttcgtcgactttggtttcacctccgagagcatacctagttcactctgggatgcttactctggcccgtcagatggcttccccccgaggactactacatcaagccgtccggaaggctctggaagccaacgaagggtacagtctacagatctgtgggcattccctgggcgctggcgcgggagctatgctgggtatgatgtgggctggtttggataccggagagacagtgagggattcagaattgcccgtgggtagaaaggtcaaagtgtgggctttcgcttgcccgttcgttcactttcttgtccgctttctcgtcactttcttgagctgcttttcttctttgacgatactgatgcttgtaaaagaaaattgggcaaacagatgcatcacttccctggaactatcccaattgtccaaaggattcatcacctccatcgtcctctcttacgatctcgtttcgcgtctaagtctgggcagtattcgggacatccgatcggtagttgattggttaagctacgctacgaacgacaagggaaagggaaccgagtcaacaggtaacgaaggcgtagatggcttgttaggcaggttggcgagattcaagttgggtggaaagggaaactggatcgataaagaggggaggcaaagagaggaggactgggtgagtttgcgcaccgtcaaactctcttcgaatagaactaaccccaagctcgcacacacttttctttttcgttctcctttgtccctcgatggggaggggaaaaacaagtttttatcattaagaaagacgctttcagctcagatgcaagcacatcaccttttcccggcaggaacgacgtttcttctcctgcgcgatacagaccttcaagcaaacacattggcggaactgccagtcaaacaggggaagggatcaagggtgtttgaagttgtcaagccagatatagtttttggagaaatcgtctttgatccagggatgttgaggttcgttcttctctcccctcctgtctatctattgtagtctgctgtgaccgacattcctgatgattcttcgaccatcgtcttggggttttacgatcgacgagctactctagtatgcacttgcctcaacaatatgagaaatcactctcggcagtctttctctagtcagacaaatctatcatctattcatctccttttctctctctccaatttcctttcttcctatcctcttctcctcctttcacatagtactttcagatggaccaacacatatttcataacgacccaatagttattcataccattgatccaggcgatagcccgcacatatcttctttcacgatctagagactctgcactataaattcaaaacaaaactccgattcatccgatcacatgaattgatagaagaagaatagagtcggagcgaggaacaagcgcgcttcgttgacgcggaaggaggtataaacacaagctacggtatagggaagaataagaatccgatattctggcgaaccaaccgagcacaaatcctttctgtctacctccgtctcccagctagatatggtcggtgttggcaagcaggagacagggagaaagaagcacaggtcacagctgttttcgtattctttggaagcgcgcgtctaaagggagggtctttgatggtctcatacggttgcttctatttccttgctgacatagtacaacctgcgcagggagattaaagcacaacaaatgtttgagtgaatcgcaacttaaaacagaactgaggaaaaagcgcacctgcttgctacatcctcaacgacccagtctaaaccctcgaccagattctcacccgttactgctgaacatggttgaattctccaccgatgagacttgatcgatgggagatctagagcctgataggtttgaatcgataggaaagatgaaaaattccattaagcagcatgctctggtcttctttttcctgtccgaacgaatgcctcaggtaagagaggagaacaaacctccttgatctcagcgggtgtaagcgcattgctgacatcttgcttgtttgcaaagatgagaagagttgcacctgccagacgctgtttcgccatataattcgtgaaggagaacgacatcagtaggaaaattctgtgaaagaaagtatacggaagatcaaaacaaacctcttcgaccaagagcgtcgccaactctttcttgcaatcttccaaccggaatctatctcccgaatcgactacccaaactgtacatattcaagaaaatatctgtcaatgggggtctagctctcaagaggaacatagggaatgccagcagtcgacagaagaaggccaccaaccgatggcatccgtcatttcaaagtagtttctccagtatggtcgaagagttcgctgacctcctacatcccctgattaagagcacggcacacacatcgaagaataatcttgacacttagtcaccccgatacagctgctttgagtgaaaagatgataagtgaaacagaggacttgcaaacattcaaagtatagctcttgtgggcgaacgtccgaatctcgaaaccaagggtagggctgacggtcctgatgtcttctccgttgagtttcttgagaatcgtcgttttcccagcgttatctagacccctttttgtcccatcgtacggttatatggccggtcaatatagatgagaatgaacagattcatagatattaggtagatcatcaaaggggagcaatgaataaatggaacaaacagaaatagaacgcgcatctcgcgctctttgaatctgttctttctgataatcgtcaagagtcccatttggctagacctacaaaagaggtgaaatggctgtgtttacggatgcagatgtgtccgtgtgttgaacgaagagatgaatgcaagatggtcgatgtctgatggtaggatggattggctgtggaaggatgagaacgagcgttgagtcgtccagctaagaatttcccgttccatatccagactttcattctttaccttaactccactctcaacctttttgccccacctctcctctctttctcttctacgatgtctatgggtcaagaaagctacagtgtcaggttggtctgtcttccgtctcttcactgccactcgccgatgctcatgtttgttcattgccgattcctccagggaagccgcaaagacgtactttcctgatggctacgtatgtgcaatttccgtttctctgttcttctcttcttacatgacaattcaacactacaagatctgacccaatcgagatatctttcctgtctcatttatcatgcagacgatgtctatggctatgcgacgagctcgtcgtgcgtacttctgggggaacgtccgtggaatgatcgccacgttcgctttcggaggagctatcttctactactctatcaaggctgtctctcaagatgactttgtgcgtgtttttttcctattttttatgtctcacgaggaagcttcgactgttcaggggatagagtggctctctgatggacaaggctaagagaaagagaaaacaaaaaagaccccaaatcctacttctttacatccattcttcagatccatgcgtccaccaactttatcgttcgaccaagatacatcttgaagccaactaaccctctcatctcgtttgcttctcgttttttcatcctacacttctataggaggatctcacggaccttattccttctgccgagatccgagcgaaaatcccctcgctcgaggatcaaacggctgccaagaaggcttctcgtctagccgcttcatccacaacggactctatccttccttctacattctcctcttcgtcatcttcgtcaacatcatcagcctcgccatcgtcgtcttctagtccgatactcgcctcaacagctacgacagactggacatcgttcggcgtggcttcaaagttgatgtactactggccgagaggggaaggtttggtcaaaggagcacctgcactggacaatttgggtaaaatgggtgataggaggggtacaggatgggcagatgccggtagggtttgagactctcatatttggtttcagtcagcagggttcacttttatatgatgaacatgcagtgatcgatatgttcgcctatcgaatggaagatctgcttgcaagtcatctgctgttcagagccggtgaaaaggcaagagactttggaaactagtgagatatgttcgtatgttgatagacagaagaaataagttggttgtcacaacatatatctagtatttatacactaatgcttttccgagtccgagcgctatggatatacgtcctccaatatcttatccttcgccactattactctctatcttctggttttaatgaagttgtcatgttgaatttgagccaatcctctcttcttcttccggatgggaacagagaaacgtctctctcgtaaattcacgagaaaagagctaaaggaggatttagatgttggttgtttgaacattccccacctgaggtctaagagtcttgaagacgatgagttaaatctatcagaggccaagttggactggaccaggttcggtcgaggtcttatgaagaaggtctcttgcgtcctcgacgctcgtcaaatgtcgctctcgtcacctttagatgaagaatcaacaaattgtctcagtgcgcgccgaacgacatcaacagatcactaggtcgctagatgagaaaaagaaaaaggcgtacaggtggtagaagcgcgtcaagaatggattcttcactcaaggttgaaacctctgacgcgaggtaaggtcgcaatttggggtacagtatacaccatgtatctgctgtcgaaagatgtcgggaggcggtcgccaccaggccggccgtgcctgcagagaggaggaggaaacaggaagggcgacaaatgttactcatcgttcgtatttacccatactagcgcgtgatgagagagaagctgatgaagaggataagaacaaagaacttactttgccgaatccatacgtttggatgggaaaggaagggataactcttgcccagaagctcccacaaacgaggacgtctgaacaggtcgagttccaccaaactttggaatgaagcaataaccctagccactacggattcctctgggtctgtaattcaagataggaggaagcggttgtgtcggccaaacgaaggaaaagtctcttacgtcggagataccatgtttggttcgagcatacgtacctagtaatgcctcgatcatcatcggaaagataaacatctccagacttcccgccccgacgaatgcagctacgccgacaacactctcgaagaatgcctctctcaacatccaatccgcatcgttcaagtaggtaaacatatgactgagtacgacctcgtttgtttttgaccggccaaagaaaaggcaaaaggttgtgatgtgtgcaagcacggcccgtttgaccgctggagaaggatctgaaagaagactggagacttcgttttgaatgatcctgtggagctcttctttcgattcttcataggtcgtctgtgaagagaagatatataagtatactggctagacaaaccggcaacagagtgataagatgagccaacctcattgaatgcagcatgctcatccgtctcttctgaaaatacagccgtgcctcccctggaccggaaactttccgagatttccagaaaccgggagcctgtctctgttaaggagcccattgagctggcataggcgatacgaactgagacctcttcatcctttgctagatgccatgcatttgggagaatgtactcggttacaactgccatatttgaaggggtgactactgtaattccttcaagctaggtcattccagacaagatgcagacaagaacaaaaaaaaaaggtgttagtaagcagaacgaaaagccaagtccatgttgcagatttgccggtgggcaaaacctcgctttctgttgagatacaaaattgaagacaggaacgaaccatttgagctaacgcatgaatggaagcagcgcgcactccaggtgcctcgtctgataacaagacaactaagaacgggcatacccggtccagtttggattcatccgataggtacacacataactcggccatgatgtcaatcgcgttcgtcttagaagatggtcgtcggcagcttcggatgttggacgtgatgagagcgaggacgagaagagctaggccatctgttccaaaccgcaggcgtgtgagccgtcatattttacagattgaaataggtctggagagcgctacattaggaaaaatcaccttcagttatgatgtctttcgagacttcttcacctccttgatcgcgatgtatatctagttgatgtttgatatctcccatatccatcttcaatctgtcaatccgttgatccgaatcactaggcagttcgtcttcctggccgaggccaagctcttcattcaaaggcgcgtatgtccgaataaatgccaaaggagaaaggttctcttgcaaggtgacgttgtaaggatggaagaatgagtagaagaactcggacagagtagttcctcgatttgattcgagaagctgttcaaacgaaggacgggatgagggttcaagcgaagtcatctgacgaaccatggcctattgtatatgcgcgtcgtcaacgttatcgtcttctgggcggtgaacataaagagaacggaacatacctgaatgcctagatccgggatctcactcaacacagcctctggactgctctcccccttgcgccaaccaagcatgccactcagactgaacatgtcctttccctcaagccagagttcacaaatcgtacatccggccgaaaacacgtccatctgttcggtgacctttccgtcacgtttgccttcctccagactgctctccgctcgtttcttctcggctttggttccggaggcgtaaaacctttcgggtgcgaggtagcatgatcggcgctgcgacatgtcgaagaagaaggaaaagtccgcagggtcgtcttcgggaatgtacaccggtttaaacggtgccagatcggtgatgagagcccagttgctcgtcgtcacaagcacgtttgaaggtttgagatctccatgagagacctgaaaggcatagaggctgagatggtgagctttcaatatataccaatgatcaaagagagacgtataatcgaacagacctttctacttctaagctcttgcatccctctaaggatctggtaggtaagccacttcttctctatattcgcaagaaagggtctcgtgctaattattgcgcgaagagttagtcaattacagcccttgagatagatagtacgcgatgaaaagaggatatatacctaatacggtcatatagatcacttgccaaatattgtctaacgagataggcggcattctctgtttcgactatggcaacataaggagagatattgggcgcgttctctagaatctccttgtccgctaccgaatcaaattgagtattgttgatagtgagtatatgagacaagatcgggaacatccgagtataagatgaatattcctgcccacctttgagccgtctcctccaaactatgaacggaataggctcgtttttaatgaatatcttgataagcaacggtccgtttcggtgtcttcctttgatagtcttcaagaatctggatgtgccgatactgaattctcagacgaaccaataacgtgagtctgtctgcttgcatccctatactataacgtgtttgacgtggatgggccaagaaagctaactatagaaaggccgaacctctgctcgtagacgacatcctttccaagttcttcgacatagctgtcgagtgtggtcgatggcctgggagcattgactgccctagctgggagatttcccatgtgtttgcgtgtgtctgtctgtctatctgtatgtctaccagagagatgaaagcaagatggtggttgatgatggttgatagcgattgatgatcgttcaagagattaggggcctaaacaagatcatcttgatcacttaagtaaccttacgtaatattcatttactcgtctctgctcctgtcatcctctcaagagcgcatatagccatccctcaccatcatcaccatcgtcacctcaggttgctcgtcatgtcggcaaagaaactctcgtacgtcctccaaagctctccaagtcgtatcttggtctgttcctttaagcgctcattgtattttggtttccttggccactcatacaaccgtcttacagcgaccaagaggtcaaccaaatctaccaacgatcaaaggtaagagagtatctcctttctttggctgtacatgtatctgtccgaacttgaatcgctcattacttgtcgatttgggatacagaacgagcttcagggaatcgctcagaagattggagagcttgagggtgaagctgatgagtactcgtcagtatctttatcttatgcctctcttcagtctttggattaagtctcatcagtattatacggtccaatcatatcatatgatggaacggttctctcttttctcaacctttctttagactagttctctcgacacttcttcagacggaagttaaggacccgaatcgaaaatgtttcaggctgattggaggtgtcctcgtcgagcgaacagtcaaggatgtcgtcccagatttgaagacaaatagcgaaggcgtacgctctctttcacctgatatcttttccctctctccctatatactgctgatactgatttttcgctaatatgtcttgtcttttgtcttgatcgtcgatctctttacatgcttccacttctgataacgtcgaccaattcgtccggtatcaacctcgcctttgctcctctcctactctgccgaaaccatgaacaatacatgcctggccttgcacccataccagatcaaatcggttctgtcatctctgatcacccagtacaagaccagagaagaggagtttgagaagtttacaaaagataatggtatcagatcgtcgactgttcagcgcgcatgattgtatttattatttaaaaaaaggggggctagaaggagaaatggatataatggctttcagacgagaacaccttctgctatcttttctaacttgatatgaaatcctctcagagagtagaagaagagcatgacgactagaacagagatgaatgtcagtaaacatatggggtcttgtatttgttcacgcccgtcttcgtccattacgtcaaccatcattcactcaacctatccaacccgactatggcagcttctgtcctcagtacggtcgaaactcttcagaaatgccttcttgaaaggatcccatttgtattcaatctcccgttgatggatatcgtgggtgtaccgagattgtgtgttataatggaccaactcttcagagagacaaatcgcgtcagacggccgggcgagatgtatgatgacgattcagagacggacgagaaggcagatggtacgaagaaggcagcgggaactcggcctagcttcatagcagaggtaagctcttattctatcctcctctgctgccagctctttgttaacgtatccgttttgtcaatccttcctttactttgctttccgttctctggagtagatcttcaccatcttgactttgatctttgcaggcgagacgattctcccacttatacatccagtacctgcatcgtcccatgcatctcactcgattcctccatctgcttggttgacgaacccaacaccactcgtcatgttcaccattgtccattatcttgtgtcgagaacaggattaaacaagtttgtcccgacaaagatgagcgcgttgtgggagaccgcgttagcagggttcgatgcgctggtgagagatctcatttgcttctttgtcctcgcttttacacaaatgaaaccgtctgaccttctccccatcctttcgcacttcttttacttcttcttctcttctcatcatgtacacttctagggtcgatcgattgtggtctgtacattctttgtagatgcgtttcttcagaaaccatacatcgcttcgaattggtacacagtgatcatcctcacctggatcggagtctacgggtgtggtctttcttcttcatatttcgttctcctataatctcttaccctcggctagatctgactctctgtgcgcatcacatgcgtcaaaatacatacttaaacagaggtggtctcgttgtcaatgcgctcgacatgttttcctctgaatggaagtttcagactcccggggagttcaagccctggggttggacgacggttgatttttgggtgtatgttctctttccaaatccaagaaaacctactcattcctgaaagtccctaatcttgtgtgaatttctgatggtttcttcgtgtatgtttcgatctgtttgagattcaaccagaccccctgtatcatcactactctatctgactcttctccaaccacctctccttcctcctgtcttcgactctctttcctctctgtcattatccccgttatcaaccaaacacatcgcaccgtggtcaccgtatagtccatcagaagcaagagcagtatgcggcttattcctcatggtcgtctttcagatcagagcatactggaactttgaaggacagctccgggtgagaagggtcgtcaaagaagcgagaaagagaggagaaaagatcaagacgatgtaactacgtgttttttaactagatggataggattgaaccaagtgcaatgttctgtaggtaggtagatccgttcatgtttgatcgcgattggtctgtaaatattatatctcttttcctatgcgcgaaccagtttcttctctaaaagaacaagaatttcgtacatcgagcaagaataccaaacacggttgggtaaagagagaatacaagatgagagaaacctaatggcgagaggaaagaagaaaggagaaacaagaagggatattcatccttttggtttccaaagacccttcctcgtcatattcgctggtgggaccaatgtattacttccaccgttcgtcttactctttccaaaccctaccgagccccatcttcctccttccttgtccttgtccttttccttctccttccctttgtcttcgctgcctctagtccgtttggtggtcttccctgatggaccgcccccggcgctcgtaccgacactcattccatcagaagatgacactctggatgatgtcgacccaggcccagcccgagcctgaataggaacagattgatgaccaccgatcttgaacagatgagtcatcgagtttcgtttcgtcagcggagggtcttgatgtggatgggtttgatgaccaaaaggacggctggagacgacgaatgatgaagacgatgacgatgaagcgggaagtgacggagtcagcactggttctggtgctggtggcggggacattgaagatattacgtctgatcgaccgatcggacttttttgagtccgattgtctagaggaattggagatactggtacagagtctgttgaactttcgtttatcagtctacttgatttaaaaacacgaggtggtgttggagacggcggaattgagtgtggtggtcgagatggttgcaaggattgcatagtagttccctcaccaccgagcggaaggatggtagaggtggaagtagggaagtaagtcgatcgagagggtgtgggcggaagagaagttgggttttcggatataggagtggcgtatgctgattcactaggtgttcctatgaaaggaggtgtactaggttgccttttggtcaacggtgaaggtggtgaggaggatccatcgttttctttaccgtcgatattggtgttgctgttgggaatcttgagatacgataaggacggccgagaagatgaggatggtagagaaggcacaaacaccgactggaactgcccaagctggctcgtaggtggcggaccaagttgaaagccctcgaatcctatgaccgcaccaacctccctgtctccttgccttcctctctcctcgtcttcctcctcaacaccttcttctcgctcctgcttctgctcttcttcctcggtctcagtctcactctcagtgcgtcggaaggaatccgggggagggaacgtgctaaacgtaggcgtgatggaaggaacagagttactccgttcagggacgttctctccatatgggaattgagggttccgacgattgagtctcttgttcgtcacttgcgttcggacgagttcgtatatgatcttctgtagttgagctctgcatccagttcagatcgaggaacggaacgatcagtaacgtatgacgaagaacgacagataacagacggacagacgaacgagtaggagaagtcactagctgtgaacccgtcattgttcctcgctgcaaactgacaacctgaggagatgagaagccggacgacctatcgatcgtggtcatatcgttagtctgaacaagagagacacaatcaaaagagtagaaggaacaaagacatacatcgagatgaccccatgcgctagcgctggtttttttttcggacccacaaacggaatatacgcgtttcagaatatgcgctcttctcaatcacttcctcccgttctctctgtgatctcgtcaaaggaatgatagcagacagaattcaacatactagtgtagaggtgtgtttccgaaaatatctggcaagtcgaagtctgctcctaagtctaccaaaagctatgaacgcggtcttcaggtaagtcgacggaacgtcggatggtctacctgcctgataggccaatcatccgagaaagatagacgatgaacgagtcttgacgactaactttgacgaagccttcgttgccttcttgagcagctacgtgcaggccagtctttcctcctacattagcccaatccagaacgaaggagactgacatagcccatgatgaaagattccaaccgaagaccgataggaagaaaatgatagtctatcagccttctgtattcagtatatcgccttctttgtcttgctatgaggcagatgacgatatgcgcaagagatgaaaggaagatgctcggaacggacatcgatcatagtatattgaagccattcgaatggccgcgccatgttggaacacatgagctctcgatggaggagtatacagttgggatggcaaagaagccaacagatgaatcaacgtgttgttttccgagtcctgaatagagaaggaagggaagaatcaacgtcaattcagagaccttgatagggagccagaagagaaggtagaaggaaaaaacgtaggagaactactgactctgctcagttcatcatcatcatgacctgccacgacgaccaaccactcaaacatgtcttcattcccacagatcgcagaccacgataatgatgtatgcatgttcttgtctgtgtttcgcatgtcatatcgaccgaccaaccttttaaccaacggaaggttatcctctgttaccgttgtgacagaacgggtttgacagacggttgatttcgaaacgacagattaagtatgtcggaaacgtaaacaaagagatacacccgtgttgagagaacagattgaagaccaaatacaactaatgttcaaaagacttctacgtgattgaaggagcatgaaagcaaagaagacgaaacggtcgtgagctgaccttgaacggcccgtcttagccggacggtcggatctctagaagacaacatatgcttttgtccaaacgcggcgagggagaaggatggggaacggttctcttagagagtgcgatctgtccttcctgggatagatctaaggatatgagacgtgtagaacagattgaacgaatatgttatggcaattatacgagttcgataggtgggttaaaggaaccaaggccgttaggatgaaggactgattgtttaatgatctctctgctgtataaccttaagaaactgtcggtcggctcggaagtgacaaagacgatgatgatgactacgagctgtctctgcctagatcagatatactctagagtgaaagaagctatcggacagaaactagccggaaggacaaatcgagtgatggtttggaggatgtcggttagcacgatgaagatgatgatgatgatctcggtctagggttccaagtcgctatcgttctctcgaccaggcatactcatctactgatctctcgttcaagatcttcatgagcgtcatgatatctgaatgacaacgcatgctgttcttctagttatatagcttttctgttgtgctgattgttaattttattcagccaaatgatcggtaggaacagatttcgttggcaggcaaggctatgaagatagtctcagttgcagcttctttctaggacaccaatctttctgggtcaatttgcagcatgatcgatgtctcgaagttggctaccttagatcaccgcccaccaatcagttcttaacctaatcgtaattcctcttctccccttctcgagtttgcattagaagccaagacttgttaagtcgattatgtgttaggagaagctcatgatatttcaggaaaacatcaaggccgggcctctccctcaaaggtgcagaagagaccgcgaaagcgagtagaagcaaggagcgaagaagggacgacgtccagcaaagacgttataaactagcgttttagggctaatttacttggcagcagcgttggcgacggcggggttgatcttcttgccatccttgaacctggctcggacggggggagctctgtatggacaagggagggagaaagaattagaaattgagaaaagatcttgacaagggaagagcaaagaagactaaccggttgtgtcgggagttgggggccttcttgtcggtagatcgcactcggacgatcttggagtggatggcgcaagagatgcagtgctgaatcttgtggtagagcttgggaaggacgtactctggagaagtagcgaaatgggaagaaaaaaggatcagtggtctgactagaaaattgatcaaggaaagagggaaagcaaagtgaaccaaccagggtaaaccgaagcgtcgctcatatctcggacggcagcagcctcaacaatgttggtgaccttgtacctcttgatggccttgtcctgtgagttttgaggaaaaggaaggaaacagttagtcacctgaatatttgtgaacctgagttcgagcgaactggtatctctgtatccgtcttattgaatcattctgccacccttgatgtcactccggtcctttcattgccttcctgatctcacgacctcttccttcttctgactttctctaagagcctcttgtgttctaagcgaaaactaaccttaggaacacatcgggagcagttggcacatcggacgggcttgacgtgtccacgtcccttcttgtttcgtccggtatttcttcttttcttggtcatctagagaagaaacaaaagttgtgccgttgggagagcgaaaccaaagaaaaggaaagaaaagacaaaaccaatacatggcaaaagagtcagagctgccccatccctaactaacaggcaaggcaaacccatcataggtatgcctgcacaccaaaggggcctgattgaagaacacataccttgctggatggaaagaaagagagagaaaaaaaggagaagggagaatttttcggcttggacgattcgagcgagcgggggcgagcgacgctttcgtttcaaactccgacagggcaggctcattttcactcgcccgtcacgcccgtatgggcacagcctgcagcacgtgtaagggcagatgatgcacgtgctcatacttacggtcgtatgacgtaagctgtaaatctgtagccatggctacgttaccattaaccttgctctctctctgccctacactctcccagaggtttctctgccatctctatagtcacatcattacaggcacacacacagatccacatagcaaatggcatcgttcgaaccaccagcaggacacaccagaccagtcgtgttcttcgacatccagatcggagagaccccggcaggtaggatcaagatcgagttgttcgatgatgtagttcccaagtgagctggttcttcaagtgtgttctcggctcatgagctctgggcgttgaccgggttttctatttgctcttgtgtgtgtgtgtgtatgtgtgaaaggacgtgcgagaactttcgacagctttgcacaggcgagaccaggttggtgcatacatctttatgttagaatcacatacgtttactcaacttttctttcgtcggccgtcttctatcaggcttaacaacgttccccaaggatacaagtcatcaatctttcatcggtacgagaatcatcccgttcctttcgctctctttccacgccgaagcgcgtctgacccgtccgcattctgtctcttattcatctaacgccgtagagtcatcaaggatttcatgatccaaggaggtgatttcttgaaacaggatggaacaggctcatggtcgatatatggaaaccagttcgaggtttgtctccttgaacgttatctttggacagggaccgatgcgaacgactcgtctgacgcgtctttttctcttcatctcattaggatgaaaactttcagttcaagcataccggcccaggactcctttccatggtccgtttcgtcttttttctttcttttactctctcattccttgcctctttctttcaatcctgacaatagatacatggtaacaaaaaccgcccaataggccaactctggaccgggaacgaacgggtgtcagttcttcatcaccgtccaaccggcggatttcctcgatggaaagcatgttgtctttggccgagtcaccggtttgtcccttcgttctatcgctactttttccctctgattgagcgcgcgtgtggaatctcaccagccatgcatcatttgttcttgttttttcttctctcttcctgtcttcctccttcgtgtgttcaaacactaacatgaaaaaagacggaatgctgactgtgagaaagatcgagaacgtaccgacaggtcctaacaaccgaccgaagttggctgtgaaagtcatcggttcgtgcctactcttttcctttcttccactttgggttgctagtttcgactttccctcttcaatcctctcctttgagagctcgttcgcttgaactgtttgactaaatgttctctttgtttgtgcttggacatctcccgggatttttctgatcgagcagaatgcggagagatgtagacacgacaggttaattggaaacagaaaattctaaacaaggcccttcgatccatcaacaagtctagaaagggaggggaaggaaaccgtctaatatgtatacacccttttttcctggggaggcaatctagagaacgtctttgtccgcaaattctgatcgaaccacatacggaaaagacagaaaacagagagtggaaagaggaaaagattcaccaggatctaccgaacagaaaatactgtcgacgcacataacgaaaactcagagtcctttattgaaaaagaccttctcatccagcccaccattctccgctcttgcgaatctctcaaacttgtccttctcaagttttcccaagctgacagaagctctctgagggaaaacggcgatggaaggaggaaggaaaaagtacaagctcgctcctaggatcgacagttgagacaagttttcccaaaggacctttctaggtccttggaaggctcctctggctgccagcgccgtcattatcagcggcgggaagatgagcgtcgggctatgttggggtgagaagagctccgtgtcagcgaggctcggtcggagcagaccgacgacttgtacagatagatataaagcaaagggtgggaaacgaaaagacagacatgttggtcaacacccgggaagcagcactctgcccgacagctctcgttccggccacactactctttcctagttcttcctttgtctctataggtttggcgtccggcgcgccctggggaggttcagttcggttcagtctgaacacggtgattccgtctctgatctctttccaccggatgcatgagatactagagggaagagaaaagataagcacctggccgcgagaggatgactgggtttagaatagactgaaaggaagaaagacaaacttgacgactccggccgaggctacactcgcgaagggaaccatttttcccaataattctttcccggactgactgatcaccgagttggggatcttcgggaccatcctagagagtgagactgcgatgagcaccgaggtaagagtggccgaggtgtatgcggtaagaagctcttgggtggagagtgagatcgatttgttggcgttgttgctttggtagtgttaccaaaggaagatagataagagggttaggcgactggagtgagcagtgaggttgaatggaacgacgaaaaagaaacccactagttgacggccacgttgagcgactggttggcccactgccagaagatcaatgtccggagctggatcggacgcgtgggttcaaccaagatttagcatgtcgatcgttggtctatcaaaaggagcctacttaccgatggattgggcgtcagcatacccgcgcagatgacctgagacggaaaagaagacgtttggacatcaatattgatctgaccgaacgaaaaaaagagacctaaggaaggactcaccaagtttgtcggcacaaaggcggacattctgaacaacagcggcacggccttaccggtatcgggatgaatcgaggaatcgaccactttttacgcgagatgaacgtgatgtgagtcatagtgtcaccagacgcccgagaaagaggatgagcgagagctcaaagagaagaaccgactacacacgctgtttgtccttccagaactgatctctttcggctctgcctacccagacgggtcgtcctttagcctcgtcaatcctctcctgagcttttttaactgctgccgaggactgttcgagcttggagaccggtgcgagcaaagtgagtggtgaggtcaccgtgtaaaagtgcttgagccgaccgatgtacgtcgtgagatcatatctatctgcgctcagatcgaccaggtctccgtttgccggtagagtcgacgccatggctgtatggtgagtgaaggcgagggtgaaggtgaaggtgaggagcgatttatggtgacaagaaggaagtaaagatagaaagagggtccggcgcactggccatctctccgaacgtaaccgggctagggttattgattaggtaagcagtccgtgcttctggtcccagatcgtgctctaccaccatctatccttccctgggacgatgaaaagctcaaaagaggaaagaagagggggaactaaatctactgaatcaacttgatgtgcatctctggagcgaattgggatcgtttagatgagcgcaaagacgaggtagggtcttgagggcgagtgtaaccaccaggctgctcgacccataaccagcgtaattcctgatttttttccaattttttttctttttttcttttttgctcttttgctctttgcctttgctctttctacccagctaccatagacttttccttcctggtccttgccgattacagctggatcccatcgtagagtgagtaccgcctggttagctatccgtatgtctgctcttctggcttccttccttagaggcatcagtcaattccatcggccggccggtcgcctatcactttccggccaacgaggaagaggagaaaaaaaaagaagacagagagagagcgagagagagcagggaacgaaggatgagggagcgagtatgctagctccttgctggaacgcccgactcaactggacatcgtctggctacctagacgagctagaagagatctccttttcgcattcgttcattcaatagggagctactctgccggtttccttgggattcattttctccctttctgtgggctgacgttgcatactagattgaacccataatcttttttctttctctcttttttgtcttttctacttctatcattctctctttgtcttcttctttcctgtatgttccctgcgtcttatcctttctgacattgtctgtgttatttcggggtatcaacagtctttttctagaaatccaaacgtataaatcccttttctctgggtcacttctcttcggtatcctcttccgaccatacctccgaatcgctaggaaggcgatcgacccatctatcttccctttttaccaacagccatctttacgctaaaagtaaacagaagagatcacctcttgagagaaacaaacaagaaacaaaaaaaaagaaatgtccgacacctctgcagcttccacggctgctccggcgcccgctgctacttctaccactactaccactgccaccaccaccaccgcgcccaccaccgctccttcttctcctacagccgctccggctgctcctgctccgatgtcatgggccgatcgagcggctttgaacagacctccttcgtccgttgacgtccctaccatcagcactccttccctctctgaatctgtcacactccagccaacgcccgagcatggagagtctcaccctcgatcatctgagaaaggtcagaagccgtctcgatcaggaaggaacggaggtggaggaaataaggaggatcgcagatcgtccaccgccggtcagaagaatgcaggtagaagggaaggaggtgagcgatcaggaaagaaaggtggtcagcccggttcaagaaagtcaaccaagactggtgaggccgccggagagaccaagactgttgcttctggtaccaccatcgagggtgagggtgagaacaaggaggccggagacgcctcggtcactgccgctcctccggcgccaaagaaaaaggtccttcctggagcccctaaggtgaacccgtggaaggtcaagccgacgacgacgatttctgagaacacgtctgcttcggcttcaaactcagctgagacctctggcgagcacgtcactggcagcccgactttggagaacgagtctgctctcaacaacaacaccactaccatcaacaccatcccatcatccaccacagagtccagcttcccaagtttagccccggcaccagcaaagaagcacagatcgaaacaaaaagttcagacgaacgagcaggaaggtggggaggccaagaagggaaagaagggtacgttcaaatccgccctcgggttgctagatctcatccttcactgatattttgatttcatcttcgtattaacgatcgaacgaatgtacaaacggaatacagaaaagacaaagtggaagcccgtgccccaacatgagcttcagttcactaccgatctctcaaccgagcgaaaaaagtccggtaagcctcggtctgccggaccgaactcttccaacacccaccctggtgcggcaggaagaaagaagaagaacccgtcttctgccaacgccggaaagaagaccaaaaagaccgaggattccacctcggctgctgagatctcgatcgatgaccaaggtgtgacgtacgatatcgaggctgcatcgacagatatgcagagcttgggattgaacccagcagagggcgacattcagatttccaaggaggtcgagaagagtctgatgaagtctgcaacggatgaaaagagaaaggtcaacgggaacgccgcaaaaggggggaagtcttctcaggcttccaaaggcgccgcccggaacggtcagccaaaggtcggtcatcatcaacaagttgcgttgaatgcgacaacggactctttccaacccaaccaggaattcttctacaaccctcacccccacgttgccggccgagctggtggaccgttcccttcggctcctgtccctccgaacggatcgatgcccaccggtcagatcggtaaacaccaggccggcgtcgaggcttactacacccctccaccgatgcccatcccggtgaccatcccgggtttccagttggatcccctcaggttctacctcctcggtcaattggagtactacttcggtatccaaaacttggccatggacttcttcctcagacaacaggtttgtgtcatctcccttgttttgtatcagagtgtttcatcgctaatgcaatatggtttcttctcctccagatggacactctcggatacgtttccctctcaatggtagcctcattcaacagagtaaagaacttgacgaccgatctgtctcttgtccgagagaccatgctgctctcccagctggtcgaagtccgagacgtcaaggacgagactaaggtccggttggccaacaacggttgggctcagtgggtcttgccaggcgcgccggtttctgtcgttgaggagggagtggagaacggagagaaatcagaggacgtggtcgtgcaggccaggcaagcagaggagagtagggaggacgtcgtgattgaggaaaagaaggatagagaggaagaggaggccgtggacgctgctttatagaaagcctccttttcgtttctttttttttctttgcccttgtttcttctgcctccttttcttttcttactttgattatgatcgcatctttgcaaagaatatccagaacgaagggaaataaaagaatgaagaaagaattgggtagcttttcgtcagtcctggatcctcttgttctttctctctttctttctctcgaccttgtgttggcctgaccgaggtcgatcccttcttttcttaaaaaggatgtgaggaaacaagaaacagaaacgacccctatccatatctcatcccaaaacaagaatcagaaccccataactcgtacgacttgaaaacaagacaaaaacatgatatattatcctttctttccttcttttggtttttctttcattttgctcgtgtacaggggttctggagtttctttccttcttccttccaaacgcaaacgcttacgcttccgagctttctcatattctacatttacgtctttgccctcttgttcatttcattcaatgtttggcttcaattttcttttctttctttctggctttcttcatccatcccctcaactgatcttttctctctcttcattcattcgttcatcccttctgtttctcttcttctcttcctctcttctcttctctttttcattctcatcattgtttccaacgaaccggctcttatttttctcaatcttcttcaatcccaaatctcttcatgtcgtgaatcaaatctccaaagtctactctaccaaaaaaatctctcaaagttcgaagtttcaagttcaaatctttatcaaattttcatacctctttcttctgcttttattttaagaaaaaaaatccttctcagactgcttctcgttctcattcttttctttctttgtctttgttttatccctttaattgtttcaaaaaccgatcgagagaagagggccaaacgggtaaacgggtgaacaaacgaacaaacgagagcagaaagtcaatcgttcagcgagggaaacaaagatagagataaacacgagcatattatcaacacaatataagccccagtcaagaatcctgcccatcaaccccttccttctgttggtcgagttgaaatgaaacagagagagcttcgggtcccagatagaggtctttctccctagctggggtttggtttcaaatctagaagtcgtccggaacaaatttggatgcgacctattcgtagttgatttaaagaagagaggtcagtttcgatcacatcaaagcaaattcaaaagtagaaagaagcagagaaagaacaaggtgacgtacatcccagtatccttgattcttttcacccaaaaactctctagccatcctctcactctctgtactcttcggtttgaagaacttgaagtttctctctctgataggaccttcccagacgagatcacacctgttgtcctccatgttctgctcttcttcctcccctcctccttcccgagtggaaggttccccggatgggtcttcatctccatcgacgttccgagcttcttcggtccaatcgattcggacaagcatgacccgtttatagaatttgatcgctttggccgatccttcgacaaggacgagacagaacttggggttgaaaatgcaacatcctgtcaagttgttttgtgtcgcgttctctctgactttaaacttgtgacctgggttagaaaggtatttgattctgaaggagacaaaggtgaaaggcgtgatgatcagtgaagagaaaagagggacttctcttcgaaagagaaaaccgagtgagaatgacatacttgaagacagcaccgtacaaccccttgtcctcctctttaagcttttgggtctcttccttttccttccgttgttcatgcgtcagctttctagcctcattcgtcttttcgtgcttcactcgtctcgctttgacttctcgtctaactttggcctcgaccttggtaggatcctgaatcgcatccgacgccaataccttcatcaagtttccaatggacactagagagggttgcaaaaaagaaaaaagaaaacagacagataaatcacatcatcagctacatactcgaacgaaagacgctcgtagaatatatgcaatgattcatacgtacccttgggcttatcaggaggaatcaaacccattcggactcgatcctgcctgtccttcaagtcggccattcgtctctgcttcctcatctttttcgcttcctgtgttgtagaaaacagtcagtcaatctcgagtcagtttctctccagtcgtcgtcggtggaaacatgataagaacacgacccgaaccttctttgtcaacatcaacggcctgggctcaactttcttcttgtcccacggggcctgaatttggataggatgctggacgaaaggcgtgataggagagtcctccgcgtcgatctttgtctttgaggcttccacatcatcgtaagtcttgttggtcagcaacggctcatcccaccattcgacttccggtggaggctccctctgatcgttcgaccaaacaaacatcacgagtaactgtcagtcccgtttccacacgcgttcaacaaggaaggagagaaaccaaacgacttacgcgcaaagttcgttccgaggcgtcaaactcgctgtccaatcctgctttctttgcagcatcagcaattcgcttcttgagcgcctccatgttggcatccgcccgcatttggtcggctaaagcgacgtattttccttgctgtacgaaattaaactttctgcttcgtctctctctcggggtaggaacgtactcgcccgactctgcggctgcctctttggcggctgtcgccgtctcagcagcgatcgttaggtatgggttgactctctcgacaggaacaggtgagtttgcacccgtcggcggggcaggggtactgttccgagcatttgctttgagagtggcaaacttgggggcaagtgccttatgtctatctctgtaggaaagggtggaagtggaagtggacaggaaagagggtgtggatgactctaggagagacggatgaatggccatgttgagtccggatgcaggccgggatgaagacgaggaagcttcaggagccgggctggtgtgagcctaagcggagagaacatgaaaggacgagctcgtcaacccaaccaactcttatgtgacatacaaaaaagagagagagaaagaaaaagagatccctcttagagatacttactgtggcaggaggaccagtggcaatccctcgagcagccgtggcagccagcactttggctttcgccgcttcaatccttgctgccaggtctggggccaatccagccgggagggagctaggtctggcgactccagcaggagaaattgaggaaggagcgccattaccgttcaaaatccctgaaggagaagcgacagacgaagcaggtgcacgggatccaactgttgaaggggctgaagacgtggcaagagctccttgcttgtaagcagctagtttggctgcaatctctgctcgtttggcggctaagagctcggccgtgctgatgggtctctggtgaacacgtgaattagaaagcagaaaccatgacttggtcagtagctagagccagtccaaagaagtagccaaaagctgaggaagagacttaccccaagatccctatgaacagaaggagaaaggaaaccaaacggggaagggtcaattcatctgaagcaacatggtgatcaatcacggtcgaatctaacggcaaaccacccaaccaaagacacactcacggtttaacaagcttgctaggagatccattctccagaggctctcctggtctcttattggaagacatttcgaagagggttgactctaaagtctgtgtctgatcgagggtgatggttggaggtgaaacgaaaagagaaaggaaattccattttggctttctctgttttcctccaccatcaccaccatcatcgccgtcatcgtcatcatcaccttttccccatagatcagtacacatgagcgcattagagagtaagtcagaaggattccttttcgtcaaatctttgtctgtgtgtgtgttgttgaccggttggactgtttgcacctctaaaagaaagcttgtttcagctgaaagtatattcatctcgcaaagactctatcttttggatgcaacagaatccctcgagtctgatgttctgttcttcttggcttcttttcctccatcgccatcaatcaagttcactgctaaatcacttcagagacagtccaagaaggcacagaaggacgagagtaaggaaaaggcgaatctcaagaaggcgcgtgtggtctaccgagcttactgtcgagatttacacaggctaatccggtgtacgtttcataggctttgcaacaaggaaacactgacggagcacgtatatatgctgccaatgcgatccgtaaaaagaacgagtccttgaatctgcttcgtctgggaagtaggatcgacgcggtcgccagcagggtggagactgcagtgacgatgagacaagtgagtgcctaccgggttgttctctctctgtcttcttgatatctatgcttatgtagctctgtcgcctcccggacggaataggtcacaggaagcatggctagtgtcgtcaaagggatggacaaagcgatggaacagatgaatctcgaaaaggtatgcgcgccatgctctatctttgtttttggacatagctcacacccgacttgtctgcatgcttgcatccgttcatctgctgtctatctctcacagatatcaagcgtcatggacaagtttgaatcgcagtttaccgacttggatgtccaaacatcctacatggaatctaccatgtcatccacaagcgcgaccacgacgccgcaggatcaggtggacttgttaatgcaaaaagtggcagacgaagccggactcgaggtccagcacgagcttatggggaagagcacaagtggtgtggagaagaacttggaaccggtgccggcgaccaaggaggtcgttggagaggaagatgatgcattggccgatcggttcgttcccttcatttgcgtgtatatgtgtcgatcgtgtgatgcccttcggttgtgcgatgctgaccgggtctgactggttctcccttggttcaatcagattgagagctcttcgtcctgcggtctgatcgagtggatgagcgtttcttgttgtacttttctcttgtgtctatcgttcacgatcctgctagaaatgttatgtgcatgtcttttcttctccgactcgtcgctctctggatgattcgtagcctgtgggtatcactggatgtggtctgagttaatacgagacaagaacagacgtgccaatgatgcttccatggtggagagagcccaggcaagaagagatgccgatcaccgcaagcgatggagatgactcgttctcttttttgtttccttaccgtctctccgataaacaaccatctcttaagccgcaaaaacctctatcaccatgtacaaatacgaggcaagttccagcaaggccgaaagaacagacgagagcgctcctcgaattagatacgctgactgtctcgtttgtttgaacgccttggtggaccaacagcacatccctgggttcttccatcaagatattctagcccctctgatctctggcgaagccgccgttcgttcttctcatcgatctatctctttcgaaaaatcaacttatggatacgatcaagctgtgaaactgagaacgctgtctgtgtcctttcttcggtgtccagctcgagcagtcttttggtctcttggacgagagtcctcagcattggcagctattcaagaacaagatcgccggtccgtccatctcgtctcgagtcccaatccccagctgttctccttggtcttgcacctatgacggcaacggcggagaaaatatagaaaactaacatctatatattgatcgctccaaacggcacatagaactcgacgagaaagctgaggatggggcatcctataaagttatttggctaggccgacacggacaggttggcttcgtttatacaatcattctcatgatgatgcttttcgtagacgttacgacaagcagaaatctgacttgatcaatctgggatcattcaacggaaatacaggggtttcacaacgtcgctgctgccaaatatcaagctctcgggacttgggagaacaaatggtctttcgagacgactgatggggagatcacttgggtgcgccaaacgtctcgatgcctctagaaaggtcgtttcttaattttaatttcaatcttcttgttgtatctcttcctttagggcccagaccctgtgttgacgcccttaggtgaatcccaagcaagagcgctctccaaggcctggttgaacgcatcgaagaatggaattccgttaccgaccaggtggttcgttagtccgctgcagaggacaatccagacttgtcagatcacttggggagacgtctgggagaaagtgttgagtaaaggtcgggacggagcaggcgtcggtgtccgagcgatcgaggttggttcaagctttctcatttccttctcgagagtacattgccgtcacgctgacactcttcttggacgttgtctggtgcaataataaggatttgagagagaaagcatgggctgacagtaagtcttatcttcgacgagggaggattctggtccagtatacatatattctgacatctttgtcttgcgattgatcaacagccgccaaccatgtgagatcttgaggttcgttttcgtaccaatagcatatatgctgacggatctcactttcgttgcctgatagcgccgaacaaaatccgaggtctcgagagactatccaacagtaatcttccctgaatcgattccggaagaagacatgctgtggcatccaaaagtgagcgaagaggatgaacatgtgagagatcgagcgaagagttggttaggaactgtatgggaatatgacgatacctgttcgtcactctcttcatttatgtgtggttttctctcgacgttaagaaaggaatcgaaatggacttgctaactggactcatgttctttcctcattctgttcaatttttgtgttatggaatacaagtcgtgtcctgtacggcccacggtgatatcatgagggcaacctttgaaggtacgtcatcttgtatcctttctatcctttctgggtctatctttcgtccttcctctcatggtctaaccatcttagcctccttcgctactgatcggtagtaatcaaccacccgttatgcccgatcgagaccgccgagttgatcccaatcgtcgtgaagaggacgaagatttaactcagacatatccacacgggatctcagcgctgatctcggtagccccagctcaatctcatgactgtgatccttgaatcttcttcattcccactgtgtcttttcttgtaccctcccgcttttcatcgactgtttcattctttcttcgtcattgtatcgatttttcgaaacagagaatctccaaatagaagatagacgcatatcttttggattttcttctcaaccctacacgatcgactaaatgacaagacacaacaaacctaccaaattcaatctataatggacgctatttgctgcgttcaggaggactgagggggatttttgaaaggaaaactctattcgaggtttagtcttcgatgtttccctctcccgggaaaccacctggtaccgcccggttctcttctgcgagagccatgatctttaatttccaacataccaaaccagatcgtcagtgcaacacagctaaaagagagacacagcaggcaagagggaaagaaagaagatgggaagtttacctgggccatcatcaaatccctttcctcttccgacatctcacctccgccttctccatcgcctgcctgacccaacaaccttcgtaacctcccacctaggttagccaaaacaccttgatcgtccatcccatgtgcccctcctcccgcgttctctccttcacctccggctccagcggtgaactgtaagatcgagttgatcatagcctgcatgaaaccatcgtcttctccttcatcttctccttcgtcgttagacattcgacgttgatgaggacgtctgcgagttgtcatttgtgaaaagtatgcgttctatacagtataagtcgaaaagagaagcaaggtggagagaaccaaccccagaggaggacatgttagtggaggcggatgctgacgttgtgagaagggctgcagcacaagaaaaggagcgaaagaagagcatcttacgttgtaagcagtgatagctgtccgaggaggagccggatcgaagctcatacccattccttccttaacgccggcttccaggaagccgagccaacttgaattatcctcgctgaccagtacgtgcctggtcagactttcgccggatcctgacttccaatacgaaaggactctagctctggatggggagggtgaagatggggaggaagaaagcaggtcggggtaaatttgagggagttgagcttggatccaggagaggtgggacgcttccttgaaaagagagtgagatcgggagacgtaaatttgtgacaaaaggtgaagcggagtgagaggtccaggtctggttcaaagaaatcacgtcgtaaagagattagattgatgatcgatatagacaagagaaactaggaaaggagcgataagatccttactcgtaacctagtcggatctctactgaagggtgagaccggatctcagaaggaacgttgaatcccactatagatttcgagagcagacgacaggtatcgttagttgagatgcctgatagagatagaaaaaacacgccaaaattctgacctttgtctgcaagcaagggcaagacctctgggaaggtcaaaacggcttctctcaaagccacatcggcctttcctttctctatctatatatctcaaacatattcgatggagatgagaagttggaacattagtgacaaggacgatcaagctgaaatattgaaggaacatagacacggaccttgcttcctttcttggtctcctccattctcaagccgagtgcttttgcccaagccataccaggcagcatatctagctctacccttcgtcttttagtttggccgccttccaggtcatccaaagcctcgctccaagcagccaagatctccagaagccaagtctggttattcgacttgagtgctaggaagtcgaggtgcaggagagctccttggggctgcatatcgaatatcatgaggaggcgaagcggtcaatatagattaggaaaagaggggtaattaaaatgaaaatgagtgaaaatgagactagggcaagacatacgtctgtatgagggtctaaactgaggaggaattttgcaaagttgaaggatgtgttccagcatcctcttcgtcccaagaacctattagaaaccaatacagattgctcgtgtgagtcccctacatcaaatgccaaggattcaataagaaaaagtttaaacaggcaacacgatactgactgtaagtttcttacaacaccaagatagaatcctcgattctcaactctatcaaagtctaatcgaacgttcccgtgagcaacaccaaagccgggcatgaaagctctctcaaatgcaaacaaggcacggtcgatgaattcggaagcttgaccaagatctagattgagtgaggaagcgcgaacgcgtgagggataagtgcatgtatgacatgttgtgaagatcaatggaaggaatttacctgcttgttgtcggtatacttctcccactgaaatatagacacagcgcagtttttaaagatgttaagattatgtcttatgagtagcaagaagcacagccaaggaaacatatcactcactctgtagaatggtatcggtatggtacggatagacttgcagaagcgcgaacagctgattcgggtcatgacttccgattgcgcccaagaactgtcgctgagcctccttccacatgcctccgtgctcaaaggtgaaccacttttctccttttccacccttcgggctcaagccaagtcttgctctcttttcttgaacctcatcgtccgtcaactctctcatccccaagcccaacaaggacgtcggcggaggccagttcggcctaggtttagagaggtgtgtcttgataagattccgacgggcgccacccccaggcccgcctcgagtaggcgttgagccggagggcgcggcaatgactttggacccgaagaattttcgaagctccagatcgggatcgagatttttggggtcgattgtcaagagagttcgaagagcaagagatgaagctgtggtctgattggtctgtgaagaagaggatgggtcggaaggtccggtggttgaaggttcaccatattgagctttgatctcggccaaagctcgatcaacctcatccatgccagagtagtcggtctgagacggcttggtgctcttcttggaatggctcatgggagcagtagaagcgaggccagaagtagtgatctcttcagcctcatctccttgagccatagaagaggcgttcttctttttctttttcttcttattggttttctgattttttattcaagacatcgagggtgcagaagcgatcagaaaagcctggtcgagcgggaatgaaaagagagatcacacctttttcttgatcacctcttccacctcgttgtcttcttcctcgtcttccggagcatcatcgtccccgatgttgagctttttgatagaagtatcggagctgtgagaatttcaatctggtacaaaacagatatgagaagagcaagagaaaaggaatcaaactactcactgcagcaaatgcgttcacaggctgactcttttcctcctgatcgtccccatgcccaattggttcctcctggttgtcttccgatggtccaacggatgtcacctcgggaacaggctcctctagctgttgcaacctttgctgtcgtttgttcagtctcttggacattctctcgatggttgaaggctgatcgtcgtcagaggtaatcgagtatgggcgtgtgtgagaatgacgttggagggatgatggctacaagggcacgtgactgacatcgtaaccatggtaacatgggcaattccaaaattctttgaacactttgggaactcaacatttgacgaccgtcgaccttccgctctcctctatctctgaccttttccttcgtctgtacagctatcaggaaggaaacaacagctagcgcttacatcctgaagaatggccaagggatcccagcttacacagctcaagtcggctttgacatctgcaggtctggatcgaaagaaacagcagcagatcaaagcaaagtctaacaatgcaggaaccaaaagaaagagaggaccggacgatgagaagaagctcgagaagattcgaaaggagatgaaccctttcgaagagaggacgatgagggttcgtattcatctgtttataggttcttcagatcatctgatctatcagatatcacgcaagagctatgcacataactaacggacgcctggtctccacacagctcaaacatgatatcggaggtcgaaagctcaagggatcctcaggacgaccaggtctcagcaaacagactggactcgaagaggtacgtctgcattttttttatctcttgattacttttcgaacgttctatgtcttgattctcattctcccacactttgtctaaaccttccgctctttgcacaaaccaatcaactcgcgatttgcataatctatagcgtcaacgaacgcttcttcccgctcttcagaacaggaaccacacaacaactttccaagatcgtcgattcggagaatccaacccgacacttacgccagaagaaaagatgctcgaacgtttcactagagagaaacaggcgcagcgatcggctctcggcggcgcgtctggccgagggaagggcaaagagttattcaacctcggagatgatgaagccggcatggaaggatttggagaagacgaggtcggctggggtggaggagctggagcaggtggagaggagtggggactaacgcatggcggccgaagcttagaagatgacttcgagctcggtgggtttggagctggagaggatgatgaggatcgaggttagtaaatgttcttcttattgtttcgaataagtatcaagcgatatgattcctcaactgattgtattgcccgtctcttcaatcaggccaaatcgaccgacgaaccgttcaaaagagccatttcggtggtttcgaagaggaagacaacgattctgaagatgataaggttagggttcaagctacctttcactttccatgtattttgcaaagctaatcggtatccttacaacctttcttcaccgtagcctgagcgcaagaggtctaaagccgagattatggctgaagtcattgcgaaatcgaaagaccacaaagttcgctctcaaaccttgcctctttcaacaatgtagacagatatctaacccttttgtcccttccacatctcagtatgctcgacagatggagaaagaaaaagacgaggcaactcgactcgagatcgataacgagttcgctgatatccgagatatgcttatgggcatggctactcttccagatgaagatcccgaggaggatgctttccctggtacaaaggctaatcagatccctcttggtgtccgagctggaggtccagtacccacttccaccactactactaccgacgcgactatagaaggtgatgcgaaagccgaaccttcagccgagtctttggactatgataccttcgttcgatctcttgctttcgaccgacgagccaagcctaccgaccgaacaaagacagaggacgagctcctcctggaggagaaagagcgtctagaggaagccgaacgaaagcgattgcgaagacagcaaggattggcatcggattctgaggacgaaggtgcggcaaagtctatgaaggccaagcgggagcgagaaaagaggaaccgaggtgcggatgatttggatgatgatttcgccggagaggatggaatggaaggagtggaggacggggagtttggcttgggaggtggtttggaaaagagcgggggcccaatggtcatgctcagtggcagcgagagcgagggcgaggatgatgacgaggaaggatcggatgatgaagacgaggaggggtctgatgaggatgacgaaagcgaagatgatgaagaggacgacgggttctctgatctggagggatcgcagacgaacgaggctctgccagacgacgaagatgacgccgacgaactcgaagagcctactcctgccgtttcagcccagaaagctactagaaagtcgtcaaagaagaagtccacggctggcaaagccaaggaacttccattcactttcccttgccctaccacccatgaggacctgctcgacatgcttgaagaacatgatgttgtccgagatgaggatgtcgaattggtcattaagcgtatccgagcggtctggcatccgaaacttggagagggaaacaaagagaggatgcaggttcgtttgtttgtgttatatttctaagactagctcaaaatttgatgttgatatcaatcggacttctcttcatagatcttctctaccatccttctcgaccatgccctatacgttctctcctctccaactccgaatttcgcccttctatcactcctccttcctcatctatcttccctaacgaccgcatacccgctcatctccgctcaacacacaatttccaagctcagcctcatcaaccgaaatctctcccttgcgctctctcgaggcccgttggcactcgaatcacagacctggcccagctcgcctgagcttggattacttcgaatcatcggtatcacttggagtacaagtgatttcagtcatccggtctcagccccggcggtgctgttgattggaaggtggctcagtcagagtaaagttcgaggaatcttggatctttctaagggtctgttcttgtgcagcttattcttgcaggttcgtccatccactttatcatacatccttgtctatctttcgcgcttatcactcgaaataccgaaccgactgaaaacttaaatttgacatgtatgatcacttgtagtatgaagcactttccaaacgattcatgcccgaggttctcaacttcctatccttcgctctcctcatcctctctccttctactttcaacccatctactcccctgcctggaacgttccctttccccgacgtctttgacgatcgatacaaaccacttaagattcgatctgtcaaatctactgaaaacgaactgcctgtagaccctgcgccaacaccgagtataacggatctactctcattagagaacggttctaaagtcatcgaggagcaggtcaaagtggacctgatgggtgttgcgcttaggttgatcagtaagagtagagaattgtgggctgggtcggacgcgtacgtagagatgttcagaccggtggaagatgttttgaaaggtttgaaggtcaaaaagcttcctgctggtcttcaggtttgtgtctttctctgtttttatatttctctctgttcgccttctagcttcaaagctcatactctcttgtctatgcattctcaaaggctctgcacaagacgacgctctccactctttccaacactctcaaattctcccttcaagctcgacgacctcttcgattacagaaccataagccaatccctattccgtcgtacattcccaaattcgagggttcgttctatacccccggcaagcgatacgatccggatgcagagaggaatgcggcaagcaaacttcgcagtcagtacaagcaagagaagaagggcgcgatccgagaactcaggaaggacgcaaagttcttgtcggcagagaggaacagagtcaaggacgaaaaggacaaagcttgtcagttcacctcttcctcttcgttttgtttctttctatcatgtaatccaagctcattacgtttcaatcttcctctcggatgtgaacagacgaacaacgtatgcgttctgcccacggagcaatccaagtcgagcgatccgaggaaaaacagatggaaagagagaaggctcgggacaagaaacgggctggaaagtgatagttcgaatgttgttttctgtagatttcactctctttctattggttttcgagagatccatgttctttttgttatatcttttttacttatcgagaagcagtgtcaggacgatcggttctcgatgatgtagaaccgttgaagagaaagtaatactagacatgatatcgtccaacccaacccaaataatacacagagcaagaaggatcaaggcaaaggaaaggaaagacctagtattttttgattctcttcttgaatcgttccatcgtgatctcatcattactaacttgcgacttatttctgtagttcttgctgtttcggttttttctatcgatagccggaagacccatcgcttctcttctagcgtcttccaatgcgtctttgtctgattggacgttgctgaccggtcggtagactattaaaaaaaaccgcatcgtcaaattctttttcttcacactatcgacaagtaattgagaaacagagacaagacccccaaagactgaacgtgcaacgaatggagaaggacgtacaacgagcagcggcaaaatcgttatcagcttgactaggacgaggagcggctttcttccttgcttccaacatagcgcgtttagctttctcagtgtcttcgatgttcttcagtcgattactgttcaaacgagagcgaagaggttaacaactatcgattcaatggaactgtcgatcaagaagaaagaaaagggcctactccatcccaagatcaacctccggaactgttttgttcgttacgaatcagcacatcaagtcagcactgaatatattgtaggtagacggaagaaaacgaagagaggacacactagctgtaagcatagccatcgagttcataacgtttccaccttcttcatcatcctctcctccattctttccatccttcttcttttcaattctgtactgttctgcaatctcgtataaggcctcgtgaggatcgaaaggtttgacagatgaggaagcagctgcgtcggatgtgttctctgtgtcaattccacgtcgtttttgaagttctgtctcgatatatgccatcctaaattttccatgagcccggaatgagaagagagaatcgaagaggcgtcaacaatgttgagaaatgaagaggagaagaaataaagagacgagaaaggacgcacatgtgcttatcgacgtctaatgcgttcgtttgttgggtaaagttagaagcactaatgagtcgtttcatctttgccgattcgtctgacggatcactacaatcccccaagatgtacagtacgggagagccaagtatagtcagactctcttcttgaaaccacacaaacaaagctgagaagaacacgtacatctcctttccaccactcccctttccaggtctaagtccgacttggatttcctcctccccatcgtcttctccttcctcttctccttcttcagctgtgcccgtcgtcttcttctttctccgtctgatttcaccccggtttagtttctcgagcgagagtccttcggcttgtttcctaaatcggcgaagtgacatcaaatcctgaatagttgccctattgtgtgtttcgtttcatacgtgccagacagtaattgataagacatacatcagtacaagcgatcacatcttcccctacgccgacaccactatgccagagagagatgaacctcaaagagacgcgtcaagaacttactccacattgggctcatcattttcttcaaccgccggactagccaccgcctccgacggatccaaaggttccccggttgatgtcggggtttgattgacagatggagtgtccttcgtacggacatttgctggtcttgtgcgtttcttaaacatgttttgtcccttccttggttgtaagtacacgagaagttggagggttggaggaaagcacgagaagggaatgaagggaaattgggtaggaaacaggcggaaattcaagaaaagggatttgtggggactccgctctctttcttgctatcttgtatcgtgtatcgtgatggcctccaaacgacgagcatcttttcgacaaagtggtgttgcagtttgttgatcgtgacaagtttcgtgtatagatatgatggagacaaagacgatctatcaaggagaagagaaaaagaaagaagaaacgatacgagaacgatacgagcagactacgatcaccaaaatatacatttcctatccacatagactagcctctccgacttgctttccgttctctcaacatcctctgacttcctaacttttttgtctacttctccctttctttgttcttcccctccctttctctaaccaaacggaattagtcgtatctcttgttgttttatcggttcttggcgtgttctggggcgtgatcggtttcatgatcgacgtggacgctgtaaaggtaaaatcatcgtcgaagaagacgaaacaagggaaagaaagaaaattacaagatgtttcaaagtcaggaaactgtcaaacaaactaaaagagagaaagaaaaagaaaaagaaaaggaaaaagaaaaagagaaagagaaagaaagctcctttccgacgctaaaaagagaaggagagatatagaatgaaaaagaaagatgagtgacttacaacgctcgatcgatccctggcaatcgttcgagtgtatcctggagagattgagcgagatcatgtgacgttctcagggtcgtctctggttccataactgtgtgtaagaatgattgaagagagttcagagatacacagagagatgtcttggtaaatgtgcaatgaagtttgagtggaaaaaggacgtcaagaatcaagaacgaaccgatgtctacctctgcaatgtaatctatattcatcgccattatcccagacgcagaatacagaacaacatgaaacgtgagtcttggcaggtagctcgaaagttagtccgaatgagagcagataaagagaatagacgaaccttctccattggcatagattttgacgctgtccaattgagtgatcaaaggcgagaacgtcatgcactggttcgacccaaaatcaagaagcagtgagcagtcatttcaatcagtatcagagctgtttggtgaagaacttcaaaaatggaaccttactttgtaggtcacaaagttgagcatctctggctcggcgctctttcctgccaataatgtgaaatgttctgcaacggtgatcgtccacgacgtgatgactgcacatgcgataagaatctgtgaaggaaccgttccatcagattgaatcactaacagatattgtatcgggataaagacaaagaggaaatatagagaaagaaaaggtgacatacggctcccattgggtcgatccaccaagcaatctttgctccagctgcactcgtaaagatacccatagcgtttaccggctgtttttgtttgtttaatgaaagatccatctatttaacattccctgcatatgttgtgttgagaatttttgctaaggatgaaaggcttacgagatcatttcggtgatcctcccagagcaccctgtcaatgaagagaaaagtagttttggtcagtgaggttggacgttttgataattacagaaacggaactgatctgatagtgtagggaaaacaagaaatgaagagacagaggaacatataagacacaaaaacgaagactgactggacctgagagctctgactcttgatagcataacaatagaggaaaagcgcgaatttcgttcctaccatcgttaaatcaattttttgtcacattagtcttcactcgttgtttaacaagagggtaaattgatcgaggagagacataccaagagcgactccgactgcaactagagaagcaatatgaagtttgttatcgtcgtctccatctccatgagtggcgagtgatcgaatagattcaacaatcagaaccttgaaaaaccggagaagatggtggttgttagtaccgggtctgtgggtttgcgcgcggctaggacgaggtacagactcaccaggttgacacctcccatctttgaggattgagtatttcgagaggatcaaacatatgtcagttgtatgcatcaattttcaaacaaaacaccaaacagtgaaaagaggcggtgcacgaacgaggaaaccgtaaacgacgtttccgatcgtctggaattttgctcctccctgcggccatttcttcgggtctgctgagatacctttcttgtgaagatagttgaggatcagattctaggttttttttgatagatgtgagaatcgagatagaaaaagatgattagcgtgaaacctagttgtgttgggcgtgagagatgggcgtagacatactgcgaaagggtcaaaaacctttatgggaatacggcgtgaaacatacgtatcagaggtcagattgatgtgaacaggggaaacaggttggaaaacaagcatgaaagcactcgaactgactgaatcgatggcagtggcgaataaagaaagactcaatgaagaaagcgcggcatagagctgaaggattgccaaaagacagttacaaataaaggacgctctgatcgcgatctttactttgagggctgaagcatcttcctcttctgttgcttctgatgtgtggacagacatcggtttgagcagatttttgatgtgctgagaggagatacatcgagagagaagaaaaacgacaagccatgacatcagtatatcagcacatcaacacgcaagaggaaaagcttgaacaaacttcgttctggttctcgtaatacttagccaacgctttgttccgcttcttcgacataccctttcccttcctcttcaaaagcgtattgatttgctcatcaggttggatttttgattgaagagacagtggatctatcggggtagtcccctcgccgccgatggacctgatggacctggatgtgccagtgtgttccggatctgtcgctcgggcgaggtttctaagttcaaacgtagtgcccagctctatcggattggatgtctcgtggagactggtctttgtaacagacatgacgggctgctatgattcaaaagtaggtgggagtgttgatggtgtgcagactgttgtacccaacaattatttttcttgtttccctagctgcttttgggctcggataagcccggataatgactaagcagatttccacacagcccctgccatcagtgccagactctgggcgacaacgagacaaggttggattgaggaaaaagtgtaggtgagtgactgcatatcagaacagattagggaaaagtagagagatatagtgtgtgttgtatgtgtgtgcgtgtgtatgtgtgtgcgcgtgtgcatatgactgaaggaaagatagggagagaggaactttccatcacactctgtaatttgaagagaacgagaaggttaacggtcgattttgtggtcttcttgcgcttactcttgcatctcatctgacgaagaacagtccaattcaacactcgttcaggtcagtttcagagtttcataaactcgccgtccagaaaacacgcttgatatacagagacaagagagatcataagtacatagagaaatgtatgctactatcgaacgagctgactgccgctgcaatctgtcgagactgagcttttcttttgctcttcatatcattctatctgcaacctggctcagtaatatacacccataaacccacataaacatacagctttctgactctttgccgaatattctgtttctggagaaacatggtgtgatagacagagtgtcttagtacgtgggtacatttgggtgcctgggttctgggtggaactgtcttacgtaatcgacggccagcgcaaccgattcccttcatcctcataccctcgtcccctctcttctcttctgtccatcacctttgtcgacatctttcactctttgtcccttcccccctcgagatggctccaggactgggatatgatgagcagggatctctagccaactatttcctcatcacctttataaccatcgccctcgttcccaccacctttttcaccttcaaatcacaacttcagccaggtctgttttcctttctctccctctccggtcgtgtcatttagctcctgacctgtctctcttcgccttttgattgtgattattgtgcaatatcttttcccggaaaatataactcctctagcgaacgtcaaggcccttaccgacggactcgctgtgccagagagtagacagcgagcatctagggaaaagatctttggcaaacaaaagtctaaaaagaagggcatctctaaaaagtgagtactctgcgttccctttacttcctggctttttgagcacaagagacaatcggtcgaacacaccgctcattcacctccatctttacttcctcgtagagccatctttctcatcctcggctggtccgcatttgcgttccttgcccatcggatccacaattccgaggcaatcgagaacgtcatctataacccgttcgagatccttggaatcaccgacgtacgtccagcaccccagcttcgtacttgttctctttccttcttcttctcgacacacattcacctctctgctctctctaacaaaatatacagtcgttgaccgagaaggagattaaacggtcctacaaaaaactctcgttaaaattgtatgagttgtctaattgttctgatctctgcccaggcatccaaccttatacgtgccttctctgcttcttgctttcctttcagccaccccgacaagtacaaacttcaagagaatgaaactcaagaggatgccgacgccaagtttgtcgagatcacaaaggcctacaaagcgttcgttcctgtcttcaagtgctctttctctttcttacttctgcttcaacactcacctcagctatcttctgcgtgacgaatagattgacagatgatgtaacacgtgaaaactggcaattatatggaaaccccgacggaccccagcagagggaagatgtggtggcgatcccgaaatgggtgatcgaaggaaagaatggatcctgggttttggccgtgtacggtctggtgatcggaggaatccttccatggcttgtagtgagtatctttcctcagcaatatgtccttttcatctctctcgtttctagctttactcttcctgacctcacatttgcttatagggaaaatggtggttcggaaccaggcagtataccaaagacggaacgaccaactctacagccgcgacgttcttccgtcgactggacgagatgacaagtgtatccgacctcatctccatcctggcctccgcttccgaatttacttctccggcatccgaggcctctaaaaaggtggccaaggacaagaaaactatcaaggccgagcttggagcgctcgaggaggccgttcgaaaacgagcgactgagctggggctggaaggtcaaaacgtagattgggaagagactggtttgggtgaggtgatgggcggaaggtttgacagtctaggaaacaagcgagctggcgtgttgatctggggacacctactgcgaatccagtgggattctccatctgttcgagaaggtccgttcccttatgcagactatagctgttggcaccatccactgatgatcattctttttaaaaatggaacaatagaaaccgccgaattgttactttctcttccacctctgttggcttctttgttgaacatatccttgtcccaccactggttctctacctccctccagatcatgcatcttcaggcataccttgcccaagcgaccctgcctacattacctaacctgcttcagttgcctcatatcactttcgagcaggctcaagcgcttgaatccaaggttcgaagcttccgctcggtcgttggggctggcaatggtgatcggtgggtcagagcgttcaacaggattgagaaggagaagaaaaaggcactactagatgaagtgaaagttacagacaatgaaacggagaggaacgagatggatagcgtggcaaagagttggcccaaattggagattgtcagcgcaaagttcaaaggtaagattcttcctcagatgagggcatagaaaggacaagattggctgctcaccatttttatctttaatcttgtttcccgatagtcattggagagaagaacatcgccccatcatcgatcgttcaatgtgcgtttaagctacgactgtcaaaccaaaccacctcggccgtcgagcctgatgccaagaaagtcgaggaggacagtgatgatgaagacgagtctgaagccgttaaaaaagctaaggacgaggcgctcaagaagaaaacacctctcacagcttacactccttattggccggaggtaagaaaatcttctttttcgattgacatttcaggtttcctcactcattcttatctttgtgattaccctacagaatcgaccactcaagttttgggcaatgatcggagatattaaatccgatagggtcatcgtccaaccggtgtttatcccaacaatctatctgggggaaaccttgtcgttctcgctccagttccaggcaccgcccaacgcgggacactatactttccaagcaacgttcttaagcaactcggtagtgggaagtgaagttcgaaagggaatgcttgttcgtctcttgctctgttcttttctgttctcctctttatcttctggtttgaatgacgagctaacgcctgtatactcgacatgttctgttcttcagctcattgtagacgagccagttgcagaggcagagtccgaagacgacgatatctctgaccccgaagaggattcccttgccggtcaactcgctcagatgaaaggacaacgggttaaatcgagcaagcttgccggagaagatgatgactcaagtgaagaggattcgtcaagtgatgaggacggtccgagaggaaagaagggaaatgacgatagtagcagtgattctgacagcgattgaaaccgtctgtccttaagagatggtgattgcgaaggtgaaaatggtgctgcttgctatatctttctctgagaatctatatatttgatgtgaatggaatggtttgagaaaaggccaagaacggtcgtacactatcgtttattgctgttcctacgtgttcttctcaggcgcaagattcgattacgtgttgaatcggagaaaagatattcgagaaagttgattttctcgtcaacaatcccagaccaatgatcgcttcatcaccatcatctaccaactcacttttttctgcccactccttttcctcatctgaagacgagagagatgatgtagacccttcctctggatcttcagctctttgctcagcactctcaacagcccaagagacctcgccttcgtccacatcgagacagagaccgaagccagtatcaggtccagttttcaaagaagcatcaaatctgataacatcaattgaaccacctcagatctcaggcctcacgttcataccttcgattctctctccaccgttatgctcagatctggtcaaatgtatggctgcatctgatgtgttcctaggaggaagcagggatcaagtcatgttgttcggtggccgacttgaatgtcgaccaaattctcttccggtcccaagctcggcatcaaccttgaatgatgttgataaagatttagcaacagaagagaacttagaactcgaacaaagaacaaggttcagaggtttaccgtcatggttagaccaggcgctagagagtatagaaaatgagttaagaggggtgttggaagacgaaatttgggaagagtcattcaaccggaaagatcttaagcgtcagggtttgttcatcttcttttcttcatctttatttctctcagcttattgtttctgggttcgaaggtctaacatttcgtgaacttgctacgactttttagtcattctaaacttatataaaccgggtgttcgtcttctctctcgtctttaatatcatgacctcgtccttctcttcttgcacctgatgtttcctcgattttctggtgaatgtatatagcaaggtatcacacctcatgtggacctcccgaacagatatgattcacctatagtagctgtctctttactctctggaatctcttttctcttacgtcgtcgtcatcgtcgtatatcttcttcgctgtcgtcatcaagtttgggtgcagcgccggtgttagaggagaaagaggaggaggaagagtgggaaacccataggttttggttaccggagagaagcgttctgatactcgacggggaatctcgttgggaatgggagcatgggatcgaggtttgtctatactcttcatcttctcttcgtagtgcgcaagaatcagatgttgatcactatatgtatgtctactcgtctgggaatttgtgatctgtgctctattttgaagtcacatgagatggacctcgtagagtcgtcggatgggacgggtcccagctggagagttagaggtgttcgagtgagtatgacgtttcggtggctcaagtctggtggagatgtcgttggtggatgaagatatcagtctcttatccctttcaaatatcgataataattgtatgaatgtgatcttttcggaaggctttcctttcattgagaacttctatacatatacattttatctataggatacaccgagagagaaaggtgatgtttctttgctcttggttcgtacgttgggtttgtgatacttaacaatccatctcacccaagaggtcaaacatccctcctagtcctccggtctgctttgtagtcttcttcccttgcgaatctcctcctcccccagaagcagccgctgccgccttttcccgcttcgccttctttttgtcccgtttcctgcttgtcctatcatccacttgaccttctggctcaatcgacgcattctcttttacttcacttcctaacacatcctccacgcaactttcataatctttctcctcttcatctgatttgaacgacggtcgataagctctgtcggtcgaccaatcggataaagacttgtgggctagttttccgttgtagaacacgtgaggaccagggaagaccgttcgtgggaggagtaacgcttgggcgagaagatcgctgtcgtgtaaagcgtgaagatagtaagaggttacgtgaattgcccgatttgtcagttccccaaccgagtattcttccagaagggagactccttcggcagcaggagtctcattatcggtggttgtagagtttgaatcctgttcagggttgaattggcgctgccatttcgaccaagcatggaacgaacggacagcagtaaagatgatcgccttgatctctgcccgtcttgaatggtaattcactccaggcttcgaaggttcttcagctaaacgacgagcgatccatcggataaccaacaccatcggtttcagttcatctctgatcgtgatggatggagatccaagtaggtgcatataagcttggatccgaacggagaggggttggagcacaagtagagttgtgcttaaatccaattttggttcgaaaacgctcgaatcaagaagatcggttattggggtgatggggatgagcgtaggatgaaagattgtgcctgaacggaggtaggtttgaatgtacctagtatcggaggggtggtcttgttcttcgaccggatcttgttctgctggagaaggatcttcggcgttggattcaccagcagcggcgttggcttctaggatagcgtcgagttcttctcgctgagcttcggccgtaggatcatcttcctcgtctccctcttctaaagcggtgtcgaccttgtcttcgtccattttctcatcttcatccttctcctcctccttctcctcctcctcctcctcctcctctctaaagccaatacctagtccttgattcagtacggcccaacaggcttccctgatcccttctccggcacgttttccaatggacgctctggtcgtatcctctatgaacaacctgccgagatatcttccgtccctgacgacgcctgctaattttggagcaaaccgaccagctcggacagcgtctacgtagagaccaaacacgtcgtcctcggatggagaagagactgtcggtggaaaagatgaaggagagagcggaaggtctgtcaattccaaagggattgtgtatgaaagagctgaatcaatgagggcatgaaggatggcttccatctcttgttccgtcctgggatgaagaaggagcgcgcttgtcgcgtttgacaagagaagaagagcttcatcccctgaggtttctataggtgtggccgttccagacctaacgtttgacgatgaaggtctctttgccttggggcttaggcagtcccggaggacggtcgagactctgtctactttttgagtggatgtagcggatcggtggtggaacgcttgaccatatttgaagtaatcgtttcctaccagcgcagcgaataaaggaaggatgtttaacggaaggtcgagctcagcagcaaggagctctggtgtatagatgataacggagagggacgtcaaaaacgatacggccgggacagagggtgggagggctgatggttttcgattgttccaacgaccttttcgatcgaatcgaccaccggtggtggtgttataagtgttgtttcgattccgctcattctttttatgtgtttttgacttgacgacctggaagaattcaccagctccatcatcatcatcctcatccgggatgactaccgagtcttcatccgctttcttctcttgctccggctcctcttcttcctcttgttcgagttcaacccagtcccacttcatttggttcaaggggatgtaccctctcccggctcctctgccctgagcgccgtagatcgtgaaatctgaatcgagtccagtaatgtatccgttcctcttgcttgcctcgtatgcgcacctcaagtcagcctcagattcagcccagatactctcaacgccaagagcgaggccgacatcgacagctgtcgagtaaaacaatggcgggaggatcgtttgagacgaccatgacgatcgggaaagacgtgatgcaggtgacgtatggtgaaacaatgagatgggaaggattaaggactgttgacgttggagctcagttgagaatttgatcggaggcgtcggaccttcatgtatgcaaaggaagagataactagacgaatgagtatcgagacaaacacctttctcagtctgacggaagatgatctcttctaaagagaaggaaaggacacaccatcgtaaacaaacacaggctcgatacctacagccctccaacctgtgaccgtccgtcgaaggaggtctgcaaactcaaggtgttcacctccatagggccatggagtatgggacagaagctcgtatatgagtctggtttgagagaatgaagatggaattcaatcgattgtcgtcagacatcaaagagaacactacgatacagatacagatgtttctttttctcctccacaaaacttgatcgatctgaaagaaacgacgaaatcgaggcgaggaagagagaaaagatagggatagtgatgatgaaacgctgtaaaaggagaactcacccccaagcgtcgactacaagtgcgacctttgttcgttcctcctcttctacgccgagaacagagtcaaatttgagaggtctagaaacgagacttgcattttcattgagatacgttgcgagaccgaggactcccatattgaatgtgtggtctttcttggatgaaaagacggatggaagtgagaggtgacgaatgcgaagatgaaaggttttgtcgatttttatttttaagcctctttaatttttatctttcgactctcctcatataaacattgtataagtcaacaacagcaaaaacaacaacccggaaaaacgttcttctatcaataacagcgaaacgttcctttcagtgtttcacttcccaaagaaaaaaaatctataggttcttttttccgttaacttttccggaaccagccggaggcgcaggtatggtgtgaccattagtctgagagaccccaacagtggctttctttccttttttggatttgctttcggtaatcttagcccacgcctgtatacgacagaaagagtcaagctttagaagagccaagaaaggatgacagagggacgtgaagaggactcacctcgaccccgattccaaggaagacgactgctgctcctagccattggccgagagtgagttgatgatcgaacaataccacactcagctggcgcaattcaatggatagaaaaaccaaccttatgttagctctcccgtgcctattcagatattgataagagaaaggaagggggaagcaatctctacgaaccatcatagtgaacaactttcgggtcacagtgaccattaccagggtcaaacttccgaattcccccagagtctcaaagatgaacaactggccaagagcaccggtgactgagtatccaaccaaaggtttcaacaagtctggatgggtggacaggaaggacaggaaggaggatagctcagattgagaagagggcgtcgggtgaatgagcggaatacttggggtcgtgattgaaaaaggtcagggaacaggtcaatgatcagattggtgggaggggagggagattaaagaagaaacttacggagggagagggagtagaatcaacgggagagagataagtaaagtgaagaacgacataaagaacatcatttgctggcctgtagatcataaggaaatgggaatcagctcagcacgtacatatcacaaaaccgcgcgcacgtatgcatgagaagaatcctacataccagtgaccttccatctcctaaatatttcatcctgtcccgagtttgttgctccgtcgatcagcaagtttatcactaatagtcccagtccgaccaagctttccccgctggtcttgactgcggacgaccccttgtgggaggaatgtttgttggaggcaccttcggctccgagaagcataaagagggagattccgagcgtcacgagtgtaacaacaaggtacttgtgaggtgggaactttcgacggtacaggatgaactagatgggcgaaagaaagcgagttagaataagcaatggagatagtgctttgttcagacgcgcgagcgacgatagtctggttgcacgattctgatctcaagggtaaaggttaaacatacgttcatgaacagaacaggcactagcttgcagcttttgcccaggaccatggtcggatagcttatatgccttagactggcaaatccaaaaggaccggccgaggtattgagcatggcaaccttggcgaacgcaccaaggagacctctcgtgtcgccattaggctggttgaggcctagcaaggatgtagatgacggagaggacggccgtctgatggatatgtagataaaggagaacaagagagatgcaagcgcctgggtagtgttgaggaccaagatggacttgaaccgggccggcggttcatgtgggagagttgaggggaaaggaacggatactgagggagaatgcatggagaccagaggagcgatcagcgagtttcagaacagaatcaagacgaaacacacctacgtctttcttgagcgatagcccatatctataccagccaagtcatgttgtgagcaagagaaacatggttaagctttcggttgaaaaaggtaagaacgacaagagctaagaacgtaccaagaacatcgcgtagaccccaccacaacacacaccgaacctgtgggtctcaccaaaacatcaaaggcgttagtcttggcttatttctacctcctcctctgcagacagagcgaacgagagagaagaagaacccacttgaggacaggcatgttgcttgaacgtttgtttgatgatccatccgagagattgaaggtctaggggatattacttatgggctggccgtgtacagctttacacgtgaccgttcacgtgtaaagcgcacgtgtatctgagcgtgtggcgctccatcagatatcctcctgcccatctcgccctcttgggcttcggccaccgtcaccatcaacatcaaacaacatggacgacgcaaagaagcactttgtgagtatgcttcgctggcgtgagcgcatctgtgtgtctgattgtgctcgttgtcattgatgccagacgttgtttgcccttcgctgtagcaatccttcaccgtcggcaaggttagtttgctcatagcctccgggccatctctcttatgccgtcacacagacctttggctgagcttttgtgcataccaactatcgctctctagcttgatgctggaatggtaagtctcacgttttggaacgccaacgtatcataaggattcgacctgttgaccgctcaacctcttttggatctgatcttggcctttacccgattgtatacttgtgcaggcggtaagtgcctgcgatatactattcatatggtagccactctgaacgatttcttccttggttctctccacctcaacagatcctcattggagaacgagcccatctaatcgagttcccctcacttctccttccgcctggcacacaatcaggatcgatcgtatccatctctgtccagcgcgatcttcctgccgagcattctcaccaaaaggccttcactcagcttcagtcgctcatcctatccaccttcggacagacttccccgtcgcctcctcggcttgttcttcggaacacgacacagactagtgtcactcttgagtggggtaaactagaattcgccaccgctcaactcaaaggagtcgacatctacagaaacggcacacggctcgcgggcatcccgaatcctaccgtcaacacgtcaaccaagttgtcaagcttggcactcgacacggactacaccttccaactagtcatgtcagttaaatctgtctcttccgcgttgtttagcctgttcttctccagttgtcttatacttgctctttgttctcttgcatattcctgatcctttaggaaaacgtcggcaggaacttatccgtccaacgtgattagaattcgaacgcacactatcaagtacgtcttcatactctgcaccattcatcctcttcatccttgccctggtaagctaacgcatctttcgtttcttttagtgacacatctggtatttcagtctcgttcgggaatgtccaagacccaaatctgttgaatcagtgcaaggccgcactcgatcagatgggcgcaaaatacagtgaccacattcagatcgacaccactcactttgtgtgtaccaccccagtaggatccaatagtggcaggtgagatcttagccgtcttccttctctaccatgggatgcttttctgtatactgaatacactgcgcgaattttaatgttcttatttgaatcggccggatcatgcagcggaccctcggtagagtaccagaaagctctgcagttgagtttacccgtagtcgagcctggatggatcttggcctgcctaagcgagaaacggatggttccaagtaagatttcctatcctacctcagatagctgatactaattcagacagcctatctgatctcgatggttcccgtttgaaatgttacacactcttcgacaatcagtttctcagcaccttctcggcactcatccaaccacatttaatccaacggccttcaaccgagcgtctctgcccagctctccgttcaccaaccgagcgtcccttcctgctgacgctaatgttgaagctgacgacgaaggagcaggcgcagcttcgacgtctgctggtcccgacgaatctttgagggagtctgaatcgatcgttggcctggttgcaggtcagtctgatgcctccgaagcgaacgggcttgatgagagacaagagttcaagcggccagcaagtagaaatggaggggttttgaatagagcattcaagtatgtctcgatagttttctcttacgacatcttatctcttcttggtgatccgtggctgaacatattctctcttttcggtttccgcccatattagattcccattaaatgaatctaccggctcatccacatcactccctttagaatcacaaccaccctcttcgtccactgaacaacccgatatcaggcaggcgacagcgccgttgcctcccaaggaagacgcccgactgcctttgcacgaggatgaagaacacacacaggttccgacagcgactacggggatagagaatcgtaaagaggctgaaacagagttcgagagcgtgatcttggaggcttcccatcccgacgccgaacccgaacccgaacccgaaccagaaccagaaccagaaccagaaccagaatcagaacccaagacggctatcccggctgaagagtttgccgaccaaggtcccatagatcatgtcgcacaaaccgagacggaaacagaaccagaaccggaaccggaacccacggcatctatcgtcgttcccgaaccggcatcggcgacagaaagcgagcctgtatcgttacctacacctatcgagcatccttctcctgaaccccaagaaccaaccgacgtagaggaacctcagagtatcaatgacgttcctgaaaatgaagaagatttaaacgatactcaaccagaagaggtggaggaaggagaaggggaggaggtggaggtggaggggaaaaggaagctttctgtcccgttgaggtcaccttcgatcatgattcaagatatggactccaatctaccagcttcgcctctggtcgatgatgacgaagctagattcgtcgatgtcgatgtcggcgccgatgcggatgcgaacgcagatgaaacgattgatgaggagggtacagaggaaggaaacgatgaggatgatggagagggagagggagaggacgaagaaggaggcgaaggtgaaccaacagaagaaggagcggcccctgtttcagaggccatcggagcgaagaagaagaaaaagagtaacaagaaggggaaagggaaagggaagggaggacgctgatcagttaaacgcgctatccgtcctccatattttcgttctaccctctctttcttttcgttccttttcgatctcgcttgctcctcatcctgatgtatattgacacgattgatgcgcttttcttgcattaagcctgataagtacatacatgttgattctatttgtattaaaataagataaaataaaataaaaggacataaagcgagcctcctctacaaatatgaagaatagacagtgattcacagccatgcgaaatagactgtgaacggtagtggtcttgtggataaacaacgcggacgaccaaaaaagaggaaagtgcatgaaaagggataaggtcctttagagagaaagggaagaagaagaaagaaacttcccccttcattacacaatcacgaaaccaatctaaccgcccagacttcctcctcacacctgtatctactcagcccctttcctttttctcttctgatcacaccgaacggctcggcgccttgttcgaaaggaacggctttctccaccctaggtggcctataaatccgtgttccagcgatccactccagaacgtctctgatgtcttcacccatatggtcgaccattggtccggaaccggaaggagagatcacgttatagtcgatgtgtttcttgtctttcttaacaaacgttcgacggagggatcgcatagagttcttggtgggtgctccttcggaagataaaggttcgtttaaatctcctttgagcgaggtgaatcttttttttgtgaattagaggtggttgttaaccaaaggaggg

SEQ ID NO: 1191 - DNA, 8032 bp, Xanthophyllomyces dendrorhous
ggaaggagaagaaccccaatttaagaataaatttaaaaaagtcagacgatttgtttgatatatagaaacccctacacagagaaagaaggagacagaaaacgaacctgccaccggtaatcatgattcttcgactggcgtcatacgtccttcttccacctccacaatccaagataaagtcgaatgatccttcatgttcctcatggacgacctctaccggttcacccgttctcacatgaccttccctcacgttcggtacgagtgacctgacccagctctctcctagatcagccgagacctggataatgaccacaacgcctctcgagacgagttcttgagctgctaggattccgacgctccaatccgcgattgcaggaaccgtattttccgatgccgtcgggctttcaccaagaaggacgagtgctcgggatcctttgttgatcccaccgacagcgcggtgggcggacacaccgaggagcggcaaagaggcgatatcttcaaggctcagcccagaatcaagctcggaagcaagggccccaacagaaggggctttagcgaggtaccgtctttcgatttcgatgaattctgaaagcgccccggatcgtttcacgctcactgttcggattcgtatccaaagcatcagataggatattagtatgcttactcggcagtgcacacgagatttgacaatctaatattcgaccaaataacttacatagtccaaacacccagtctcctttactgaattcattcacaccatctccccactcgactacttttcctacaaaacttcttccggggatgaaccccttggaagcatctctcgccgcaaacgcatcgtacgcgtccaaagcaacggcccatactctaaccaataaactcgtgcttgacagtttctttgggggcggtatatgagaagtgaacgatgcagagatcactggtgtatggacaagcaagctggcagctgaggcagtggacgatggggatgataatgataacgaggatgatcgatgaagaagggatgaaggagacgaagtggacgttggagacggcgcaggccgggcggtggaggtgattgtgatcgtggccatcgttgtttgaggaattccaagggtatcgtaagccaccttggagacgtacctcgagggtgatttggatggtcgataagctccagaaggcaacgtcaacgtactaggaatagcaatggtcatggggaaagaatcgagttcagaagcggatctgtgacagagtatgataatgaaacaagggagagataaaaaatactcacgaatatcctgcacctccgctcaagctgctaccagaatccccgtatatagacccactcatcacttggggctgtctgtaccgactgatgctctccaacccggcatcactcatcgccctggatccctttttatccatctgatggaatccgacctcactcgtactagctcttcgttgagcggtcgtgtaagctctgacttctcctgatcgatcgccagcaaatgagttcaagctcctcacgtccgcctcggacctatcatcgatggccgagctcgctttcttcgttgctccatagatagatcgagctctagaccatgcggctcctcctccatccgagatcacactagacggtgcagacggatagagcggaacgggagaagacacagcggatgggtaggaaccagtcatctcgaacgtgttcatcagtgtcgacgtcggtctaggaaggaaaaactgttgtctgccggccgaagtggctgatgaagggctaggagaaggtgaccggaatgaaggtccaccgatagtaatcggcgacggatggacagacgacgggtttgacgaatgcccgagaggtgaacccgagataggggaaggagcgggtggaaacgcggatggataaagggatggtggtgtccattctgaatcatctcttgaactaataccgacggaagattcgctccctcgtctgttccgatgatagtatcttgattgactgagttccataggtgaagagtttccactgccaccgcttccactacgatcattgacgactgaattcgagatcgtcaacgcttctaacgtactgctcaggatgacgggcgggggtacgtccacgtcgggccggtacgagttctgagaatacctagaaacagacgaagccaaagagagcgcagagcttgctctactgggagaaccgtttccggtatttctcaagttccgatggaccagttgagactgagtaccgatcactccagattgatctcctgccatgagccttgcggttgagaaataaggagtatcttcctcctcttcgccaactggtgaaagcatcgctccgatgtaagcctcgtctgttcttgagtctccggtactggcactggcgccggtaccagccaacatattcatcgcgggctgtcggccgtacacttggtcgacatcttcgttcgcgggagaaaccgctctgggggaattggactctgaagagattccgccgtaagcggattcgtaggtctctctccgtataggatgtatcaacggaggtgggatgacctctctaatcaacggcggggggacctcggttcgcctagtgatatctgtctgagtgaggccatctgtcccaaagtaggtcaagcctgatccggtaggggtggatgctgaagatgagggtgaggcgagaggaccggttgagaaagctgtgggtgtgggcggctggagtgtcaagaacggggtgaatgtatcagatccgggttggtgattcggccggctggtttcccgaggtggtgagagatggttgctatcaatgaccacatcatcggccacgccgttcgaccggagttgaacacccagaggttgtgtgcttaggaatgatggatcagtcaagacagaagtcaagcgaggggaagagaccggtgtgtagaacgcatccgattcagagtcgctctgaccgacagagtcgatggatctactgggagagatctcttgaaaattcgctgaagaagacatcaacttttggtcggtttggacgagtgacgggacaataccggctcgctggatggcttcacgtttggtcgtggttgaaggtagataactcctcgagagtttttgtctgtacgaatcatcggataggtcagaagctccgggtgatggttctcgtcctcggccttctcgctctcgttgtcttcggcgtcggcttgatgcttccgctcgatagaaagaggggtctgagagctcatcctcatcctcatatcgatcacgctcacgctcacgtcgctctttccaaccgttcggtcgatcgtccaccatcgaactcgacctagttttcctcctcccaccggtactcatatattcctccttgaacgactggtggtcgaaccagtcggaagactgtgtggttcgataacctccgtcactgcctccgtaagcggccgaggatcttcctgctttccttaaccgaggatctatccaacgggtagtgttccgaccttcttcttccctatatccgtccgaactgtccttgtcgtcatcctctgcctcgacctcatcctgtgccgaccactctctggggcgcgttcggtcgcctcctgatgaagctgaacgcctctgatatcgaccgtaatgattcccgccatcaccatggtcttcgtcatcgtcgtcactatcccctctatatcgatacctgtcctcacgatccatataccgataccggccagactcccccatgcccatcgttgggggataaggttcttctgaacgacgactaccgcgaggtaatttggatggatggataggagcagcttgagaatacgatttcgaaggcgcgtgtgtgaccgattgccagaacgaaggtttccctctggagcttccttgtttcgagggcatgactggtgagtgagtgaagcggatgaagggaaagaacgaagagagagagagaggaaacgattcaaggaagaggtgatgcagaagagaagacggctgaaacggcgaccggtcgacggtgatcgaaggctgagaactagcctgatgttttctttctttcttttgccaagacccaaacggagtcacaacaagggatcagactacactctcaacgggagacggaaacgcagaaggatctgtctgtcttactctgcttgtcttcttgtgagatgtcgatggtaaagggaaccagctgggtgtcgaacgagacgaaagaaggtaaaaaaagagaggcaagggaaacaaagcgggtaaggcacgaaggcaaacaggcacgaaggcaaacaggcacacgaagaaaaggtccagaccgggcgaacctacgtcatcagttacatcacgttctctcctagttacgcaagccttggaaataaagttactcatcccatcgtacacgtcgatcgacagaatggacaagcagaagtgggagtacaagcacatgtatgaggattccttcagagttttatgaccatacaatctctacatttcgtactacgcgctctttacatactcttttccgaattcaatctctacaccttttgagcccattctttccaagagaacggagctttatagatcgtatccgtccggggtggcttctcgaaaaagatcaccttcacagtcgtatcatccctctggaacctactgaccgggggtcctacactcaacaactctctcatctttcgatcgtctccgccagccagagagtttcggatgagtagcgttgccgcgttgagatccttcccaaacatgaacgttccctcggtcgattctgccttcttagcttgtactttggcgttctttccatcaaacccggtcgacagagagtccacggtggacaatatatccgcccgtggaatttctaagaaacagaaataaaagagagggataacaaagaaagaaagaaagaaaagaaagaaaacacgacgatattgcttccgatgaatatgtttgttcagaaaaaggcagagtggagaggaaaggaaagaagaggacataccaccgtgaagatcaggttggtcaatgaacgctcctactagaccgacaatagcctcgttcgacaacctatcgtacactgcaagttgcgttcccccgtccgtgcacgccaagaacaaaaatgatcagcgccccaagcaaaagaaatgtaacaacaaggagatgaagcctcgacaaaggcggaaacgaagacgtacaaccatcggttcccaaaaccaagaacctcaattcaccctctctgtctgacccgtctgacttgagatggatcacctccggtgtggccgtcacatagggtggcgtcttactcaatgatggggcaggccttggtcgtttcgagccagctggaacgaggctgtctatgagtctgatttttttttgacaatcacacagagaagcgctcagtggacgggtcttaggccagacaaagtgaaagggagaaggagaacagatgtaagagaaagactaactccggttggatctccttggaccatttatatctcgcatctccaaactgatccaattggacatttgaaaagaaaattagaaagaagagttagctagaagaagaactcaacctgggatccaggtctatacgtagaatgaaaacagtaacgcacagctctggaaggttcaagtccaccaagaacccgaccgcgcatgatgactgaatctctctccccttgtgggtgttcaccttggattctatatacgtgagagggcccgaaagaaatttcgaacatcagcgatgatggcacgagtcatcttgaaaggaagaaatcagaagaaggagaaaccagacctaccgttcgagttcctaacaatccaacacacgcagtaaaagaggtttaagataacaagggatgagagatgaaaagaagtgagtttagatacaacccctgtttcttcatccgaacagtcaacacagacccgacatgcctttggattccttccagtttggtcctccgttaatacttcaactctccaccttccggctggtgcctgtgaggtttgatctgtctgtccgtctggattgagctgggtcgacgcaggattcgggacccaatacccggcgacagcccgacaatcaccagcaagggcgatatagatgtctttccgggcggtatcgatcacggacagtagggcgcacgaaccggagagcgcaggaagaatcgtggggtacgagatcaagctcaggtccggactattagtggaaaagaacagggaaagagacaagataaggaataaatcggaacgggacgagtttaaatctaaaagacggatgtctcaagtatgggaaccccgcgcgcttgatagcacagcacgcgatactcactttgaaggaagacttgacagaagatccacagctaaaaggtaaaagatgaatctttcttcgatcagagacacgtacttgatatcttcttccatcttgtcaatagaaaaatagggaacgaacgatcccagacaatgctcttgtcgagagtctgccaggcatgcttaatgctctccttgatctcgtccatagaggccccctctagctctctactctgtttggaggacgaggaaaagatatccctgagtctgctcaagcccaaagttgagaatgaagagggagacggctggtctgtggtcgtgcgtagctctgaatccgagctgaaaggcgaaggagatctggacagagtggattggaccgagagggacgttgtcgggatgagcgtttgggagaggaggtgagaggtttgaaagccagagtgaccactgaagtgggatcgagcgacatgaaaggagatatcagccagctgaacctgagtgtaaggatatgattcgagactcactcgaaaacggcaaagaaacagaggctgcgaaaaggagagaaggagaagagggtatcagcatatacccaaagagaaggagaaaaataggaggaggggagagaaaacactcgaaactttatactgactctccatctgcgcccttaagaatggcttgggcgctccgatcttcgataaactcattcgctttgagcgagctagtgtccgacctgacaaccggatttcctggtctgtctagagtgacaatcttttcgtctgctttcagcactcgttcagcctctgctagtccgatgagtttccaggtgtcgacccggacattcgaaggatctatgatgagacaaggtgcatagatagattagagtgtgcgtatgtgagtgatcggaactgggcgattacagatatacgcgtagaaggacatatgctagtagacgagaaaagggcgcgatgtagaatggacctaccagatttcgttggtagtctgtcgttcaagtgttcagaaagcagcgagtggtaaccttagctcgaatatacccagacaagagaatgaactaggaggaaaggaagaagactgacgagaacttggtgtcaaacttgtgagcggtatagacctgactttcttctctgtgttctcggtcgagttcccatctgatcaagaatatcacgcagaacgtgccaaggaagagggagaccgcgttgagagacctatcaaacacttttttcctgccttccggggtctgcaatgcggggtgggattgaagcttgtgaaagagcttgaacctgccgtccggcagctcggccggtggaggaggagctcgaggaaaccgagggattctttgatgttgggatgatgacggtggtgatggtggtggtgggagtgcgtacgttctgatactcaacctaggatatatgagagattgactcaacaggcagacctgccggtagagacgtgaacgaggcaacatgatgtcgattggatgagcttgatgcgtctagagtagaggtacaaacggagcacccacaggagcaacgggcgagtacagaatgaatgagtgaccgacttgggtgagatggcgccggttgggttagggttagttcatggttacggtcaaaagcggtgtgcaagcccgattaacatgcccacgtgacatccaaaaataagagttatctcaaaagtaacccagcagcgcatcaatcccgcagcttactaaccgttgttcgacggaagcccaccc

SEQ ID NO: 1192 - DNA, 61666 bp, Xanthophyllomyces dendrorhous
  misc_feature (46093)..(46102): n is a, c, g, or t
gttcctcaattgaatacgcatgcttatttttggctacgggatttacgaaaatagaaacgtctcaggcacaagtgatttatatgacgtcatatcgtcatccggcatcgatcttcatcctcgctagaccgtagtctgagagatacgtatgtacatgtgaagatcgagtgaatgactgagtgactgagcgggtgagtacgcaggcgggagagccatcaagcggatgtacgctaacaaactctcttgagctcatcatgtcctccttctcctcctcaacgcttacgtaggtctctgcagcaaaggaggatggcttactgatcacgatcgagcgtcgttcgtcgtgttcctctttattttcgtggggatatataaaccaagagggtgaaacctttcaacagacttgtcttcttcctcttttctactatcatctatacacagaaccactaaacagcaatcatgggcaacgtgagtatcctcttggtcttctagtccagtctgacctttctagatcatccatcctttctcttgccctgaatgctgactcttatccgctcacctcttgttttaacctttcctatcttctaactattctcccccctagaacgctattattgataacgtcagttcctcgagttttatgcgcacatacacacacacacacacatctacacattcacatatccacatctatcaggcaaaacgcatgaacaaacccacttacccttctctcctcggttttctttctcccagccaaacacatccactttggatcttaccacccatggatcagacttcctctgggcggtatgcgcactgatgctgctcactgatctcatcgtcatcttctggatgatgacgctgccaaagggaaccagagtgttccaccagatatccgccctcatccttaccactgcctcgatcgcgtactttactatggccagtgatctaggagtacgtcctctttcttgtccttcgcctactaacttcatgtgctgatggatttgctctccctactgttttagtccacccctattgttcctacgttcatccggggagcggcccgatcatcccccagaactgcagacggtcagattacccgatcgatctggtacgtccgatacatcgactggaccgtcaccactccgcttctcctcctcgagatcctcctttgcactggcttgcctctttcggacattgttaccaccgtctttttcgatcttgtcatgatcatcggcggcctcgtcggtgctctaatcactagccgatacaagtttggttattttgtcggcgcgtgcttcgccatgttctacgtcttttacatcctcctctgggaaggcagagtctcggcaaagaggctctcccccggagttggaaaatcctataccacctcggcttccattctcgtcttcctctggactttgtacccggtcgcctggattcttgcagacggaattaactacattgcgactgattcagagatggttttctacgggatttgtgagtctagtgtctttctatattcttgtctgagtatttgtttgtctacttgcctgtgaactcggtgactaaccacactttctcgcgtttattttcttcgtcctccctccctcaaagtggacgttttggctaagccggtgttctgccttttccacctgtaccaactccgatccgaagatctcaccgttctccacctccagtctggtaaggtatccgacggtgtcggtggacactacgatcagaagcgatcgtacgagcttaacggaggtccgactacgtctgtaagctccgtcggagctggcaccggtctggccgctcccgttcgaccggacaacgctcgacgaagaacttctgagaggcgagctgcgttggaggagcaggccggcgctcagtagagaggaagaacgtctcacggaaataaaagggaaaggatctcttggatagggaacgctgagccttttgaaatccccttcccgtggtaaacagggcagtctcttttttgtttttttctctttctctttcttcccaactacacttcttcaacatctttgtagtattccatacttctctttctctctcccctcctctccccctccttgataatctccaccttgatcttctacactttaatctatatttccagacatacaatgtctgaatcttctactacatctctacacatgtatccctaactacttatcctctcgatcatgtacatgatcacttatcggtccctatcaaatgcttatccctccccatcatcgtattggctctctcctctgtttccaggacacatgcgttgatcccagactacacgcctgatttgaatatacaaagctcatctatcgtttgcagagagaaaaataaacaacaaaaacaacaacgacgagaacaacaagccccagtgctgctagaagacagtcaaagcatacttcacactagtgaacgacgcaagcgcgcttagtttcaatagaccaactaaacgaagatctgcttccgagctttctccgcaatatgctgtgggcgaacaatcggtactgccgctcggtgttcgttgactctgctggcccgatagagatgaagcaggactttacacatcacgttttaccgttacccgttggggttcgagatgaccgagcacgaaaaggagtgcgcgcgtagacctcccagcccacaccattctggagtccgggaaaacaggagaaagagagagagagagagagacatacaggtcgagagagcggctagggcgacgagatcatgctccttgggaacgagtgatctgattaaaggttccggttccgatttggtcaagattcagcccagatacaccgagaaaagaaacatagaaagtgatgaagaacaaagaggcgtgaccttacatcatggtaacagacttcgtgagcgagtacgcgtacgttcatgtgtgtaactgactgactgagagatgaagtgatcagacgaatcttgtaccgaaacttgagctggtgtccggccgcacattcgcggttcagacgtggatgcattcatcctcctccaaataagacagcgtgtatacattcgacaaacatcctgccattcttaggcttgatgatctatgccatagcctttgttgttcagaaacatcgtgtttcgcccttttctctatcggtttctctggatgagacagagagagtattcgaagatagatgtatgcttcttgatgaagatagctgcagcgatacaatacctgtcatcgtgtgcaagcaagtaccgcatcggagatagaccagtagcaaagcatggcacattccgtcgaaacatgcgtaccccataagacgaagaaaaacaagagacaaggagaaccactcaaccatcacggcgacctattaacatcggatgatcctgaccggtgtccatgatcataaactttggccgtgctagaactgaaatggtggtgtaaacatatttgcagctaacaaatgaggaaagtatgatcgttccaaatgttgcggccacgtgaagcacttgtaggtttgtttctcaagacaggatagaatggaaggagaagaaaagtcaagacatcagaggaaatagagacgacgatgaggacgacgtccgccagaagaaaagagatacagaaagaaagtgacgctcacatccaccataagcgtaccgagcttcgggatcaccagtgtgatatccgtacgtgtacaacaccctacccagcacccagattgcgcccagggaagcagacaagagtgggtactctagtccgttgaacaagatcccaaatatcatgtgtggaaagttctttatgggtttagcaaagtgacatcgtcagatcagcagaaagcatatcgcaaccaagcgcgatgcgcgtatcgaagaagaaagagaatgaaaaagaaggtagacaaacctccatcgtgtttgcctgtgctcgttgagcgcaattaaacctaacagcctctgggctggcatccatctgggccttttctgccatatactgtgggtacggaatctttgctgccgctcgaaacttgttcactctgatggattggtatacatttaggaagacttgatctgattgaaggacaacaaagagaggaaagacaagaggaggaagcgcgcatgcccccgagagagtctaatcagacatagaaagccccctcttcttaattgacgaggtgagaagagaaacacaagatttacaggttgatgtgaccaccagagtcacatagctatagttcttaggaagcacggagctgagcgattggaaaaccaaccgataaccacaaggaatagaggagagagagacatgtcaagatcgattcaaccagtggtacattgatgttccagaggccatcggaaacaagaacccttacaaaactgcagagtccatcttgaagtgacaagagaagtagcgaacaaaacatcgagacaagaggaactcaggataccgaaacagtcctatagactttatctaacccagaggtcacactccatccaagctgttttccctcatgcacaaagtctcatgccaaaatcactggattcatggatcaattcgtctcaacacaggatgaaaccaaaaaaaaagttggagagaaagagctgcctttcagccagagagactgggctacgtgtagatcaaaacacaagtaccaaaaaaaaaagagagggagagggaacgtagagaaaaagaataagtaacaaggggaagcgatagaggataagaaagaaagccacaagataaagaagtgagaagaaaaaggatggaaggagaaaacgtgagacgctggttatgcttaaacactggatatccgtctagaaagtcgtcatctcttcaaaaagaaatctccgacatcatctatgacttgtctgtgtttgtggaataaatccaaaaatcgatcgatgtatcagtaacagatacagagaatacgctctagacatcaaaagcagaagagtcactaacaaaggtttcgcttgatgaccttgacaagcaagttggtgtcagggaaagagagggtctcaaggttctcggcgtaaggagtgggaacgtcggcaccggtgattcgctcagcaggagcatcaaggtagtcccaagcctcactctcacagatctgggcaatgatctcggatccaacaccgaacgcggggaaaccaccctcaacggtgatcaatcgaccggtcttcttgacagactcaatgatggtctcgatgtcaagaggtcggatagatcgaaggttaacaacctcaaccttgatgccctccttagcaaggatgtcagcggcctcgatggcgtgtccgaccatcttggagtgtccgacgatggtgacgtcggtaccctctcgctcaatcttggccttaccgatgggcaagacaaagtcgtccttcatggcagcctcgctcatagggaaggtcactccgtacatcaattcgttctccaaaaacacaacagggttctggtctcggatagcggccttcatcaaacccttgcagtcttcggcagagtagggactgacgaccttcaatccagggacggatccgtaccaagcagcgtagcactgactgtgctgcgcggcgacaccggcggcagctccattgggtcctcggaataccacagggcagggaacgtttccaccagacatgtagtaggtctttccagcagagttgacaatctgatcgatagcctgttgggataataatcaaaggaggaacgctgagctttacattcatgacacgattgtaggataaagctaaagattctgtacctgcatggcaaagttgcttcaagaatcaaagaaatcgtgaatgtcggtacaatgtacgaaagaaaaaatgtacaagaactaggccgacttacaaagtcatgaactcgcagacgggcctcaatccagcaagagcggctccaacaacgagaccaccgaatccagactctacagaaaagaaagacagatttgtgatatgagtaaccagagagttatttcaaactttaggcatacgcgtcgtaccagtgataggagtctggaaggaacagtagaagaaaatatataagcttatgcctcttcaatctggaggtcagcaggagatactcacgtcaacaactcgctcctctccgaacttgtccataagtcccttggtgacctaaagtatagggattaagaaaagaaagagaagatacatcagctaggtatctagatatatcacttgtcttttcccaatcggccgtcttgagcgttgggtacactaaatgagaaaggaacaaaccttgtaggcaccgttgtatcgggcgacctcctctccgatgatgaaaaccttgtcatctcggatcatctcctataaaacgagacgaaaccagaaagggaacatgaaaggtaaagaatgggaaaaaagccaagcatcacaagtcgattacaaggtcggagaaagatgagcttggtggttaacgatcggctcaataaagaaacgaaaaaacagagaaacgaggagacaaatagaccaacctcctccatagcaacgttaagagcgtctcggacggtcatcttaatgaggcaacatcagaaaaggaaaaaaaaggtaaccccaacatgtcgataatcacatattaaaaaagaagcgaggagaaaaaaaaggatatcagcgaatcaagcttcgatcaacgtctctgacctccagtagcaaagcataactctcggtcatagaagcagatcgtccgatggatacgacagatcgaacaaatagataaaccggagagagaaagcaaacgacgaacctcgtgtccaccagacgaggcaaatcgcttagaagcccccacaagagcgggagctgcagcgaaccgggcggcaggagaaacaacggccttgaaagctgctggtcgaacgaatgagggagcaagtcgggcgatagtagggaagaccatgaagggcgatgagaaacggaaggagagagacggagagggagacggttgaagatgaggatgggatgtggtgtgtgttggagaaaatggcagtaaaatcggaaacagcgtgggggagaaaacggcgctccgttttttgtttttgaccaaataaaggcggaaatttcatgtattttctcctccagcctgtggcctcaatcgattcttagcactctctttctttttctccctttgctcctttgtccgttctatgtcctctagatttgatctatacatcatcgcatggacatacatctaaggatcttcaggttcacagcctttccatctgtcagagcgcacgctcataggtggatgccatctctgattggggcaactgattacgtaattttcgtagttgacttcaatcttgactatatcgacctaccgatttaatattgtttccgtacgtttgtccgcatgcgcaagaacaaaaaacaggatatacatacgtcgagaactcggaatggatgaacagatggcatacgaatcctaactcacgacaattcaaacatcatctcattcatttttggtaaaacgtttaagaaaagaaagaaaagatagaaaaaaggcgaggagagagaaagaaagaaggggaagagatctacagtaattcatacagcccgatcactccttcagagctttcctgagaacctcaatctgtcgcttgatcatctccctgctcggcccaccgatcgcgttcctcttctctacactcttctcaaagtcgaagacgtcggcgaagaagtccttttcgaacttgggcgagagctcctggtactgctcgtacgttaggtctgcgatcgagcacttctcagcctcggccaacgcgacggctcgaccagagatgtgatgagtctctcggaaaggaacctgtatgaaaaaaaagaccaagtgatacgttgttgtcagcggaaatttcgatggacatgatgtcatctggacaaggaaatactgaccccttttcggacaactgtcaatgtatacaaaagaggagagaagccgttgagcgcattgtacgcatacggacggcatgcgccgagaaaggagaggtatatgctcacggtagtcagccaaatcggtggctagcatatccatggtcaaagcagcttccatcttctcctggttgatctgcgagttttaattgatgaagaaggaagcaggcgaaccaacgtcgcatcagaaacatggccgtttatacagctcgataccttttctacgaagaagactcactgccatcgttccgatgacaccctcgcaaatcctcaagctagcactgatagtatcgacagaatcgaacaaaggctcctggcactcctggagatccttgttatacgtcgagggaagtcccttgagagtcatcatgaatccagacatctgaccgaacactcggccggactttcctcgaaggagctccaaagaactgaaaccatacagataagaacattagtaggccgagcgccgaaaacgacattttcagatgataaagagaaatcgctcactcggggtttttcttttgaggcatgattgacgatccggtgctgtaagcatcgctaagttgaacaaagccaaactcggcggtagaatagatgatcaaatcctcagccatcctcgaaacgtgacccatggtcatagcggcccactgaaggaactcgacgataaagtctcggtctcccgtaccaaagagcgagttctccacgacagaggtgaatccgagctccttggcaaggaaatctcgatcaacatcgaacgggtttccggcgagtgctccacatccgagagaaagcgacgagactcggggaagaagcgaagaaagtcgggcgaggtcggtcgagaaagagaatgcgtgagagaggagcaagtgcgaccatcgaatgggttgagctcgctgatacaagaagttgagcatagtgggtgtatcagatcaagagtgccgagagaaggaacgatgaagatagatttacctgaagatgggtgtatccaggcatgaggacgtcaacctctttctcggatcggtcgaccatgacggcgatgaggtccttgagatagcccttgatcacccgggcctcctccatctacgagtcatcatcgcgtacgacggcaacatcacgatattagctttagaagatttacaagtagccataaataaccaagacagaagaggaaatgaaaactcacaagccaaagtcgaagatctgtcgagacttgatcgtttcgggatcgaccggtgtgaagctttccaccgatatccttaccaatgatctcggaaagccttcgctcattagcagtgtgaatatcctcatcatcaggggcaggggtgaactgtccgtgtaagtcacatagtatgtttccgtttagtttgtcagatacaatatcgtgttgtgagtagcgacaagaaaaaaaacagatcatacccttttctcagcccactccttcttgacctccaagagacctctctcaatttcactctgctcgtgctcattaagaattcccactttgagaagagctttggagtaggcgatggatcccttgacatccacagcgtacattcgctgatcgtatttgaggcattgctatatcatttaagagaacgctcgtccagtttagtccaacttccgcgttgattacagatagagagaaggcttacgttaaactcgtgcatcaaaggatcggtctcgcctataaacccgataaaattcggtttcgtcttcagcactcatagtacgaacgtcaacccaatgcacagaaactaaccagtgaatcgtcctccccatagtttttgcttggtaaaatcctgaaaaaccaacagaggtatatcaagataagagatctgcgagaacagcccgggctcaactctctttacccaacaacttacagtcatattagaatagtggaaaaagatctttctctgtgcttgtagagtttggcagtgggtcaatgttaatagaagaaacagaactcaaacgaaaaggaaagaagagggaaagaaatatgagatgactcttgagcgaaaacgaaaattaggacaaactgataagatcccagccggcctaattgaaatatcggtctgcccgcggcgagatagggctaaatgaggcacgtgatatatctgagtagaagatcacgtgttgtacacagcatggctcaccaactggggctgttgcgtgtccatctcggactccagagtgtcatccagaaactggagcatccctactagacgacctgatcactctggaatctcactttcccactgacttgcatcagttctcattcgtctgtgaagtcataatttagagtcatagcagatcagtaagctagacagctctccacagggagcagagatcaatcgaggagcatataccatgtctacaggtggaaatatcaaagtggtagtcaggtaagtgagccttcatgatctgtcatatcatcctcatcaaagatataaatcacaaatggttccttctgcttcgaacaacagatgtcggccactaaattcgagaggcaagtcacccttatgtcaggtctttttctcttgaactacacgatgaaccatgaagaaactggcacagaggaagaaggactggaagctcggaccttgcccttggaggtgtatagtcgcgtcgctgatgacccttcggtttaacgattcaatcctacgatagaaattgcgcgaggggatacctcaattgtatccatgtctggcgtctctaccactatagagcctccagcggtggagcttggcgcttcctccagagggaccgaaagaaaaccattgtccttctcgttcgtagattcgcgctttcatccttctttggcgccctacccctttcttgtcaatctctgaacttataaatccggataatgatactctactcgaaacatttagattcgaccactcttgtacgtacttgacatatgcaccaccgtcttgtaagtctggactaataggaacgcatacatgcgcatctttggaattgacagattggtcggccggcaagaaatctgatccggaatatgcttctcaagatacgctctatcaagacctaggaataggactgcttgaccactcctttcaaggttttaatacttgtatctttgcatgtacgtaccaactatcgtttttgttcaaatgcttagtgcttgttacttgggctagtcatggcactcatatcatccatgccacttttggtttcagacggacaaactggttctggaaaatcctactcgatgatgggatatggtgtcgagaaagggatcataccgttggtctgcgaagaacttttcaaaagagccgagcaagccaagtcaaagattaaagaggatgatcattatggttactcggtggaagtatcttgtaagtatgctcttgctctttgcatgcttgtgagtattgagatgatcttgattaatgatatgatatctcgctcggaccagatgttgagatctataatgaaaaggttcgagatttactcaatccgaaaaacaaagggtccgtcagtcctatgcgtgcgcaattgcatgatattatatcttcctaatcagcgggtgatctttcctcccttctacttcttcgatacatagaaacttaaaagtccgagagcatccttctttaggaccatacgtggaagatctcagcaagttggtcgtgagtagttacgacgacatcatgaatctgatggacgaaggcaacaaggtaaagcatatctcaaatttgtttcttgcatgtactcacgggttctgagaagcagtttatgctattcgaatatacattgaccgagtataggcaagaacagtagcggctacccagatgaacgagacaagttcgcgatcgcacgctgtcttcactttagtggtaagcgagaaggtttcctgcttgcttcaacagccataatctatgtatgatcgtgctcacacatttctttcggtatttaaaagctcacacaaaagacgtacgataaaatgacggatatgaacatggaaaaagtatcgcgtatatcgttcgtcctcattcacatcatcaccactatttctcgttttctttccgcttgtctaattcatcaaatacatcaataaacgtagtctagttgatctagctggctctgagcgagccaattcgacaggagctacaggggcacgtctcaaagaaggggccaacatcaacaaatccttgacaacactgggaaaggtgatagccgctttggcaagcgctagcgcagagccagaaaaaggaaagaagaagaagaaggcggatgaacacatcccgttcagagattctgtgagtttcattagttgaatacgaatggaaggtttcatttaaaagaagcaatcaattaacacaaagccgctcataggtcttaacatggcttctgaaggactgtttggggggaaactctcggacgactatgatagcagccatcgtgagtgaatgaatacctatctgcttctttatgtcacttggttatttagatagtttcaactattcacaggcaccttcgtcggcatcatatgaagaaactctcagcaccttacgtgagcttgtatcatcccagtgacgctgattttgtatcagaatatcgtattcatcagatccaaacatcaccttcggccatctaggttacgcggatcaagcgaagaagatcaagacccgtgctgtagtcaacgagggttagaaaaaaactgtctgaaaaggcctgatattttgatacaactcattgataactctcttttctacaatgttctggttgctcagatccgaacgcaaagatgatccgagaactgaaagaggaattggagatgctacgaagtaggtcaactgtttatgtagatactaacgtgctgccttccatgtttgctgaagcatctcaatcattcttgcagctcgtgttactggaggaggagctaccgaatcgctcttcgatccatcaattccgtaagctgctccccatgaaatttatcgatttatattttcacgccagactgattgatagtgcgaaacacatacagaccggaacaacagatggtgacttatcaaacgaaagagggtggaatccggacggtctctaaagcggccctgcaggatcagatgcaagaatctgagaagctgctcaagtcggtcaacgagacctgggagcaaaaaattcagaagactgaggaagcaaggaaagaacgagagcgggctttggaggaactaggaattactgtggataaagcaggagttggggtaacaccactcttcacctttctactatccgtcgtaaacctagtaacatgcacttagtcattccgttcatcggggttttgtctttttgtctaggtacatactccgaagttctcgcatttggtcaacctgagtgaagaccctctgatgtcagagtgtctagtgtatcagctcaagcctgggaggacaaccgtaggaaatgttacaagtttgacatcacctgccatccgtttgtccggctctcagatattagatgaccactgcgccttctcgaacgagaacggcgtagtgacgcttgaagcctcaccaaactcattaactgtcagtgtctttgtgaaatcaaaccaaagcttatagacaacggtctattaatctcgctcaactcttcttctcagatcgttaacggaaaacgagtattgtttaacgaggtaaatcttgttgaagaacatcgacatagagtatcgcttgtgtcgttgcgttattgacacatctgccattgatttctcaaatcagccccaacaattacgatcaggatacagagttatattaggcgaccaccatgtgttccgtttcaataatccagaggaagtccgacagcagcgagatcgtttcaacacctcaatgagagatagcatatccgcttcagacctttccggactaggttttgggtcaccaggttagtggcatactatcgcagaataatgattacatgcggaagctaatagctgtcctctagtgacccgccctgattcacctgattcgttggcagaccaagatgccgtggtcgattggacgttcgccaagcgagagttagccttggctcatctcaatggccaagacccaggcctgaacaagcttaacgacgaggaccttgataaactgttcgatgatgtacgtgccatgcttctgtgtttttttccactccatgtgttgttaagatgcgtttggttcggttgttttcaagcttcaaaaagtacgaacgcttcgtcgggataagtcccggcctgatagtcgaatgagcaccaatgaggatttctggagtgataagggatcggtcactcgacatctctctagcaattttaccgaagacacttcaatagatccaccaagcgttacccattcgagttccggtaattttcgtctcaatactagtcatggtagcaacaaagaagaccggccttgggacggctaccagagtcaattatctacgctgggagaaacgccttctgaggcagatagagaggacttcgagatggagagagtccacatgaaaaaggcaatccatctgatgaatcaggagatgaagcgactgaagcagcttcggagccgaggagaggtagacgcgaccatcgagtttgagcctcaaaccttctctgctagagagttgcggctagttactaaggtgctgaaaaggtggaggaacctacaaacactacagatggctgaaacggttcgtgacttaggttcctattgaacttgcttagcgatgtctgcttcattcattcgactcatttcctgtgatcgtttctttcgattttctcagatcttgtctgatactatcaaaatcaaagaggctaacatcatgagtcggagcctaggtcatctaggtttgtctttcatggtttttactgaaccgtactcattcacatactcaactttgtgttttatcaagtttcatacaactggtttattacagacgagggcgccctatctgcttcaaggtcggctttagatgccgaggtaggtatagctggtatagatgatgatccttccggtgaaatctctcggtctcctcgtccgagagtaggggtcaaggtactagatagtgagcataattgtatgtcttattctgggttaccgctgaatctcgttgcagatggaagtctttgggtttgctgataccatgctcggtcgactgcaggcgtctatatctggccatacgacaaatttctgcagcaatacgcacagatgaaaaacgtggctgagttgcgcgaaaatccgtaagtcaagtatttttatgtctggtcctatatctagcataagctgaaaagggtatttttcactgtcactgtctcttcacctctcaggacatattcccaacatttttctctcaaaaatccatttcatgaaatgtccccgatagaacattcttttatcggatcgtcgttgatttccttggcttcactgtaccgaggaatatctgcttcgaacatacatcccatattctgtcaatacacctcgtaggtgctcatccacacttgttttatgtgcttattactcgtcgctgattgtttggccgaaatttcagtgaagcaattggctcctgccgtatctctctcaacatatcatccgttcaagatcaatccatagtcagctccgcgctctcttcttcggcctcttcacatcattcacctgctctgcctccaccaattgccgtcggcaatcaggtcagctttgtgctttgcatcgacgatgtcaaaggaccctcatcccttgacttttcctcacttcactcccaatgtcgcctcacctcatttaccggcccttccatccctgttgaggacaaatatccttcatcggctatcgacttaaacaaccgttctccttcccatctctctttccggcgtcagttttctttaatgattacctcagagatcctacagcattggcgcgaaggttatgcacctatcgagttctttgctatagtgaagccgggctacctggagcgactcttcaactgggacagagctcgagagcgagaggaacaagatgatacaagaaaaacatcgcagataaatcttggtctattatccaaagatgaatcagtgcgacgaccaaaagccgagtcgattcatactcaatcgtacgacatctcggcttacctaactatctgcgagatggactctcttggagactattctcctgtgtccgtgctctcccagtctttcctcgatctgggtgcgttctaccttcaacaaggtctgcaacgacgggtgaagcttcgcctgagttacaactctggccgtaagcttccgtgggtaaaagtgtccagtatgtcgttagggcatgttcggttgctcgatgacaagggccaaactatagagtttcatcaaggatcttccatcgaactgaaacttgattccgatgggactgattcggtggagtgtttgcccgatggttctagctctctttctgtagaaggcttttggaattcctctctgcataattcatcttcgctcaatcgacctacagcctctaaccaacgggtcgttctccgtttcacgttctcaattgagatatcgacatgtgaagagcctgcgacgtttactcaagatatagccgttcgaatactaagacgaggagcatccggcccggggtttttcgatgtcggtttctttagctcagcgcgccttctttcccgatccagctcgatcttcaacctttctctcactccgcccacaacgcgctctgcaaacgacctttggcggctagatacctcggaagcctacgttcgaggggaagagatccttccatctgattggaaacctagaggggttagtatagtccaggggcgattccggctgatggaaacagagaagaatgcggcggacgtgagagtcattaaggcgttactcactgcctatgaggaggagccaatctcgagaacattagactccgcgcaagaggtcgatcttttgcgtcggtcacttggtctttggaacaagtttggatcgaaacaaagagtgaggttctatgctcattcatagatagcctcgtgataagtgctgacgagaccttaacacacctggttgttcttctatagcgcatgctgaatcatcatgcatccgatcccagcctatcgatcttggccaagtatatggacatcaacgatctggtgcccaagcttgttcctcaagtgactttacttccacgatcgtatgtgatatcatcttttgctatcatctataggctttattctgactctatccgatacattcggtgtacatctcatcgatggcaactttacgtttggatcttgtacagagacaaagtcgctaagaagggctggctcaatgtgcgctgtcttgtgtttcatattccaaccttagcagagctgactcgttgactgaccttcttaaatctatcgtctttcaacgtagatcctcaccgacgcgccaaacaacatctgggcgaaaagatactgcattctccgagggtaagtgtgtccggtcaaatatcttgttagagtctgagtacacatctctgaatccgaatggtgcgacctgtttttatttaccctcagatcttacttgcatctatacgagacggcggctgcaggcgatgaggcttcagtaatcagtctcgcttcccagactgctgaagaaggaccaagcgtggtgtcgagtccggaggtcgaagatctgctgggtcggaaatttgcgttcacactgttcacaagctcaaactcatacgtcctccaggccggaagcgagaaggacaagcagagctggaggtcgacattggaaaggaaatactgaacgtcgggtgtctttttctctcttttactgtaaaccctttctttagatatctcctcttacgactttcacgaccctctagatcgttccttatacgccatcatcctctctttgttcagagatcgacaaccttgcctttctctctctctcaagtttagatagtcctctgtagacatacttcttgccaattacgtcataccccttactttatgttacccttgaacgacgtttcaaatttccgggcattgtctattctatcaagtgctttgcctctctcttgggtgatgttttgtcttatcagagacagataaacgtcgatgatcggagaacttttggcttgataaactggatacagtgcagtgggcagattgggtttgaaagtgacgtcaacgacttttgtatctaaagaacagctcaaaacgcatgcatatacccaggataaaattcagagaggttgtaagctgatgggtggagaggaactaagaggtttcatgagaaatataataaagctcaacgcacactttttatcaatctcacttggccttgtactcaggagggggcgtctggaccccggcgggtgaggctcccatggtatcggcagccgaaccagcgggttgagtgcccgctccggaggaagggcttgcaggtctagtgaagataatagcctgttggagatccaaatacaataggaaagcaagaagattatcagataatgaaacacaaagagtaaaccaaatccagacaggacgaaccactaaggaagcagcggcagctccagcgagctagatggccatgcgttcgagaaagaaaccatgaggaagttacataaaaacgaacataagcttcctctgacaaacataatctctcaacagtagatgatcaagtatgcagttcgacgataaggacgagcgaggccaagatcgagagaacggaacgaacgatgaagacagagtacttctcagaaaacgttcggttgtcgtactgagcgtacgatctcttgaccggcttcatgacagccgacctagatgaagatagcctggccgatcggaagactgattgagctgtctgtgaggcaagcatgatgtgtgtgttgtacaagagtgaatgggccgtcaatataaaggagatggtcgatggtcggatgaggacgaggacgaggacaagggtgaaggtaaaatggcgaagcggccgtgtcatcccggtcacgtgagtgatttcttgtttccccatcttcccccatcattcctaacggctcatctttgtagcattcatccagtattcttacattctgtcttccatctgtttctctgtactctctcgcatcttgacagatggtagtcaacgagacagtcaattcctttcatgccagtccatatgggatccctcgtcaacacaggtaagcttttgtctcgatcgacgcgtctgatgtttccgggatctccgaagtcttcttgacaacacctgcttcttttttcttttgatgattccttctttgcttctgattcgctcgccatcatcaactatgttgtttttggacaacacctacagtacattagctgtgtcctctcagaatgtctcagtgttcccatcgacagctcatttaccttcactgaaagcgtatccgctttcttccgggccgagctcctcatcttcctgctctaaagggtcttctcggacaaatggaatctttgatcttcctctccctccctttcctcttcctcactcttcgccgacaaacatatcgttctctccaaactctcgacatcttttagcgttcttccctctactcccttctcctgattccagctccaaatccatcgacttccctcttgttccctcaggtcaaacactatgcgaggacactggaggaaccttggcgctttgggatgtcaaaggaagaggacgaaagaaggaagattggtcggttcgagaatggtgggcgcttggatcaggagaagaggtagttgactttctctggttgggaggagatcggcaatggactgttgcttccccgtcgagtatgaattctatcaagaaagagaatgaatcagttggatcgtcatcgacaatcaaccatccgcacctatcaactacaaatatctcctcatcctcattctaccgtctaccatacgccgggccgccaaccttcccgatgacgtctcacctcgcatcttcctcctcacttccgccgcctccgacatttctcatcctcacatgcactcactctatcgttctctatcatccgcatcaacagcaaagtcaactcaggtttttaaagtgcaagattgacgcacacacagtgagcgtatggggggcagcggatgatggaaacttttcgggtctcgatggcgctggatcggcttcaaactccgggactgcagaaggaagaagacgacgggtgagaagaggtcgactttggattagaggagaaggtacgcgcgctagcttttttccattccgtatcaacacctacccgtgttacctgagtatcatctgatgcagttgacgctctcggcttgatttacatatctgatatcaaagatacctcaatctacctcgccactcactcgacacttctcccttctcatcaagaatccacctctctctctacccagccgtcgaccgcaaacttgctatctgggctgggtctcgatttatcaatccctggtctagagaacccatcaactagaggagcggttgacgagatgggcgatggatcgatacctaatcctattccgcctttggatgctcccttagaacataaaggatcaatcggggaggccgatcaaaaacccaccgatgagagatggattgatttagtggagatcagggtggacttattaggcgaggaagccagtaagtgttgtcttttctcttgtctcttgatataagattgaattgtagtacaacccagctgagtctcctatatgatttcattgtactcgcgctgatgactgggcacgataaggtgtgacaagtaaactactaccacgcgttctatttgatgcgtccgacccatcccaacctccgacttcctcatcctcgactaatgtccaatcaaacgactcaggcctcatcctctcctcttcctttattctcacccacattgccttcactgatcccgaatcaggcagttcgcccattccatatgagacccctgagttaaatccgaaccgagctttcaagcttctctcggtctttcttgacccaacagagacagatatgcacgaaggatttccatcagaagacgggtcgagtatccacatatgggatatcgaaaagaaagagattgaatcctctgatacgttcttgtcgttctcaaatgcatcctccaagggaccaggatctggtgatcagtcaggagctgtaagtctgatgcgctcacagacacttctctccacacctaaactgattgttgctaattctgtttcttgaaatgtgttattttggcaatctttcagaccgcagtatattcaatgtctcgatcttttcagggagcgaccatcattgcattcgagccaatcatcggtttaaatgagcctgttgcgttgatgactgtcattgatacagactctggcgattcacattcgacagagaccgttggattatcacgaggcatcaatctgtaggtcttacaaaccatgtttatcatgtctcttttgtgaagcgagtgacgctaaatattcaaattttcgatatacgtctgtataaagtcgtgatttgtcggaccatccgggatggagtcctatccaaatcaggtcaaaagctggacggttggcctgtgagttcttctctttgctcttccttttgtgtacgcagtgtttgacatctatgatggtcgctggctcctagtccccgtctcggtcgcatacacagccaaccgagctctccttgtcacacttcctcaaacctctttcctagaggctcagccaagtctatctttccatctatgtacaggctcacatccgcctgctttatcacctgacccagaaaaatctagtgcgcatctttcgtcttgctcgaatcgaatcggttttcagctagttctccagtactgatatttctctatgtttgtaggtcaaatgaaagacgaattaatagattcgcttgcttcgagattagccttatcactatatagacgttcaggaccggaagatctcgtcaggctaatcgtcggtttaggttcgtctatcactccgaagggtaaaaagcgatttagggaagactccgcatccggtaagttatcttttcgtcctttagaccgttgaaagtacagacgttgactttcatatcctgacggggcatgagatttataggtgatcggtcagaattcgttctggatgtcttggtgcgcgtatgggtccttttgtctttagacgaactatccgagagaggtggtggcccagccggaaaacttggtgattcaacttggctcttgccacttattgaagttcaagtcgagctgtacaggtttgtcttgacccggttgttcattatgattagcttttcgcggatctaaatcttacgtcgcgttctctcctcggtttcttctttaaagagctgcagcggatgatcgttatatgctggcgcaacaggttttagacctcgccgagtgtaatgccgaattcatccgcgagctcataacagggacagacgggtcgaaagactcatggcctatccgttcgttttttaacttttttttatcgctaggtctgttaaaccatctcgacatctatgcttatcgaatctctttcctgccggtgtgcacatcctgtatagaacatacttgggcgatggttggacgggtgaagagcgcgttagaattggttgatcaggtttactttgatcacgtcgtcgatcatagttggactgagtggaatcgaactgccgacgtccagagtgagtttcctttttctgtgtttggatgcgctcaagtccttcgcggagttgactgacactcgttgaaaataaaaaaacgcgacgtttagatcctccatcccgatcgatcttgatgttccttcatccgaccctccgatctcttctcttatcgatactcactcaactctgtcgattcactgagtttatccaatcccttcctcctgttgtgtaccactacccgaacccttcaaagtcattctcgacaacggcaccgacggtggcagcgggagagaacttgttgtcaggagactcggagggtgattgtgagactttggtgacggaagtgatcaaggtcgcattgaggaaccttttgtacaatagcgctatcggacgaaacctgagccaagttttggaagctttagaatccatggaaggtggtttggctgaaggtttgtctcttctcgtaggacggcatcttctgtcgatcaaagacaagcgttcgaaattagagactccgaactgattgaccgatgtatctatttgtttgcattgtagatacaccacctgatcagtcagacccaatattgctctcgctatcgattgaaccttcactagagaccaaggctagagcaatctctgcgtcgatagctaaacttccggctgatgtatgctccaaattatctttcttcctttcttcccctcttgtggatttccaaccgtcgacttcacccttgaatcgagccactgtttgaggattgttcttccttcttgacctcattttttgcttttatcctctcccttttagttttggattcctcctcttgtatatactttactttgtgcttttcagctctattctgaaaggagcacgtgcctaactttttttcccgcagaactacagaactctcttctcttcttatcgctttgtccctctccccgattgtatcctacagcccgatttaataagtgcgatcgtatgagatcccctccctctcctatttacttcctgtttcaccgaaaaagttgatattgttcccctaaataccgattttactatatttattcctttcgggtcatcatccgagtgcacctctctcttttagtttgatatcagaaaaagatccaagcaaggcagcagagcgatgcaaaagcaaaaaacaaaagcgaagagaaagacagagagacacccaaagaaaaaaggatcatgctacgacttcgattcctagtgttctggccgactccaccaatccagagacgattccatacaacggcacgccctgcaagttatcatccctactcttcaattttgcaatctcgtagatcatcttcaacccgatcttgcccacgatcggctttgctcctttcacgcctgcacctctcgtacccttctcgacgcctgccgccttcttgatgaggtacgaagcattgggtgtcttgatcttgaatgtgaaagacttgtcagggttgatcttgatgacggtcggcagaggagtaccaacgacgtaatcagccgtacgagcgttaaattctttacagaaatccattgatttcactcctttcgctccgagggctggtccgacaggaggagttggggcagctttacccgcctgaacagtgattctctgattattcaaacgaaagaaaatgaaaaaaaaaaaatcaggccaaacactgtagtaggacgaagggaaaggaatcaagaggcaggcagtcttcgaaaaggtgaaacgaaagacaagaaatagacaaggatgtacaacggtggccgcggatactaatttagacatggtggatattgaagaccttcaagaaagagttgaccagagtgtttgtttgacgagaggaggtggtgattatgatatatttaagagtcttcgtgctggtgacagctcttctttgatacaagacaaagacagacggagaatgagtgaatctttgtgttagtttgaggagccatggaatcaacgagaaatcaaaggaaaaagacaagtgaaaggagaagagagtgtttaaaatacaacgacacgaaaagccaaggatataagtgagctaaattgagcctatatcgagctcaacaagcaaaagatgtactgacctggctgatcgataggccgggatcgctcgtgttggtgaggaatgttggattgatgatggtgaggaagagagaatgaacgaaggactaagtcgagatacttaggtaagagccaaggggcgtggattcaaatacactttatgcttacctaaacaggtttgttcttttccttgtcttatctgatttttactccgtccccatttttttccccttaacacacgcacacatcacacacatacaaggatacgtacacgtacacatctcttttccacccatggctagtcgttcaaatgagtatcttcattcgggaagagtgtcggcaccaaaaccagcatcatcaggccgagtgaccgagcgagtccttcttcaacctagaaggcagagccatattcccgacacccacgaattcaccgagtcccagctggaagagtttagggagcaggatcggttgctacctgtcagtttctatcctgctagttttcaatatccatctgaacgtcgaactgaaatgttttgttttcgtttctctctatctgaattttcaaaatcagatcgcgaacgtgagcagattaatgagagaatgcttacctccgtccgccaagattgcgaaagaatccaaagaatgccttcaagtaagtttcttgatgtcttctttttcctcggttgtctgctaactgatattcttcataacatctcctcactaccaggaatgtccgtctcttcatctttggttcccttcgcttgaaggaaaccgatatccgacctgaacggcgctgacgccaagatctgatttgttttggtttgattgatttgtcgatccaaaacggatgaatacggacgattaaccaggcgtttctgagtttatttctttcatcgtatgtctcgttttcgagttttgttaagtgatgatattctttcgtcatcaacctaacgatcgatcgctcttaacggctcttcgaacgcgaacaaacaaaacaaaagacatcagaagcttcggaacgatgtttgcaaaacaaacgaaagacgatgaacggcgagggtaagtgtttccaatatatctttgatttgtatttgatgcagcctgtctaaatcggtgtactgatgcgagtaatctcttcagatatcctggaagcgatgagtgcattgggcaagtcttttttttttcttctttttttctttttttcttttttttcttaatcagatatgtaaaatataaggacggaaaaaagagtcaacatatttgatcttttttgaattcataatctgatttttgaatttgggctgaatttgaatttgattatgaaacttgacaggatttgacaattatgtagaatcattaaggatctacctggcaaagtaccgaattgtaaggccttctcctttcttgtgaatgcactgacggccatggcatacgataatgattttgttacgatttattcctcttctttttattgcacgacttgtaggcgcagagcgaaaagcctagacgaccgacgacaggttccggtttgatgaccacaactgatccatctacgggacttgatgtggtgatgaagaaggaagaagaagatgaagataaggatgatgaagatcgaccgatgaaattctcatcggttgatcttttgggtggtgggatccccggaggagagtattacgggttcacgaatgatgatgaatacacggacgatgaagtgtcggaggatgatgaggaataagaggacttcgtcagggtttgtcaatgggggtttcggtcgctgtcattttttcttcctcctcctccttctcttcttttctccctctccctcttctctttactttttctcttctcggaggcagatctattctctgttttgcgcgactttcacccttgtggagggatcgaaatggagggagaggatatgcgattctagaactacgggtagccttgtgagtgtcgctacttattatttcttatttataacgcaaggtgttgtgctaattctcaagatctatagcggcaagccagaaaacagacaacagaccgagggagagacggaagggacacgacgaaacccatcattgggttcgggaggggtttgacgaaaagactgagagacctctgctcgcctactcgcccgctttgttcggacttgaccaacagtcggcaaaagcacagggaacaagtaccgatatccttattgtcatttcgctctttccttctactcttgcgcatttcctcggctcgcgtgtttctctcgggataagatgaagcagaggatgatgaaagcatgatgaactcaggctcatacgaacggaactgacgaagtgatactaaaaataaagcaagaaagtaacttctagatgtcaatcaaggatccgtgtcaatatccgatcggacatatcggttagagttactacgtcgagttggtgggtaggtgtatgagagtgtcgcgaccacagacaaccgacagcagcacaaagaacacgaggcaaccaaaaaccgcacacacatatgatcaccggctcgataatcttttgaggcgcaagtcgaggcgcaaagagttttccaaaaatagaattcgttcctgttccttggagtcgcgatgcgctgccgctgtctcgcccagagagaagaaagcaaagttggctcaggcaccaggcaccaggcaccaggcaccaggcaccaggcaccaggcaccaggcaccaggcaccaaacccacagagatcaaacccccccgtcgggcgtgcggctggggcagaaagcaagcggaagggaaccgagacaaattgattgaccgatcgaccggaaatatagcgttcctggcctcgcccgtagccttcctccctcccacggacccgcacttaaccgtactctcgttaaccttctcacctccttccatctccgtctcatcggctttcttcgtctcttttcgtttcttatttcatggtctggcctctatcggtctctgtttctgaggactctgtacactgatcggtcctgaccctcttcttaggaaagtttcaatgaccggaccgatatcaccggctgtttgaggatatgtgtatatctgcgtttggatgaggtgctgatttattctataagagtcgccttcatttccttttggtctcactctttcttcccaacattcccactaacctctcactggcgcttgttgttggagcatacgcactctcactcgtcttgttcattctcattctcattcactttcacattctcattcactcatccacctaactacccatcatgggatacttcaagaacctgatcccgacaatcccctcaaaggccgacaggcagaccggagatgacgaagagcaggtggtctacaacccgttcaagatcttcgcgatgatctctccgatcagttgggcgctctacgcctccggttggttcgcctggaccatggacgccttcgacttcttcgctgtctccctctcactcacaagattaagtgaagcgtttgacaagagcacacatgccctggtaagtatatattgtaatgatgatatgaccgaagcacctgctgactctttcccgttcttgttctatctattcgctccaccagactacttcaattactctgacgttgctcttccgatcactcggtgccgttctctttggaatcattgccgtgagtaaccgttttgtatgtgtctcggatgacctctcccactgacgtccttccccactgtctcctcctggactataggatcgatacggtcgaaaatggaccttggtcacaaacttgtgcatcatcgccgcacttcaacttggatccggtttcatccctaacggtggcttcaaaaccttcctcgccgtcaggtcgctctttggagttgccatgggtggtatttggggtacctcggccgccaccgcgcttgagggcttgcccgtccaaaccagaggattgatgtcaggtatccttcagcaaggtaggtcatctttccatctttcttcttctcgacctttggatggcccgtgtcttatttctctcctccatttttgtattttctccactttccttctctttaaacaaaaggttacgccgctggttacctctttgcatgctgcgtcaacttgaccgtcgttcagactagcccccaccactggcgagtgttgttctggatcggatccggtctctctctgcttgccgccatcttccgagctgtccttcccgaatccgccatcttccttcaggcgagggccgaacagagggctgccgaggctgctcccgactacgtccccgtcaacaagactaaggtgttcttccacgagcttggacagatgctgaaggcgaagtggatcaactgcatcctcgccgtcatgctcatggctggcttcaacttcttgtcacacggatcccaggatctctacccgacctaccttcaggtttccaaaggatttaccccacactcggccactcttgccaccattgtcggcaactgtggagccatcactggtggcatgctcgccggttacatctcccagttccttggccgacgattgaccatcatcttgttcatctgcttcatcggttgcatgatcccggtctggatcatcccaacctcattcggaggtctcgccgctggcgccttccttgtccagttcggtgttcagggtgcctggggtgtcattccggtctacctcaacgagctttcgcccccagcgttccgaggaacattccccggtgtggcttaccagctcggtaacatgatctcctctgctgctgctcagatcgagaccacggccggtgagagcctcaaaacggttgtcgagggaaagaccgtaccggattacgccaagatccaaggtattctcatcggtgtcgtggccgcctggaccatcatctttaccatccttaacggagagaaccacggatctcatttcgagtcggccaaggtcggtttccaacagggagctggtgcaggcgagctcgcctctgcccacctcgactctgacgatcgttcgttcgacggcgagaagggtggtgccaaaggagagacctaccaccacgagcgagtttaagtcgcttttgcactttcttttcttttttccctctttcttatctttttggagatcttgggctgtttcttcttcttcttcttcttcttcttcttctttcgattcccttcgactcttatgtttgtaaacactcaagattgtcaaaatccatcaaaaagataattaaaaaaatcattgttgtaacctctatggttcatcttgttgtatcacatatcaccccgtttctgttgtagatgtcatatgaataatgttgttctgtcctattctcttgcttgactcgacctttctctgacaggtcaaatttgttacacttatgattttcgattgagaaaagactcttcaaataatacaaagcaaggcaaacaagggagaacaaagaaactgggaagagtcaaacaaagccacggaagggatcagaacaacgaagacatcgacagtccctttcggacggcagcggaggatccttcgtgatatttatacacaatcctgaacgccttctttgacttccctcctgcacctgcatttgtgcgacatgtaccaagaaaaaagaccgaatcgttgatcagaacaataattcaagggaacaagtaggcagaagcaaaaagaaaaaaagagacggaccagtaggatcaacgataggctcacatccatcagatatgagtccgagcggtctaccgaaaaagtctgttgcggcctatttcatcatcgtttccggttttgttgaaaagttggtgtttgattgaatggcgcgagatgaatcagattgagataaatcaaggtcaagagaataattaaaaattaaaaaaaggacgtgaggacaaagatagttgagaatatcagcttggaaagatgaatagtcaggaagaagaacgttgaggcacgccgagagatcaatgagtggaaacgaaggagaaaggcaaaggacgaactttttctgaaagatcctgttcgaccggaggtggttttctacaattggactcatgtttagatcagttctcgaagatacaacatcgagtacaggaagagagaagaaaaacgtacggtccaaatattgatagcgtgtcatttacaggatacgctgcctgatgtctcttgagtaattccgcctccatctatcatcccaggaaagaaaaacaaaggaagtagacgatagagatcagcttaggccatgaatcaatgtgcaacaagaacggaaggactcctgaatgagatagtgaaggacagacctctcgagtaattagacttcggactgcatatctcgattgaacgatgtctcccgcccgtttgccttcatagttaacaaacacatctatcggtctggtttcccctcgaaaaatcaagaaagacaaaataacataaaaataggtgtcttgtaaatcagcaacaaatgaagaagacacttgcaaagtaaaaaaaatcacttacggatcgagccgacaagagagtttcccatcctctcctttctcctggtgaaacttgagattgtgagtgatcatcagatcaaccaatctcgcaagtttgagccgttcatccggtttgatgacttgtgcattgatctacggattcaatgttcatcttgttagctctctatttgttggccatctaatatagatattgtgaaaaaaaaatcgaaagaccaacgggcttgagattcggagagatgactctcatcaagaggggcgcaaactcggtgacaagcgaggtcgtattgtatatgctcctgatcgagggagggatcgactgggaaagagtcgtgatgacctccatattagcttgtcgatgtgtaaaagactatattcgaagaaagaaaaggtcagtgtaaggtccgcaatttcccttcatagtacggcagaacgagcttacctcgtagtcttgcttaggaaattccgtcttaggtcgaataaataaagagaaagaaaaacgacaaggaatgttaatggtcgcgctttgagaaacgaaacgaacggaatggtttcctcactggatctgtagattacggtcatgaatttagcgaatggcatcagcacacagtcgaaagagggcattcagatatttcaggaaggactgactagaagcattcgcgtgcgacgcgaagtttgtgaaccagggaactaaactgtatgggagataccccattagttcccaattctggtttgagccaatgtcgttcgataatcgatcgaagaagtggacccaatcgtgcatcgcattgactttagtaaattcggtgtcttgccatttgaggttcggataatgctcgaaacagcctgaaggtagaagaaaacagggttccagatcaattttcaaaagaattgctagagaagatagcgaaccaatttacggaccctgcatgactcgttcaaactctccacaagaggatactgcttcaactagtctatttataaactttccttctttctcccctagacctgctttctgtttcttgattgagattggaacaaacagcgtgtcccagaccattcgaggggtcgtgccagaatcttttagcccaacggtcgcttgtcgaatcattggttccgtcagataaacagtcttcgttttgataaactgctcgattgatgggataagaggaaagtttttttttgcattcggtgtcaatcagagcttaggcagagaggataaacgaaaacggacctgaagcgtattcagacaacttcggatatcgcctccagtaacttcggtcaatttgttcaaacttcgagcatcagcctgtagtccttcagcttcgcagatccctcgaagtcgtttgacgagcacggccataggaggtttgttgaaccggacgattcgcgcgaacggtcgtaatgctcggagggaaggcgcatatctgtgggaagacatgttgagcgaaaatcgttccttccttcagatacaaactaaaaattatgtattggatcaagataacgtacaggtcgttgcagatacagatgataggtctcttgagaagtttggcaggaatattcttgcctgctttcttcttagcgggaatatcttggatcaatctaatcagacttctcacaaagctctgagcacaattcagagaaacggattgcggataaagtcagtcagcaaattgataacagagagggtcaaggaaaaggacagaaaagaaggaacaaactgtgtctccaccggtagctccatcgatctcatcgatcactacgcacgtcggttttccctttcccatgattgatgtccctacatctagtgcgctctgaatccgaacagacgctgttgaggccgtccggtcatctgaggcattgatctcgagaacagagtagccagcctgttgagcaacaatctgggctagcgttgttttccccagacctggcggaccagagagaaggaggatctgcgaagcgcgcgcgtgaagaaagcagacgcaagaaacgatgatcagagacgagtgtggcaagatgggaatagtcgagattcgatagtataacttactcgttctttgggccttccgaacgcatcggcgaagtccttttttgcctcgtctatgttcaaaggattatcgaatttggattttcgttgtttcaaatgaggtggtttcctttgaaacacacattgatcccactcttttagccaactcatagtctctctattgactctctataagcataaataaaagtacagaagttgtcaacatctagcatcttcatgtgacaaatatcatcagagaaaaagtttacctcgtctcccaacagatcgctaaacttgacaggtctgtatcgatcgacccacatcctcttctcttccttctcatctccctttgctctctctttccccttcgcattgctcgagatagaactctcctccaagatctccatcggcactcccgtctcagcctctcttgtttttcttcttttcaacaaatcgtcctccctccttagctcttcaatctggtctttcagtctatgaattggagtgtcaagaagtgctagtgatcctagggagtttcggggaaggtctgctggatcagtcgatgcagcagacgatgaaccgaatagagggttcttccggtatcttcggagaataagacgtgaaccactgaaggtagtagcatgaacactaggtagccatgaagatggtggacgatcggcagagttaggtcgatagggaggtaatgttaaggtttcttgaggcggaaggtagtttggtatgatctcggcatgatctgagcggaaaaaatgcaacaagatacatgtggtgatgcgaaatacatgtgagtatattgcgagaggatcgagagaaggtcgaaaaggaggacagacctttcgaagcacctgcaacagacccagacccgacctcgaagttagaaactgccattttactcgggatgtggtgacgggagtgtttaggttgctgagaagctggctcgttcaagatgtcactaatatcaacctcttcttcgtcccaaactccgccagtcctctttgttataagagcagcgggaattggagggagatcatcaagatcgtccgatggaatcaacttgcttggagacacaagggagagaagtccattcgactgatagtcatcgtccatatcaacgagcttttgacgagcgccgggcggacctttgagcttgctctccaaatcataggagagaatcccgttcagctcgaactcgtcccggtcttcttcattgaaggaaggacgagatcttggaggagtcgagtgagacagtgttggaaaggccaatctagatgagttcacaagggttggtagtctagaaggctttgtaggagaagacggtatcaggtcttccatcaactcgaacacctcttcctcagcttcagtcagatttggtgcattgctctttgatccttcgggtagttggttcgggcgaggagatactgatcgctttgctttaggagttaggtcaagatcttcctctgctccagaaccgctaggtgatttattgatatggatctccttcagaaccttcacctcctcttcagctccagtgcgatgatgtagctctgccatcttttcttcttctttgatgaaagaaacggtcggacttgttgggagggagataaaataggaaacgattagtttattgataatcgtcatatagacgcgtcgcgaacacgcgttttcaagacgcgtcatttggacaaacagacgcgtttacctgttccagcgcacgtgattcgagccgccacatgtttcttgcgccctcgtcatacgctcaccgagactgccccaattcaccatttcaactccattataactccattgatcttatctctcggacgtcgagctttcgctgcgatcgtgacattgtttgctcgccaatatgatctgacatatatgttctgataaatcttgaagacagaaagaaattcggtggctagaaagttctacttgatgtcatgtccttggaacctctcgttctattctttccctaaattataaattcctcattggctttctaagaagtcttggctaatggtacgcaaagaaagggcttaactcatggctttgcaacctctatccaagttccatcgtcacctctcatcattgttcgttctgtactttgttccttactacttgtggtgtcttgaaatatcttccgatcatgtgttccgcgcccttcctcttgaatgtgttcgatacgtacatcatttttgtaacatatctcacagtcactatatctatgttttagtctctgccgttgcaattttttttcaagtgtgttgttctatacgactctaaggttggcaatcttcagctcctttgttttgcatagaaatccgtcatcgacttgtagaaataggacaagacatcagaacgtatcgtttataatatcacctatattcggctcatcgtttaacgttacccaaagtccgcccttgacgaaaagcacaaactctgtcgagaacaagacctcttcttttaacgtctcgttgacttttttcgtctgcatgaaaccaaccggatgatgatcttccgacctatcaagatttatcgagaacgatacatcggctgaagaggagggaagggattgaagaaaccggacgagagttaaagaggatagtgtgtaagcgtattgttgacccaaacaaatcctcggtccctgtatttaaatgcagcaaatatcggtttcagtccagcatcgatgcggtacagcagttagaacagatcagtccaacgtatttcagcttcgaaagaagatcacccaacgcttgataaagacaaagtgacaaggaacgaacgacgttaaatggttggaagatgaaagggctcttgagataatattctgcgagcctcggatcactcctcaaccatcgatcaggatcaaagtcaagcgctgtaggaccccagagttccgtagatcgatgaaacgagaaaggagctgaaatgatggatgtctttggacttcgagaagccagcgaagagagagcgaatacatcttcaggaagagtctctgtagcgcagcaagtagggttaagacaaagtagaatgaaacaagaaatgacgtacggcatatacaaaggttctgggctgatcgacgtcgctggcaagatacatgaaccgatcgatctccggatactagatttgtcgaccgagaggtaagaaaaaatatgggtaaactatattgcagatgtccgagaaaagtttctatgaacgtacttaatgggtgcaggtggatataagcgtaagacttcgtccaaaaaggcgcgaactaagatatcaaagaaatcatcaggaatcaagacaaacagatcaggcgagcgttaagattgaaaaagctccttacgatatttgatgtctcctatatggttccgcgtcaacccatcggcttcgcaggatggtaaatctttgatttcatctctaagtctctttagaattttgggattttgggacagaacatagatcgaagatgtgagaagggatgatgtctaccagaaaacaaatcaagcatcggaaaacgggtcaacgaatgtctcaaagacaaggatttttgagaaggtaatgagcatacagtgtctcgagcggctagtagaacattcaacaaatggcacatgatcacatgcccatctggcatatcccaaagcaagaagagcagttggtaagtacacaaacccacaaggcgcgacgataggaatactaaaggatgtcgatccgagcatatgactctactgaccgtcgtagatctctaccaattgatccaataacgatgttcgctccgaatgatcatcttcactcatttccgctggcgacattgtttgatttcttctttctcgctcctgcctccgtcgaattgatctcatgatcggaggcatcaaatatgatcgaattgttgtcattggcttgttggtatgagaaaatggaagctccaagagtggccaaagggttccaactcggatccgtcggagtatggtggcctggaggtgatcgttcgaatgtcgtatgattcaattcagccggctaacctatccaaaggttgatacaagagcaacttacttgagcctcgtcaaaagctgatgaccaaatgctaaagaaagatgggttgatgctgaccatcagttcgaatggctagattgagcaaacacggaaaagagaagagcgcgaagtgcagagacgtaccttggctgaaagcatccagcatgatttctctctcttcatctggttgatcagactgccaccccatcaggaaaacggttgagctctcaaacgtcagcttctgaaatatgccctgttcaatgaaattccaaaagagatgccaggatgacaaaaaatcaagagcaactgatcagctattggaaagatatctacttgtatggaaacgatttgggtaaggcccggatatcacacctggatattgaatggttctctggaatcacgatgagcgataattcgtttcaccgcgagatcaacttgaggttcaaacaatgataagtcgcctatcttcgctctcgtaaagtgaggccgcatcaaatgcttttatgtaaagaaggtggttggtgatgtatgctgatatgcgtgcatatggagcgagtaaagactcactcgaaactttataagatgggtttcgaaggatgaaacaagggccatcagtctagcatatgctttccatattgaagaaacccaagcgcctcactttggtccagttttctccatcagaattgaagatcccgctaccgaggaacgattcaaggcgctcgaataatttaggacctgggaatattatgcgcagaatcatatcgtatcgtatcatatctcatcagccatgtatatcagcggagtagcacgatcagaacagtctcccaaagttacccttgtgaaaattatcgaatctatcgaccatgatgaacttggccaacatcgggtcagctgtaagaatctaccgtcggaccaagagcgagcaatgcaactcaaaaataaatcagcgctcgtctcgaacccttcttacgccatttgaatggctttcagactccaagattgttcctaccgagttctctcctagtagcctcagattacaggtcttgccccatttgtccattacgtcttgaaacacggccaagcttccaaaaatggtgtcatccgaattaaccaactcattgaccagactccaattgagccaagatccgtattcaacccttggaactggtcgggcgatagattcgtttgaatcttctgctttccgttttttcaaccaagagaagaccacaacgatggagagaacagtccaggcgatagtagaccatgggattgaggaggtcgccagatgaatcaaatacgacagaccaaggacgaatgctaatgggatgatgatcttgctgatgatggattggtataggatatacatctcagcagcggcggtcagattgaaagtatcagcactagcattcgtacgtttccttcagtcggatagaaggaaaggaggttctgtatcgaacagatggctcaagatggtcagtcgcgacgtggcggaacacccatgtggaacggaagagacccgagctaagtgaaatccatgaagggtcgttcaaatcgggataactgaaaaagtataggcgacaagatgcttcgatttgtttatcattcattctctgtttggtctgtttacttgattctttccttgtatggatctagcttctttgtttcggtcgacttttcacggaccgatggcttgttccattgtaagatactatgatcaagaagaatctcacctggccgagagacccaaatgatggaaggtgaaaacaaagcattgatcacgccgattacaataactgaacgttggttcaaacacaaagtttataatgaagaagtaccggaagtagcaaggaaagagtaagggagaaagaagaagaaaaaagcagtcaaaagcttcatgtatgtaggaaaccttgcagctgaagataattatagactttcacagagtaatagagaagcgaatgatcattttatgaagaaccaaggtctgaaaggggtgtggagaagagaaggaaaggtagatgggaaggggaagggggaagaggtctgaacgagggtatctacggaagtgagcacgtagtgagcaaggaagtcgggcttctaatacgacatccgccaattaaatctcatggccagaaaaccaggcgagaaggagctcggatgatgaccatgttgtaagttctggagggatgaagccaagtgaggggtggtatcgaaggagaaaggaagagaggccgaacagagagacgatgtccagtagggaggagaaacaggaatgatggaggattcaacgcgggcagacatagaggcatggctgagagcagaaagtcaatccatatttcgaatgagagggatgaatgttctaaagaagagagtccatgcgcgagaaaacctcgagcacagtagcaacgacctcgaacgaaagatcctcaatggcagccccttcaccgccgcccggtccgtccgaaacctgagcgccagtagacatctcccttttcacctctctgaccatctcagagatgatctccttttggtttgccccggactggctgctctgtttcctccttcctcctccaccagccacgccaccgaccgggactcctgatccgttcgaaccaagccctccaccggtgacacccatcactccaaacggccaagtgcaaaattcggcaaggacatcgtcacaccgggcgaacgcagcctccctagcgtcatagtcaagtctgaggagagcgttctcaagcacgttcgcagcataagcagcacagcacaggcacaccgctcgggttgttcggtacttcacatccgctggtaaccgggattctctcggcaaggcagaggtcttcgtcgtgaggaaatagagcgtccgtcgcatgacatcctccttgactttagcatccgccactggatgggttgccatgtcaaacaacaaaaagtttcgcttctccgttcgaaggactcccttgtcgaccaatcctttggccaatcgttctctaacctgcttaagctggtatccaatcttcatgacgttccaagtctcgcctgaagaacagaagaataaagtgtcgtcagaatatattgttctctctttctgtgaacaaacaaatgaaaagaaaatccggaagacctaccactcatcaagtccacccaggcagccactccatacttttcactagatttcatcatcttcaacgcttcatccaggatggtctcaccggtttgcctgtcatcgatgacctcgatcaacctgtcccccagtgggagtcgccttcggcttgggtctttgaccatagcgatcctacgacgaagagcgagttcaaggatgatacaccctcggagggcatacgaaatgttatctgaggggagaaaatcgtgaaaatggcttgtcagaaatgtcctcagatagacaataggagtgttatggagtagagagaaagaacggaatgcacaggaagcatgccggaaacagttatatacataccattaaaccaagatgtatacccctttgtttatggaacatcacgacagtcaagatgcaagaaggcgaaagaagaaagtttaaatgtcagcttgtcatgtcaacttttcatcgtgtcctcaaggacaagagaaaagatctataggtagtcctatatgaagaaggaagaggagaaggaaaaaaaagcattcccgtgtgacgagaagagagtcagatatcaaagaaacaaagatgctaacctgattgtccttcaacccgagcagcaaaacttcctccagcaatgtcaacttgggaacctccttgctttctccgccatcttcaaagtcccttggatcaaacgcaatctttcctctgccttccattgaacctccggcggttgacgggacgagtctagaggattggttcactcggttgcctccacgctcgtgtaggttagacgaaggcccggttgacgaagacctggaagcgtccgtgggcgatccagcggtcgaatcctcatcgtcgtatgtagacgactggggggcacctctccttcgggacagaccagaggacattttgaggatgatctctaagtttcagaaaagaaaaaagtggtgtactcgttctacacaaaagagaaagtcaggggataccctaggaggatggaatgtgtgacgaagagcttgacaatggatggatgagaggatgtgaaggcgagaaagatgggaggcgaacgaagaacgattgtgagagcgaatagatgagggcgggaaagcaaggagactgtagcgggcgtgttcctgctgcgcatcctcatttgattgacccgtccgctcatatctgacttgaacagtgaagagatggtcgcctactcaccgggtcgatgaataacgagcgtttggaccccggttatgagctctcatcgagcagatgttgagaagtatgggtgctgcttgatcggtttcggcactgatttgacgggcagatgacggacatgtcttgaaatactttgccgatagttgatggtcgtcttattcacatatacatgctcgggaagaaggaacaacgtctgcttctagattgcttgcgatccaatgaggaagagagtgcattcaagcgacatcgccatgtataacatagatatgtatgtgcgcttctgaaggccggctctgcatccggtaatgctgaatgccaccatccttcaaggcatcttgtagataacggattgatacgaggagaagagctatgtgacagtagttcaagcagacaaacgaataggctcgcagacaagcagagcaaaagagggcgcgacagcagaaagactggcaagtaaacacgtagaacgcattgcgaacgtggaacacaaaggtgatcgaatgtaaagactatacgcagacaacctgacgatggagaaggagaaaaagaaacccgatatcgtcagaggggaaaccaacacatgaggacgatctccagcaagatgtgaagcccatcgaaagagtcagcatcggttagtctagctcgattcaggtattgattacctctgcgttcgacaagcagccttctttgactctgtgttatctcatattcactcggaagtccgtcgctaggtaacgttatctttcagtgcatatattcggactcaacggcatgatgaaagtcagtaaggacatcattatcactgcagagaacagaagagaggctcagacaagagcagcaggttagggatgagtagccaggagagagaaagaaaaaaagaaaaagaagcaagggaaggaagcgagagaaaatcaagagcgccagcttgctagccacgctcatatgtatatgaatcatttcaaactctcgcagaagatcttctcttcatatcgtcagatcctcttggtcatcctaaaccagcccgctcaggtctgcagtttgttttgatggtccgtctggcgttgataggtgttctcaagcggaaagtaaccatgaaagcacagctgtgggactgtgcgccaagccgtgtaaccacttatttggtaattccgtaaccaacccacaatgcctttctccggctggtcggctgccgtttacaatcgataatcccaagagggatctcgtttgtcttcttctcatcctttctcttcagctcagcttatctatagagtcctctttcgggttttctctatcaatccttttcttctccaaatctagtagaatagtgggattgtttgggagagaaaataagaagaaaaagaagagaaagcttgcttcaaggtcagtctccaggctgttttgccatagatctctttgttctatgtcgtgctttttgggggtttctttcgtcttctctgtctcttttcttctgcattgtcagaacacctaaaggaagaagcactgagaaagaaggaaaggatatggttgggataaggccagcatggatatttgaaaaggaataatcagaggtgtatgctaccgaaagccaagaccgatatgcaatctcttttcatccaactcattctcttttccgttctggattcaacaccaagtttccgttccaatgcaaaactgctcaacaaccaacgacatttcttcctcactttcactcgccatcataccaaactgactctttctcttcgctttcttcatctagatttagcaatcttctttctcgcccaagagccttcttgcccttcctttcggcatccgtacaaaatctgtcatgtcgctctcgatcacgattcctactagccctcctcctcagccaaggagtcctaccagggtgctccctccatccccaacgaccagctcagagattgaacgtgaaatgacctccgttcggtctatgcgacggaggtctggctcccaggccggacagatggcagggttcgatccggatctgccgccgacacagaacgacctggaaaacgcggcggcactaaggatgggaatgggcattggtggccatgggagcagtgaacaaatccttgctaccagtcctcccttggcccatcggaccatcgccagttctaccagctctgcctttcctgaagaagatgacgaggaggaagatacgtctcacttgttctgggtgcctgcccatctacatcctgagcttgctcctggagagttccgagcgttcctcaaagagcatgcccatgcccacgctcaagaagccgcggcgaccaaagaatcggattctgttgttccccagtccactgagcactcgccaagctctccttttaaccgacaggcttctcatcggtccagcttggcgagaaagaagtcgatgctttccagacaatatactccccggccgaacgacggagtcgagaacgagaaggtaccggtcatccaggatcacctcagaaaacgctcgtcaatctatagttcgccatctgggacagaacaagaacaggaggtttcattgatggatctacagatgctggaagaaatggccgatgaggccgccaagagcgatgatccttcaaaactgagaagtatgcttaggcgaagctggagtatcaattctggtcatggacgtgcgtattgattttgtccagctctttcttttcgaagagacacatacgcgcctcgatctcttcctgtcaggccgctcttgctgatattgtattgattctgccgcttgttttcgcgtgattccctatctagccgacgtcgatggtatcaatgatgccaacttcgacgaaggtgacgctcctgttctagctgttcgaacaggtccttcgttgattcgccgaacggctcgaacaaagattcgtaaagcgggcatggaaggtgacgccgctcatcgattcggtccttccagacgaggacggacggcacatttggtgggcgagaacgctctgaaccagtcggattctacatcaccgccctcttcagagggcgatcaccgaacggatgagagcatatcaagacctcttggtgaagacagcacgtctcctcaagaacgcccgatctcgacctcgtcttcggacccatatgctatctataactcttacgaacgagactctatcctgatcgccgaccgatcagtatctcccgagacgacatccgattctcaccatgatagatctctaagtccgtcgcctcccaatatcccggccatatacactcaccactcctcttcacaatcatctatcaattccgagcccagcgccgaatcgggaaccggagctcactccccagaaccctctcaaatctcaccaacgtcgcctatagtcgcaaacccttactccgaacttggtccagcctcgcaaactgcgcccatgtttgcgcctgtaactacagtcctatccgaaaaatccgagcctgagccgcgcaagcccatcgaggtagagagggttgacagcagagacagttacctgagcgtgaacagctcaaccacatccgtcaacagcttgggctcgaaagaaaaagagaaggaaaagaaaggtggatttttctcaaagaaaggagacaaaaagaaggacaagtccaaggtaaataccccgtttgttagtctcgttctcactttttctcgtactaacaatctagatgggttgtaacaacaaaacaacagggttcgaacgagaaggaaaaaggtttcctttcgttgtttggaagtaagaaaaagaaccacgaggaacctccttcttctgtgaacgcaggggatggccgtcttgctgccgccgctctcctcaaaaccaaagtacctgcttcgccaagctcacctggctcattccctccacagaccaacttttctcggtatcccatcaacgtcgagcgagcggtttaccgactgagtcacattaaacttgcaaatcctcgacggcccctctacgaacaagtcctcatctcgaatctcatgttctggtacctcagcatcattaacaagccaactaacccgataaccccgaaggagagagagagtgacaaagcaggaatggcagcaggaggtgaatctggagagaaggggagggtcgagactgcctctgccgcggcggccgaaaaagcgaatgcgcctgtttcgaaaggaacaccagcaggaaacttggcaaagagcttgatgacaaacagcacatctgcttcgccagctgtgaagcgaacgagtctaactaagaaggaggacctgaagaatccgaatcgacctgctttgcgctcggccgagacaccggtcaagacacctcagtatggtgctcagaaggctcagctcgaaaaggaacaccgaccgatatcgatcccggcggataccatgcaacatcgggacagagcacctccgtctcctatccaacagccggctcctagtgggccatctcgaggaggaccttccggaaatggagaggtgcgagatcgtgaacgatccgagcggggaccccctcctccatcttatgcggcgcctctagctgggatgggaccaaacggtaatcccgttcaagtccaacgtcctctaccaaattcacaacagcaacagcaacaacaacaacaacaacaacaacaacaannnnnnnnnncaacaacaacaacaacaacaacaacaacaacaacaacaacaacaacggttgtcgaatacagcccctccacatcatgaatctagaggccctgcacccggccctcatcctgttcgatcgacatctgcaaaccaacttggtccaacttcacctactcaccatgtgtctcatacccaacatctgccacctggcccacaacagcatacacagcagcaacagctacatcaaccacatcctcagcagactcttcgacccggtccacccatcaacaggggcccaccaggtcctcagcccggtcaactgttccaccatccaggaggtggaccccgtcctggcgagcctgccagcggacttcctcagattggtcaggtgttcaatcatccgggataccgaccagctccctaccgaccgaatggcccccctccgcctggacctcgaggccctcttccgccgcctggacagcaaggcccaccaggacagtattatcctcctccaaatagacctggatatccgggaggacaaggagggccgccgcatatgccgaatggaccaggctatccaactgggctgggacgaccaatgggctctatgcagaaacctccgcctccggaacaacagggggccttgcctcagttggcgtatcctcaaggaggaccacccggtccccaacagctacgatcttatccgcctggtcagaattctcctcgtcctcatttacagcagcaaggtcctccgccacccggtggacagcagagggcttattacaaccaccccccatctcagcaacccccaccacagcgcagaccgactagctctgaattgccatatgccgatcgaaaccgatagtgggtctcgtcgtccttggatggtactacagatggtagtcttcatcctgcgctgctctttctttgtgctcgttcatcctcttgttatctatgtcgtctctctttttgctgcttcctcctaaacccgaccgttgagatcaaaattcatctgctgcctttccctgagctgtcccgttttatttccctgtttccgttctttctgtgaccagaatatcagccttcgaccattttctgatatgtagttcttcaatctttgcccccttttgccatactacaatcagcacgcatgtacaacctggcattgcctaacatttattttccgtatcttctccttctcttttcgtttcaaaccattcttcaagaacaatttccatccttcgttgtggtagtcgtacgctggtgatttagaaaaagttcatgattttcaaactccggttagggttagctcagagagcgtcatggacgatttgagagaccgtcccattttcaccctcaacttcggaagtcaacctgaccgacagaacgaacaactagcctgatcggttccagaaagagagaagaaacccagacaaccactgatccatagacgttctaataaacagaaaagatgtctacgactgttcagaagtatgttcttggtcgttatgcagtcttgtttggttttggttgaatcagaaactcaacgtcatttttttttctcgcttggttcttttttcgaataggatcaaggagattgaggaggagatgagtaggactcagaagaataaggtctgtttctctcccacctttttgtgtgcttgatcgagacgtggtttgctgattgttcatcctgctacgggtcatcttttgtggaaactaggctacgtcctaccatctgtaagttttcgtaaggcatggcgtaggataggtaggacctacagtggacgattacaagctgattagttggtcttaccgattgccatcaaaccatcaaggggtcaacttaagggttagtcttcttagctggctgccgatgctcttgatgactgagtctgtttaaactaactgtaattgattcaatctcgatatttctgaacggaaacgatagccaagttggcgaagctgaagcgagagcttatggctcctccttcgtcgggaggaggaggaggaggtgcagggttcgacgttgcccgaacaggagtggctagtgtaggatttattggtgtaagtcaagtcttgatttcttgattgtaatcgagagtgtacgagaagaggattgctgttgatggttctcagctcataccctataaatcgaacgtatctaaattatcccactcgaattgtctttctccatctgtagttcccgtcggttggaaaatctactcttatgtccagtttgacaggaacccactccgaggctgcttcttacgaattcacaactcttacgactggtatgtaataatgatgttcttctgactagctcaatctataaattcaacagctgagtttttgtttcgatatgttagttcctggtaccatgacatgccacggtgcccgaattcgtgagtattctcgctggtatagtatctatgctttgaatgcgctgaaactgactttctcatgcgcttcttgttttaacagaggttttggatcttcgttcgtatacgtttcagccgtggtcaacatgactgaccgtccagctaactgtctgttatcattgatgtgtttgacctcttcgaattagctggtatcattgagggagccaaggtgcgtatctatgagatattacacatgcaacaaacgcattcgttcttactctttcctcgtgaattgtgtcatataggatggtaaaggtcgaggtagacaagttattgcaggtgtgtacaccatattgttatttactcgtatcactatcactgttctctcctgacaacatctctcttgatcgaatcatagttgctcgaacctgtaacgtgcgtcaatgactcacaagcttaaacaggtcgaccgcgagaacattcaagcaagctgacttctatccttgcgtgggcttatagttaattttcatcgtgctcgatgtgctcaagccgctaggagatctcaagatcattctatcagagttggaaggtttcggtattcgtcccaacaagaagccgccgcagatcactgtcaagaggaaggataagggtggtgtaagtcaaggttccttttctcgacttctgcacaccatgcgagttctagttgagctgagcgcgtccatcttttcgtttccttactcaaccatagatctctatcaccaacaccgtccctctgacccatattgacccggacgaaatgcgagccgtgctgttggagtacaagatgaactcttgtgatgtctccatcagagaacctgaagccaccttggaggatctcattgatgtcatcgaaggcaaccggtttgtcttttcttcctcatccatattcaggtcaactctcttggagctattattgatgcgtttcgtgacatcttgtgaacacacagagtttatgtgccggcgctatacgttttgaacaagattgattccatctccatcgaaggtcagtgagcttgtagtctcgaagttgcgcaaacatcggttagaattaacctgttgtgtgatttttctcttcttctcttctctcagagcttgatttgctctacaagatcccgaattcagtcccgatcagttcttctaaggagtggaacttcgacgaactgatagaagttagtgtattgtctgatttgtctgatagaaagagagaagaacattcaactgatgtagacgtccttgtttgggtgttttcatctctgttttcatattaaagtctatgtggaccgcgctcgatcttgtcagagtttacactaagccgaagggaaagatgcccgactactgtatgtgaagctttcctgctctctcaatgcgtaccgtgctgattgctttggtgaaaccatttccatcagcttctcctgtcgtgcttaagaggagcaagtgtaccgtcgaggtgagtatctccttcattcttctatctccagcctgttttagaagcatgaacgcgaagactgacgcacatcccatgggatatactggtctctaggacttctgtaacgctattcatagtatggactgctttcatcatctgtctctgctcattgtagggtatctaactgatcgctgctccctctgtccaaacgcataacagaggagattgtcaagaattttaagtcggcactcgtccatggaacatccgcgaagcactcacgaggacagaaggttggattggatcacgtattggaggatgaagagtaagtcttgctgttcacttttgctgccgaccaaagtttcttccacacactgatgttgcctatttgctatctcggtgaaatagtatcatcaccatctacaagaagtgaacggactgctgcaatttttctttttgtcgagagctggatgttatgtacatttcgcttttaaaaatcttgactcggtacactctcttgtccaaacaaaatcggtcgttgctcagataaaaactcatcttagtctgatcagcccaacgctttctcagataaatgcataatgtcaacatgggaaagcttgagtgggcagaatagatagttgccggcccgtagctatcggcttacttaagcatactgatgggctcaagatgacgagatctttcgacacaagttatcacttgccagtactcacaatcatcatcctaactctcatcccatcgtcctcaacccagctcatctctgtttctgttcatcattcccatccaaaaagctcggactgttagaaacacatcagttatccctatcaaattttcaacatgtacctggtctgtggtcgggcgagcagacttctctacccgacgctcaaccaggcgagccgtcgtccgatccggtcttcacccataagcagtctactgtcctcttcacatcggtcgttctcgcaatctcatcttgtccgaagccaatctcctcctcaaacgcctgcttctttctcattcacatcccccgagtcttcgtccaagccggctagtccggtgtcacctgcgcctccgacaccattaccaccggtgtcgcctaaaaagacgcaaaactcgacggattggtccatcatccggacgcttgtcaagaacatctggccgaagagtaacaatggagtgaaagtcagagttgttctggccttaggtcttttgatcggtggtaaggtcatgaacgttcaagtcccgttcttcttcaaggagattgttgatgggttgaacttgccgatgactgaaagtggaactgtgtggatggtcgctggctggagtattgttggatgtgagcttctcgtgtctttgtcatacgactcccgatcccttacctaacaaagtctacggattactcttccttctatagacggagtggccagggttctctccacactcttttcagaattacggaatgctgtctttgcttccgtcgctcagggggccatcagaaaagtcgcgagggaaaccttccaacatctccttgcgatggacctgaagtttcatctgacgaggcaaactggtggtcttactcgagctatcgatcgcggtacaaagtacttatcttttctttgctcttcgggatctcatctcttcattctcaagagttgactccttgaactgaccatctgaaaattggaacgaaaccaaaggggcatatctttcgtcctgtcgtccgtattgttccatgtgattcctacagcgctagagatctcgatggtgtgtgggatcttgacttggcggtacggatgggattttgctgcggtcacggctgctactatgggcgcatacacctggttcaccgtctcaacaactgcttggaggactcaattccgaaagaaggcaaacgaggcagacaacaagggtgccacgcttgctgttgactcgcttatcaactttgaagctgtcaaggtgggactcttatctgtctttcttgccctttgtccctcgcgcgaacagttggctgatctttgaacgtaattgcctatgaacagcattttaataatgaaaagtttgagatcgctcaatacgataaaacattgggaaactacgaggccgcctctacaaagatagctaccagtctagcatacttgaactctggacaaaatatcatctttactagcgcattgaccatcatgatgggactcgccgcgcaaggtatctctaaaggtaactcgcattcgttcaatagaatggagcaggatcgtccgaaaagtgaacgataggctgacagcggaatgtgctgtataggtacgatgacggtaggcgatttggtgatgatcaatcagctggtattccagctgtcgcttccgttaaactttttgggaaccgtgtaccgagagctcagacagagcttgatcgacatggacgtcttgttcgggatccagaagcttagtgtgcccatcaaggtgagttttggctcatcgtcttaagcaaacaacatagtcattgttcctgatacgacaatctggatctcgattattgtacatacgaaggacacgacgttggcgaagccgttggatctaaaggggggttcgatctcgttcaagaacgtctcgttcagctaccaccctgatcgaccgatcttcaaggatctctcattcactattcccgccggtaaaaaggtggcaatagtaggaacgtcgggttctggaaaatcgacactgttccggctcatctaccggttctacgaaccttcgtccggagaaatctcgattgacggtcaaccaatcgattctattgagttggactccctacgacgggcaattggtgtggtgcctcaagacacgccgttgttccatgcggacattctgcacaatgtcaggtatgggcgtcttgatgcgacggatgaggaagttaaggaagcctgccggaaggctcatgtggaacagacgatagagagtctgccggaaaaatatctaaccaaggtaggagagagagggttgatgatttcgggaggagagaagcagaggtgagggttcccgtcttcttcagttcagcggtgctcatattgcgcgtattgtcgctcattgtgaatgattatttgggttcgcgcgtaaaacagactggctgtcgctcgagtgctcctcaaggatcctcctatcttgttctttgacgaagctgtaaggaaatctcaaattttgaaaacgtcttatattgcgtcgatcccaagtttctgatgttctgttttcatgtccatactactcgtatctagacgtccgcgttggacagcgagactgaacgtgcgttgatggccgatatcaactcgatgttggtcgacaaccgacggacgtctgtgtttattgcccaccggtaagcaaacacgcttgttttttaacgagtgcacagtggaagatgctaatacatatgtcacgttcatttggatgttctatctgacgaaaagattgagaacgatatccgatgcgggtatgtctatcttctgtcttcttctgcttcgtcggaaggcgaaagactattgaactgacaagttccttttttctttctcttcttttctcctccctggcagaccatatcattgttcttcaccaaggagtcgtggctgaggagggaacccacgaggaacttctagcccggtctcccgagaacggtgcgatctacaagggtctgtgggacacacaagcgtcgattgagtctggccaggttgacaaagaatagtagaagaacgtattgggacgttgtacgactaccaccggcttgtccgttggatccatccgcagtctaggatttacccgatcattagctggttctattttaaaacaaggatgaaactttatattgcatatacaattttcataaatttatttgaatcttttcgagccctccgagtttcactcagacacacacacacacacgacaatcttgttctctctccattatacatactcgagacacacaacacaggcaacccatccagatcccatattaaacatgcctccctggagcagagaagcaggtgacgaacgagtgacagaggtcgagctcaagaagaagaatcttacgctttcggacggaggttccgtcgagaagaagggagacagccttcccacatatgaggatactgttgtcattgccagtaagtcttgttgtcttctcttgtttttctttggctctttgggtgatacagtttggtctgttaccgtgtctgaggttatggaaagagaggaggggggttagatcatgtatacacacagaaattcttaactaatcggagatcttcccccgaatttccttgccctttcctctttctaattctccgaacactttggcaacgaagccgcacagcaggcgggatcgtctatcaagaacgagcaaactgttcagcgaaagctgaaggctagacatttgtgagtatcgtctgtctttcgatcgagttgccgttttttcttccttgtctcccttctcttttcttggccgggctgttcttgacgcattttcatggggcgctgcttattggaaatccgtttcggtattattcaggagcatgatcgcgctcggtatgtcgacttttctcctaatttcactcatgtttaaatttctatgtgctatggaagaaagctaatctctacctgttggtcactatggccgtctttcaggtggaacgattggaacaggttcgaaattcctttcttctcttccgcaggttaactgccaatttagactgattcatcgagtttgaaaacctcgtcatgttatgataggtctctttgtcggagctggtggtgctcttgcggccggaggacccgttagttccggatattttcaagagtatcaggctattagctgactcttgttgttgctccgtacgcctaggttggttgtctgcttggttactctattatgggtcttgtcgcttgtaagtagactgtctttgcttggggcatgagtttattcataggagaaccggatcatctttctgatcgattcttgacgtcatccagactcgatgatggttgcacttggtacgttaccaccaaccacttaggccttagaatgacctactgactcgcgtcttaacccgtctgtcattctaaacattccacaggaggttcgtgatcaacatcgatatttactatccacactacaacttcagatgcttacacgcgacgtttacacaatcagaaatggctaccttattccctgactcgggaggattcactcactacactacgtaagtccgtctgttcttcattggtgagaatgcgaacccacctacctggttactaataattcatttcttctttgcagtcggttccttgatcctgctatgggtttcgcccttggtctgtctcttgtcatatccataagccattaacagattggtcttgataacactgaccacgcgcgccgactttcacgcgaaatcccaaatttaggatggaactactggtaaagtcgcgttctaacctccttaagcacatgtatgaaatcgtcagcttattttccctcctgctcggctgaatgaataggttcgagtacggaatcactgtgcccaccgagctcgtcgcctctgctatcgttattcagtattggaatgataaaataaacattgccgtctggatttcgattctcatggttgctatcgtcaccatcaatctattcggtgttgccgcctacggagagatggagttctggttctcagctatgaaagtcttcgctatcgtcggtttgatcatcatgggtattgctctcgactgtggtgctgggcctgcttcggatggatacattggtttcaggtatgaagagaaaatctttcttttttcctttgctttctttttgacaatctgttcttcaacagacactcattcggcttttcttttgttgtcatcgcagatattggaagaatcctggagcattcgcccagtactctcacggaaacgttactgtgtctggcgcttggggtcaattcttagctttctggaatgtcttcatccaaggttcgtatcagtccgatctagacgatcaactttcggcttgaagaatttcaaagatcttactttgaaatcttcacattcaccagccgctttctctttcatcggaaccgagattgttgtcgttgctgttggagaaactcagaaccctcgaaagaatgttagttgaactctttctccatgcctcctaccatcgtttgtccatgcccatgtgaatttcactgatcgataacttgaattcgttctcatctctcgataggttcctaaggctgttaagcgagtgttctggcgaattactatcttctacgtccttgccatcgtgagtagacacccttgattatcctctctgacagatgtcgaatgacagctgatcttatttcttcccctctttcactcacagctcgtcatcggtcttctcgtgccctacaacgatgatcgtctccttaatggagccagcacggtctctacttctcctttcgtaagttttcgtccgctttggataccatcttttgcgcatcaagatccgttcagagcttattcaacttgagcatcgatctcgaatctttaggtcatcgccattgagaatgccgggatcaagggtcttccctcggtcgtgaacgctgtgttgctcatcgctgcttggtctgccggaaactcggacgtgtacgcttccagtcgaacaatctacgccttggccttggagggtaaggcccccaagatcttcaggttcgtgatacttctttaattctcttgaacgtgcatcaccgagagattgacagcatactctctctcccttggttatattcatacaggaaatgtctgaagaacggagtgcctatctggtccatcttggtcacctgtctgttcgggcctttggcttacatgagcttgggtagcggaggtgtcaccaaggctttcaactgggtcagctccatctgctttatttgtgtctgatagagattgatcgtgtttatttacctactttgaatattttctgtccttgcagctttacacactttccgcattgagtggtttgatcgtttggttcatcctgttctgcacatacctcagattcttctacggtaagttgatcgatctcgtcaacattctcgtctcgtttcatcacttgaccttcctaatcgattgattattcattctgtacacttgtttggcaggtatgaagaagcagggtctttctcgagatgatcttccttacaaggctcctttccaaccttacggttcgtctttcttcacatgcattctaccctatccgttataaaagccacgtttgttgatcgctcttgctactattattcttggacttccacagccagttgggcaggcggagctttgacattcttgatctgtatcttcaacggctttggcgtattcttgaaaggaaactttaatgccaacgacttctttgctgcttacggtgcatttctttcattgttcttcttttgagcatatggtgtaattgagttcgatcttcgttcttactcttgttgtctcgatcttggtgaaaacagtgtgcttcggaggttagcctttgtatctttatatctcctccaatgaatacgtacattaatctttccttaacctttcgtcctgtctgttctgcctttttgtgtttagtgttcttcgttttctgggctccttggaaactctggggaggtgagcgaaaggacgctaccaagtggttccagcctaccaggatggtgtctcttgagtcagtatattcttcataccccttacctcttctttgtctatgttgttccttctccgttattgaatattctaaccgatcggattgcgcatttttgatggtcaaatagggaaatggactttgagactggacgaagagagctcgacgagatggacattatcgagcgagagttacatcccgaaccaaagggtatcgttgccgtcgtttgggactggatgttctaagccacctagaaaaacctttcttttctttcttttaaaataaaagtataaataaaaaatgggaataaatggttccactctctttcttcgatttcccttcatatccgctgcttctttcgcttcgttcttgctttcctcttcctcttccttcgcttttccgtcctatcattttccaaaccacattcgtaatctatcatcgatcttcacactatgtaagggcatcagaagtgcatgtacacctcaataaggggaaggaggtccccaagtctttcctgtcgtctttactccgtcaatatttttgttcctctccatcctttcatccatctttccttcagaggaaccgaaactttagtttagaattaatacattaacaaaaaaccaaaaaaaagggagggaggccgcccggatataaaattaggaatgtttcttcatttgattctaggatgttacacgtccatcgcttggtttcaaacgatcaaggaaacaagaaaacaatctttcagtcgatttgcagagatatcgaagaaaagttcattaatataaacatcaagtcgagagagagagagagagaaacgatcgacgataaggcaagagagaataaatacatttgcaaatgactaagtagaataccaaaaccaaaacaagggtgaggatatacagaaaagagaggaaaaaaggacgggaaggagcgattatgccaaaggtctattcgaagaatttgttgacgactttgcagaaatcgatcatcgtctatgtcgttaaatcaatcaaattaaccaaccacggaaaagtcaacctcagcgtctcttgaacagagagaagagaacgagaagagaggggaaagcaaacaagaggacacacctgtcgcataggggtttcctccaacgtggcaaacgccaacctaaagtgtccgactctcgggtcgacattttcatccccgttactcttgctcgacgaagaagtcaaggaatcatcatcaggcgcgccagtccggagtccgtcgcctgagaacatccaaccaggagcgaccaatacttttttatcagccagcgagacccagatcttttgcatgagctccttggattcttcctggtaagaaaccgaggagaagtccgatcgacctcgaagagaaccatggttctctaagtgaatggctacccagcagaacattccggcggaaggtggaataaacgacaagattttgattcccttcgaggtcttggtcgatccgatcgataatccagccatcttctcgttccacgcattgtctcctgtagaggtgatcgaaggagcctgcttgacgaacgcctcgagtcggacgggcatcatttggtcctccccggtcgatgctgaggtgatggcttggagtttggggactttgatgtcaaaccctttcacaagctcatcaatcatccagtctatggagcgaaagaggaaagtgttttgtgagcaagagaaaaacaagagacaacgacttgggttgatttgatttagccagaagaaaaacgcttacttcgtcgtcgaccgtactctcctcgaagacctcgaagccaccggatccagccacccattccccctgtacacgtttatgcaagcagattagccatcggcatcttttatcatcaaaaccaaggcaagccaataaacgtagacggtcgaatcagtttagacgaacagttcaaaacaacaagctcggcgaccaagagttggacaggtccggagggctgctgagtagatgtctcggacgctcgaaggagcctttcagcaaactgagggttagacgtcgtccatccgagtcgacatccaggagcgatggtctgtttttgttcacattcaacagaagaaaaccacagtctcgtcagcatcttgacttgattcaatatttgacgtcgttagggtgagatataccttggagaaggtatcgattcggatgacacgctaaacgaaagatgatttcaaagagtattggccggagattagcgtgcacatcccttggtatgtgggctgagaagttggaaaagacaagaggcaagcttacgccttgggtatcgttcttgaggtaactctttccgataagtcccaggaacgccttgttcttctcttcctcagacttggacttgtccttctcgatctcggatccaggagggctgatgccgtaaggcccaaagttcaaggcccagtacggatcgtcctcgacctacgtcccagaataacaatgacaactgtcagcggcctgttgtccgattcaaatcaaggaagagcgaagcgataacgttacgcacgataatgaaatcatatttgacggcaagggcgtacacggcagctcgtctctcgtcattgattgtcgatccagtgggattctgaccaataggaacggtatacaacactctaggcctcctcatcttcctttcttcatcgcaccatcctttgaggagagcctcaagcgcttctgggaccagaccgtaatcgtcaataggagtggtcacaggtcggacacccataggccacccggtctcgagggcggaagggtaggtagacgactcgacgagtataccgtctcctttctcacagagaagctcgacgactttgtggaaagcatcggtagatccgtcacagagaagaacttcccagttggcataagccggaggaacagccagctagtgtgagagcgagtgtggcaggtaatcaagttagtgatcgacagagaaacagatggaaaagaagggaggagggagaaaggtattttacctttgtccactctgtaaggaaatcgcttagctgcggcggcatcaacgggaacgacgattgcaaaggtcgtcagtcgatatatttggaaagtagttgaaccaagaagagagactcacgatctggaaacctgttgatcaaataggaattacacgtatccatccatccataagaaaataaagaaaagagactgaactcaacacactcgatctcttatcggcctatcactgaaacatgctgacaaacggcatcccggaaaagagggaaaaaaaatccaacctaccagaggcagctccatattggagtccgttctttagctgaagaccaccctgtttcttcgcatacttgggtacctcgataaagtccaagctcttgccgagcagagatgccagccagctcttagcctttccgggttcgatgcccatcggagcatagatatctggatgcatagtcgtggcggaaagggtctcgaatgggaagtaggcttcatttggtagaccaccggccaaggaccggaccgtaggatcgaactgtaacaaaacagaagatcaggacgagactgttgttgaagaagagaaaagagatcgaaagaggaaagagataagaaaaataccatgtatttagcaaagctcttcaaaggagaagaccttcgctcttttgcaagcgtcgacagatgatgggacatgtccaccgcgttctccaacgaagctgcatgtgactcgagtgctgcagagtgagtgtccatggttctattagtgactgtgtgagttgtatgggagttgatgtctgtggatgaatgtggcgaggatgaatggatggtggatgttgataggttgacggttgaacgatagagagatctcagttttggtcgcacatgtccgattgtcccttcggaggtcgccgggcactcgttccatcttatgctatcagattcttacgagcatcgtttccaatcttcttgcgcttccgtttcgttcagacgagcaaaggataatgtatgcaacaagagagataggatacacatatatacatctgcctcttag

SEQ ID NO: 1193 - DNA, 16264 bp, Xanthophyllomyces dendrorhous
tatatacatctgcctcttaggcccggtctcgtaaccatcggagtaagccttcggttccgtctctctcccaggtccgtctgttgggcgaccgaaataagtttcggtcgaccatgaatgtctctaccgagaggaaacctaagactggatccaactgatgaggcataaaccagagcaggttatcgatcagtcgtttgaacagcagctaacagagtgttcactcgcaaaccatcgaatggcagctcaccttttcgatactgttatctctcacatcaacctctctacaagcccacctatcggtctgcccgttcctcaacatcattcccacgtgctccaatccggccaatgatctgacgcccgcctctcgcgccttcaacacctttaggccttggccgatcaacaacctttccagtacctgtttgtttccaaacaacgcgtcccccacgatcgtttccgacaggtcgagctcttccaacccggggaacattgacgggatccactccaccagactggacagcggtaccgagctggaggtgatcgataagatcttgaccgatcggaatatcacgttctcagtcatatttaggaacgacctgaggttcttacctcccaaaatgacggtctgaagagagggactaaaaggctccaaggcaagaagcccaaagtcgaacgatccgccaggcaagattggatctgtcgatcttccctggagagtcagggtgaatcggttgagagcaggcgagtagaattggctgtataatgaatctgtggacggactcagagacgcgcttacagcttgttgggaaccagacggagaagacgagccagggacgggaagagaaggaggtaaaggcgctggcgccggcggcggtgccgatggtttcatcataggcggcgattcatcccaatcgtcaaacacattgggcttagttgaagccttcttggttatcgtttttgttggaagtgtcgtgtgttttgccgtcgtggacgacaacggaagccaaaatggatcttctgcgggtcctgacttggactctgagcacaagttttcatccgtcctgggcctcggcggggatggtaccctaggacctagcacaggagggcttttcaccgagaccttctgtccaaccgattgggttcccgctcgcccgactgttctgggaacttgcaagacaggcggaggcgcctccggtgaaacacccacatatatatgtgtcttttttcttccaggcgtcttgggaaccatgtgtggatccaccaagatctccaatttccagcttgctgacttattgctcgagcccgagttggaacttgaggtagatcctcgatctcggagatgatctcccgactcagtactcttgaactcgacttcccttcctgggccccacccggttcgaaattcttctactctgattaatgattgattgcctttcagttccagtactcttagctcatgaagcacatcccttccgtcattctcgatcgagaccagtccggtgtccgataggccaaggaatctcagcctgtctagaccttcgaacaacctcggatcaagcttggtattgtcacccttgggagaagaaccgcagatcggattacttcccagttgtagggtttccaaacaaggcggccaagataccgggaggccttcactcgtgatcttattgtcattcaacacgagcgtcctcagacgcggacaaggcctcgagggcgggtccctcgatggaggaggggagttcagtaacgaagaaggaggagttcctgggaacaaaggctgaacggtcgacgggatcgataggttgaggatggtaagttcgttatgggacaaatcgagatgttgtaggttcggaagtagtgtcaacaccgacggaaactgagtgaacgcgttgtatcttttccattgagcaaaaatgtagaaaacgtctctgattagagatcgaaaagccagatggaagatacattgaaactctgagcttacgaaagaatgagcgtgttcaattgaaggagattggaggcactgaaaggaactttataaagcttgttatctcgaagctatcgttcgtcaaagtatgccatccataacaagtttaccaatcgtaagcgcgcgcgcgttcactccggcatgacagcaagacgacaagtggtccgagaacaagagcaaggagagcagaaggaagagcaaaagagaaacacttacatctagatgtttcaatccgccaaacaagcccaactctggatccaacgagctcaactcctggttcgtcaccttaagcacttccagatctgttcctccgatgaaccctccgacttctctctccgccggctcctttgtgctcgtgccaaacacatcttccttcgatccttctaatcccaagctagccaaacgatcagacatctcttcgatcgtccttgttcctgtttccgctccggtcgacggccaaagaggtctggaagaagtcacagcagggaccttacgggacaactcgtcgacgggaatcccaagaaggagagtgtagagcgaaagagggagctggtctattggcttttccagagtcgttgggatcaccagttttcctgtcgacatagagacgtgtttactatcgcagatgagcgagcaaataatataaagatgaagagtgaatgaaagaacgaacgaacgaacccgtctctgcggctcgcttgaccaacgatcttatccgatctgcctgagcgactgttcttggcgttcccgacctttcggcagcaggtgttgcctgtgaggctctgagcaatctgatttggtctttaatcgacggtctgttcttgggtgtcattgccattcctcctcccgatcccgctatagcgggggtagaatcgggggtagccgggatgttttcgtgtcgcttcggcgtcccaccgacagcggtcttcgaggtcatcctaggcgtacccggtcggctctgactgaggcggtttgtcgcgcttgataaagaagatgaagaagtggaagaagatccggatgagaaggaaggagatgacgtttgttttcttaacgaagatgtactggtaggttgacgaatccgggttacacccgccggcgagccgggttgattcctctgactatgtcctggctccaggatccgagaaggcgtcgggatcgacatgggcgactgtttggaagagatctgttgtgttgtgcagtgttcttctccttgcttgttggtgttctctcctctgatgttgatggtttaacatgaacgagataaaaagaattaaaaattaaataaaaccccccaacaaaaatcactcgcgtccattttctactttcttccgttttctctttgtcgttcttacaatcgttcatcaacctcattctcatcgatctagaagatcagatctatcaagaactctaagacaaagtaaatctaatccctgcgcacacacaaaaatgcgcgtatacatcgcgcatttagacatacaatccttcagtgttcacaaactcggccactccatccggcacgatatccttccaatcacggggttctctctcggtctccgtctttcgagcgatcaacgatcgaaccagactcgagctgacatccgacctatcttgtccgcctctgatgacagcctgtctgagtgagccgtccgaaagatgaacgtgtggggacgacatgatcggttcttctgtagagaccgggcgaggaaagtggacaaggatcgaaggagtagatgagttgaaaaagggatcaagagcttctcggaggggggccggatagtctgtatttgagagtatattccagagaaaagaggtaggaccttgttcaggaaacgaaagctaatcaacagaacgggtcgcatgcacgcgcacatgcgcatactaagttgaacaattgaagacggagaagacggacacttttgatcgaagaacctgacgactgtgtctgttcctaagagccaggccaaccggacatcatgtatcggctttgctggttcctgccggtttctcaggaattcacgaacgactttatctttgttgacgaacgctggctcgtggagaagaccaatcgcgacgttggaccatgctcgaggaggagcaaccggggaagtacaggttggattcgatttgaagccggaagatcccagttttagaatgtgttgagccatcagatggatcatttctagccgttgtctaggaatatcgacaagaatcaaagtgacctcccaaaaaagacatgagcgcgggaggaaagatgaccagaagcacactgtaagaagaagacttactcaaacgaagcatccccagatttcaataccttgtctacattcctcgccgagagcaacaggagcaatgcgtcgtattcttccgcaccatcttccgcctcaccgttgacgttgccgagatccttatcattcctcctagcaaccggaggaagtccagcaagagccatatcaagatgagcgctggtcggtggattgaacgatgagtctaggcatgagatcgttagtttccgtgaggtctgcgacgaagacagtgatggagaagaagaggaggttgtggagatagaaggcttagaggttggatttggaagaggccattgaggatgggatgcaaagacgagttcgaaattcgccggatttgtaggatggagaatagaattcagacaagatcttgcgtgggatcttgtgaaagatgagctcatcggtctgagggatgtgatagaggcggacaagggatgaacagagagtgttgacggtgatgacggtgatgatggtgatggcgatgatcaagatgatacctgttgctgctgtcgatgatgacgagaagaaagcgattcaaccgccaacgttcatcccttccatcgaccatcatcctcaaagttcacataccatagatacatccttttcatccctctttctcaggtagaacagatacacacacacagatgagttcaataggagtgggcaagatgtcaacatacgacgctgatgtgtgagtatgctatctatccgatctagagacaccctttcgagtcaaactgaattggtcttatcatgtgctaccgtcatctgccacctcatcggtcgaccagccaacggaggacgttgatcaagctggtaatctttgcggtcgcccttgctttcgcaccgatagccacctactttttatccatccggagattctttcctggtacgtcttttcttgctcgttcttggggccgtctttcgtcttgttctcacatgtaccctctcttggcttctttctgtctttcttttcttgctcgattttctggctttcttcccatgcttgggtgataacacaggaaacgctacatacgcagccatcagcgctgtcgtggtcgcaaactgtgtgttggtaggctatgttaccgtcgccttccgagaggagcaggccgagttgaatgagaagaaagcagggaaatctggtgggccagggaagaaacttgagtagtggagcagaagtaataggaagccaaccgaaaaggaagatcgcgaatgatctactatcgaacatgtatacatatatgtatgtgtggactgtgtatgtttatctgtaaaggtgctaggtgtgggttagacgtataaggaccagctctatctcaagctacctagtcaggatgaaggagcgaggtagagaactgaggcgagagccggggatgttggcagtcacatacaggcgaggaggaagagcgactgaaaccgaagattctacgacgagaagaaggagagagaccactctatgctttcctacctcctccgtcgagtttgttgagctctgatgaacctgccgagccatgatgatctgggcattccccaggctgatgatggtgtggtcgtttcgtcttcttcttcttgatcgcactcggaatcccatggtctgattcaccggatgagggacatgacgaagattcatctgaagacgactcatcgaacggtcggggtttgtgatagatacagcacactaccaaggtgacgaagatgacaacaaagagctcaagccatcagcaatggtactacagccctggccaccgaaaggttctcgacacttgtcacacatactcttgcttttctttcggttgagatgttcattgtcgaccgttccctctacccagctgactttacccttcatgaccttcttgactgccttttctgaatgattccctcggagtcggagtgtgccaacctcggtggatggtatgcttgggagatcgatggatgaattatccactaacgtctgcccaccggtctgagtcatcgatgacggctgttgtgtcgacatcacgaatggaaggccaagttgggtggaaggatgaaggtgggatgtaaattggatgaaccttctcgagaaacattctttagcacatttaccatcatcaagccaagtgaatcccgttgactcccactctcgctctcaccctcactttgttcttgatggcggcctatcatcctaggaaggtccctcctcgcccgcgttcacctccgcctacgtcttctgcttcttcttctcatcagaacactgatctcctctttccgtcggctgcctcggcagaactcgcttggtccttggtctatcctcagagacaacggtcggttgccacctcgttctcctccactaccaccaccacatcggacacctcgtctttcgcagagtctcctcgtgtggagaaccgtgaactctcgccatcggaatcagccgttcctcttcctgcctcttattggcatgacctcggtctacccgcccacgacggccatggcaactttccgagtccggggatcaccccacgggcctcgatcgacggccacctcggctttcaccgaccagagacgtttcatcggtctctcagtaaccgaacggccgatacatacagtacgatcgacagcgtagacgacggtctttccgccttggatctcaacgatggatcagactatggctgggatggcatggagagcgttcggaaccggtccgaaggaggaagctttgggggaggcgtcgcggctgaaatagggataggaacgggacagacaacagggttcaccgacagatggagactgagcggagaaaagaggaggagggatagtagtccgtacactgcggtctctgtctcgaccgctctctctgaggaagaagaggaccaagggcgtgaacgggagcaaggaggggttcatcaccatcaacagtcatcctcccgacggatctctccaaccgacctagcatcaactttgtaccgacggcactcgtcactctcctccattaccctggcaggaatacttactgaatcttctgctactccttcttcgtctccggccgggaaagcgatgacggagttgctgacgacttcgctcggctcgctcttccaactggcctcatcctcgattctttcgtttcttccgccgacagaattgtcgtacaagcattcgatcccgcttcgagtgatccgatcggtctggaatatcgacgaggactcattaatgctgatgtttccccctcccttacctcgaccggtcgagcagccggtgtttcatgagttgttcctcaaaccgatatctgcacccgcgatcggtccgcttgaagccgacaaagcgaatgaggatggagtcaaggaagcagagggtgaagcggtcctcgaggcatcgctggaagacggcctgaacgatcacgacgattggcagtttgaaagctccaactcaacgggacaagaacgaatgtttcgaagcccgtggatgccttgggctggttgaggtcaattttctttctatctttctctttctgaaacccctcatcgtatcgaatcaaacacatcgttggaagagtagggtgtatatgcgggtgtgtagattcaactaatgagccgtagggcggctcgttctttcttggccagtttcttctttctgttgttcgatcgtttgtaaatttactagttgtatatcacgttgtagtatgtagagcgcacacacacacacacacacacacacacatgtccatatggccgatgtatgtctctcatgatggtttattctctcctatcttaatagtcccacaggaaacgttcttgccggaaccgactcgagaacaagagaaagaagaaacaaagacacgcccagtgcatacaccatcccataagacacccatagaccgccatgaccgctatgaccactagaaccaagatcgtctgctgcagatattcacaaccaaagcacacatcatacatgtacactcaacctagatcaacccatccatccagtgtcctcaaatctgcactcccatctgttactccacccatcagagttgactgaggattaatccgactgcgcattcccaagccaagatcccgaacactccagagacccacacagtcgagcagcacccgtacgatcacgatcacaaccaccaccaccccccgtctgaccatcaaggcagcacatcgaagcagtatatccttctggaagtcttgagaacttagctttcttattcgtcatggctggatcgactcctagctcgacgggttagtcctctcggctcgtccgatgtatcttaaaccgtgtcgtgttattgctttgggttctgttggagctgactcttgattctgttctggctttcctctcatgcctcttgttctaggtgtcctctttggacggaatcctgcatcgttcgatgtagatgatcctatcgttctctttatcatccaggtctgtctatgacgaatcttcacatcgagcggttctggtttatcttctcgatttcctcgtgcttcttctgaactgacaccctcttgatgttgcggacccaccctgtgggaacatctcgtccttgatggcatccagctcttcatggtcctcgctttcacccagattctctccatattactcactccgttcaggcagcccagggttatcgctgaagtcttggctggcatcgtcctcggtccaaccgtgcttggcagaattcccggtttcacaaagagcatctttccctcggccagtttaagctacctgaaccttgtgtctaccatcggttggtcctctgtgtattctttccctactcatttttgcagggtttcatggtctgacctccgagttcttctttctttcttcaggtttggtactcttccttttcctcgtgggcctggaggtacgtccgactgcttgacttgccgtgcttgtctcagattcccgcttgatctctctttctcgctcatctcaagcgcctcgtctgtgtttgtgattcttcaaaaggttgatgttcagatcatcagaaagaatgctcgagctgcgatatctatctctcttgcaggaatgatcatcccattcggcatgtcttctcatcgtgtttttgaatacaaacgatgtactgtgctgatcgttagattccttcgcgttcatcgatgatataactaggtctcggcgcagcggtgagttcctatagacgggcagctcatctcatctcatcccatcccagcatactcttgactgatctatttgtatctatttctggttcgaacaacagatcgcggtccctatctaccacaactttatcgacccatcggtcaactttagccatttcatcctctttgtcggaaccggtcagttgttcccttggttacggcccttatttcagctcagactaaccttgtagttgattcgaatcaatcttttggaccctttcagccatgtccatcaccgccttccctgttttgtgtcgtgcgtcaaccagaacttgtctcaactctttccataaatgtttcagagtctcacccaagttcatcttaccaatcttcctttctctaggtatcttgaccgagctaaagctccttgataccaccatcggtgtcgtcgtgctctcggccggagtcggaaacgatgtcgtcggttgggttcttctcgcacttacggtggccttggtgaactcgagctccggtaccgggggcggtagctctggagtcaaagccgtttatgtgcttctcaccgccatcggttggacccttgtgagtctttgccgtttcctagtcgagcctttcaaacgagtttgtgttctgtgtgactgaccagccatatctccattacagttcttgctatatcctgttcgatgggctgtcagatggctcgcccgaaagacgggaagtcttgaatccggtcatccaacacccttgatgatgtacgtctttctcgtgcatgtaattcgtggctggctcgttgctaacgaaacatgtctattctttttcaggacggtcatcctcttactggtctttgtttctggattcatgaccgacattatcggtgtccatgtgatctttggtggtttcctatgcgcgtttgccgtcccgagggagattgccattgtcttggtcgaaaagatcgaggatctaatcacaatcatctttttgcctttggtaagtgactaactccgcagaaccagagcaaagcgtttcttgaagctcatcgaagtttttctctcacaatatgtaattcgaacagtatttcacccgtaagccgcctgacaattatcatcatcatgtgggcgaacaaatgtgtggccaaaactgaatcacaatcaaacgctttgtcgcagtttcgggattgaagactaatctgggattactcgacaacggaatcagtaagtttcctctctgtgcgtgagaggcatcgatcagattcaaaacattaatgtcattcttctatcctttgatatcataatagcttggggatacacgtgagtcttagtgtttatagatctctcgtatcatgcgttaatcaatttcaagccctttggttccgatcgagaaagcatcttgctctgcgttgtcgcctttgtcggaaagttcgcaggtatgtgtagatgaccaatgtcggatatgtctcggacaaataacagagactgatggctggtttctggtccgtcgtatggttggttgaactttaggatgttattccgccgccctgctgaacaagtttgacaacagagaagctcttgctgttgggacactcatgtcatgtaaaggtctcgtcgagctcatcgtcctcaacgtcggtcagtctcgtgttctgtttgttttccaaacgtcacctctgcttctaacgaaccgatttggtctctctttttctgcggcattctctcaggtctctccgccggaatcctttcggccagagcgttctcgatgtttgttttcatggccatcgtcttgaccatcatggtaggtctttttcttctcaaggagaactttaatcgatcatagattttaatgctcgaaggtgttaaaccccccttcccccttcttgtatccgcaatcagacgaccccgttgactctctgggtttatcctgcccgtgtccgaaaatctcttgcgtatgtccagggagcttgtcttcttctgtcgaggttgtttctctatctgactagctttatgtttcttcatctacagagctcagcgcagcggaaatgcctcaggcaagtctactggaaccaccacgaccacgtcatcttctacagatctctctatcgccggggttcggcttcacacatcacatctgttcgtcgtgttggccaagatggagcaaatccgtaagtgatcactctgggatcaaaccctgctgaactcgcagacgtgcgttcattcaccatttttttcccactctggtatttaaacacagcttccttgatggccctgatgcagcttttcaagagcgagtccattccgactgaaaaagccccgttgtttgactcgccgtcgccggtgtcggtcgaagcgttccgtcttgtagaactcactcatcgaatgagtgcggtcatgcaggtgaccgagcaggatgatatcctacacagagacatggccatgcaggtcttcaaaacagtcggtcttcttcctttactcaacatccagtagattgtaaccgcacagtgattgttcgaatgctcaatattgacagcgtttggtgttggtggggatctaacttggtgatcatgatagtacggccaactgaacaatatcccagtgattccatcaatgtcgatcgttccattcgagtcgttcaccgatagtatcgtgtctcactcggcccgatcgagactcgtggtgatcccttggtctggacatcctccattctctggctctacggctgaagaagggcaggacaacattcatgcgtccacctcggccagtcacgttgaggctctcctcgggtcgagcgactcagtgtggtgtcaatttttgagaaaaacattggctgagtcacccaaggatgtaaggcagtttaaagtcttgtgatcatggtcgagacagtcttgatccttgtactgacgtttctgtcgtctgggttgatgctccttgcttagatcgccatctatgcccaaagaggcgagtctaactcgctggtcaaacaacatctacttgtcgtattcaccggtggaccggacgaccgactggcgctctccctcgcgtgccagctttgtagtaataacataggaacgagggcaaccgtcatcagacttgtctcgtcctctttccaccttggtggagcgttgctttcaaagtttacgaccaccacgtcttcgaacgcagccaatccgatggaagtggagaagcatgaggcggctatgcttgacagttgtcaaacgttctctcgaaaggtatgttcttggttgtgtaagaatagttgtatagatttcttctatcttaattgagtttgggtttctcttcacttgatgcagtctcacccgagcggattgaaatctgatggatcagacgacgcggacgaaaaagcctggagctacttctcgacgtcttccagcgctcgaatgacgttcgagaccatcagctcatctactccgcttcaatcgatcattgagcgtgccgatcatgccggtccggcccagtctcaactagtggttgtcactggtagaagtcgacattcaaatttgaagactgacaaaacgggtagagaggttgcttcgatcctgtcccagaatggtcaacagcctggtgtgtctttttaaatgttgttctgactgttttccttgtctgccattttatcggtgtggtactgaggtctatgctttttttttcttggtttttgtttgttctttctgatcgattagatgccggtgtggaattgagaaagacagtaggtgacgtagcgacggcattgatggtcagcgttcccaaggcgtctttccttgtcctccaagcgggatcggtggcagacgacgagcttacagcaccggcgttgaccgcttaaggtgtccgttggttgtcttttttctccttcgttttgatcatgtgttgtcctttatcttcatcgtttcctatacttttttgtgcttgtggtggcttttatggggtttcttcttctctttttctttgttctatcctttctcggagccttctgcgctatcgtaatcagttcatatatctcgtccacttatacagttctctatcatcttcattttctctccgctctcatcatattcttcgttgttttcttttgttttttcactcgtttatacttacaactcggtcttgcacgcttggtcttgagtttgtaaagtttgatttttcatgactctggttcttttctcttcgactgaccgatcggtcgactgcttctgggaggcggttgcatttgagttgaatgaacgacacatagagtgaggcaatgggtagaaggtgcatatatgccattattcgtatcaagaaatcgatgattgcgagctatgtaaagatgtaaagcgaaaaagcgaaaaagcgaaaaagcgaaaaagtagaaaggggaaagagaaaaaaaaagtttgaaaagaattcattatcaagagaaaatgatatgtttgaagaaaagtcgctgtcgaacgagcggacagatggaccaaagagcgccctcgagaagatggatgaagtaatgtaagaaaacgtggagaaaagcaaacagaagttccggtcggccaacccgatcgaagcgcgcgagaaagagagagagagggaagagtgccttcttcaattgagttctgcaaactttttaagaccttcgagtgcctcacccgtcagctctttgaatttgatgataaagtccgtttgttcaatgattgcttctagtgtgtcatctttaagtttgttcgttcgatgaaccaatctgctatgcctttttttcaagatgaaggaaatcacggtgtttttgtcggtcagtttgctgaatatgtggcaaggtctaaaaggaaagcggaacgtactcaatcttgagtgattcaacgttggattcggccaagaggagcgcttgacggttcgtagcttgcgcttgagcaatctcttcattgattgcttgttgttgtcttgaaaattcagccgattcgcctgccatcgtctttttgtatcggtattgttgttgtttgtttgtttgtttttttcatcccgcaaatgtcacagttgagacaaattgttaggaaagttggaaagaataaagagaggcaaagatggggactaacatttctggcgatttcagtttgatcagacgtgttttttaactgcctggtctgtaggtcgacctcctctttcaattgaacgaccgcctgattgactctatccagctcatcgtccgtttgaatgatcttgccttccaacaaagcagtctcgtccctcatcgctttcaaaaagacatacaatccctgtctggaggtcttcgggttgacgctcaggatagactccggtgttgtccctgcaacgtcaacctcaagcgtgaaatcaaactcgttgaactcgaacggagtctctggtaagaggcccagtctgaaatttgtagaactgtattcttgacagagagcttcgagcatatcaaaatgacgagcgacagccatctctttggagccagcttcgttccgagcgtgagttgacttctcacgaagatcttccaaggacgcggtgagcgttcggtgctcagtattcatctgttggacttcttccatcgagagtccttgcgctcttacccgagcgtccacattggctttccgagctcgaagatcagccagttcattctctattgatgtcgggaggaagaaagtcgcatgtcgtgggtcagaacgtctctacggctttgaggtagctttcgtttggatcagaacttacgagcagccgttatccggtctaaaagcgcaacgttatcttcttctcgtttttcctttcgtttcgaatggtgttgaatacactggataaactttttcttgtctgactcgtacagcagataatcttgttccagcttgaccagtgggctctgaagatagcacgggagtcatgagcaaaatgtttagtgggtgcagatgagaatgattagtattcgtctccgacgtaaggaggtaccgggaaggagacactcaccggcgtggagttcaagatgtcgcgctcttctattaatctcggaagctcgccttctaatcggttcacctcgtcctgccatgcctggtgttttctcgctgaattaccccaaattgtatccagtttagttttcctccaatctaccttcttgagatcgatccatagaccgaacccagggaatattgagctcagggagaactcaccaaagttttcgctcatgatcgcatcctcttcttcaaaatcttctcctccttcgatccatcgagcatattttgcactagcatactcgtagctccataaaagttccagattctctgcgtccagtgggatgcggtccgatggtaatagatctggatcttcatataatgagcattcgacccagctttctttgacctgtgaatcattttcttctccttcgtcagcctggcgttgcatgttttgattacaaagaaggaaagagaaaaggattggtggtattctcggaggtttcacgcacctgtgaaatatcaaccaaccaagctagcatcgccaacaacgtaggccactggggaccacccggcgcggtgatacccgttctactcaatccatctaaacttgggtaccgatgatccttcaaaatcaagatacactcttcctcaaacttcttgcctcctcttccgaacacatagtcttcgtccaacacgttttgaacgaggaatttgaacatttgttggaactctacttgagtaggggaagttaatgatttagttgttatctggggcgctcgggggtttcgatgaaaataggataggatgaggtctctgcaagtttgttggtacgtcttatctttgagcggacgagtgtctcgggtagttagcggtggtggatgagagagtgacgatgtgtgaagacgagcggtattcggtgtgagtgtattga

SEQ ID NO: 1194 - DNA, 90996 bp, Xanthophyllomyces dendrorhous
ccaccaccaccaccgccgttgtttgatcctccagccccgccgtagatagaagatcgcttcaatgagctgtacagacacgttttatccattcatagacagttgaaagcaataaaatgaacagtggattagcaattgtgtcagatagtatatgcattctggagcaatcatgcctgaaggacgtttccgagatacgaaaagagagaggaaacgaacctatttccttttctaggagtttgaccggttccaaatccagcatccatccttcctccgccggctagacttcctctgaaaccagaatttcccatctgaccccccatgccgctccctccgttggaactagccatgagctgggtggttgtacgtcttcggttaccttgtgaatttgattgagagctcatttgttgggatgatggattggaggatgatggattggattgcattcgttgtggaggtccagcaagggacatccggtttggattcgacatggccacgcttatggttcttggtagcgagagctctgctagcagattaagtatacaactagaagaggtgggtaagtatatatcgatcgagcggcgatgatggatgagtgattggcgagtagtcaaatccgacgcgtcggatggaaacaaagaaatcaattttcagacgcgtcgtgagaactccaaaatcgtatttacattattgtacattttcattcttgattgattcgtcgacaacaatgtgatctacagacaagccatacatatatagattcatacaacatctatccgtcgcgactgtatgtatacatcgaatagaacgcgatatgctcgttggcattctcggagagaacgtcacattctacttaatcttggcgttcccgtcggcgtgaccattggcgatacctccagaataattgattttttgacggttgacaaatctaaagaacgcgagagctgcccaggctgctccagcatagatcgctcctcgtacgggaagaggcgaaatctagataggtttcaacatggatggtaaacaggagataggcgcgcgtttgagcaaactggttgatacgtcaaaagtaagaagggttacgaatacaacaaaactaacggtgaggaaaggataagggaaaacaccgttgttttgaagggcacaccattccgcccaagacgcatacccggtagcgagaaggatggtagcgtagagcgcaccagtggttgactgaggaggaaggtacggcttctcaaagaagaagaaatcggtaagaagagtagcgcctggggcggcatgaactgtttctcgatagaaggcattttgaagaagaagaaaaagaaagagagaaagagaagaaaagagaagagaagcagatgttcaggttttgagacacatacaccgtgtccaatcataccatgtacagaacaatgcgatactcacgtgccaagtctatgtaaattggaatcttgatgaacgttggcacagtcggatcgaacgaggagacatcctcattgagctctggaaccaacaggaagggtgcaatgagaaccagaggccactaaagtaacccatgtgataggaaaaaaatcgaggaaaacaagtcagtttggcaaacccaacgcaaatcacatatcatgcatgaagtgagcatacgtagaccgcagacaccacagtttctacctgattgatttgagaaccgcgaaaagagaatgagagaacagagagtcaaaaaaaaccgatgcatgaaaattggagtaagttgcacaaggtggacatcacaatacttacgggcaaagatataagtagcaaaacacgcttcgctttcttaagaactgtgttgttgttgagcccggaataaggtattcaggctggtcagcgagaacgatccatcaaacattcacttcgaccgactctcgaactggttccgatcctgtaagggatgatattaccctttgctcccgtcaaatcagccaggattgaggttcccatacagatctggctggcatacaagcctaggatcgtaaggaactgagtcatgccaccgtattgggtgccgaagtattttgcaaacactagcgtggacagcttctggtatccccagctggtgtaactaagcgctgcctacagaccaaaaagaatgtttagataatgactggtcgttggaacaaccatgtgcggtagaatcggagggaagactgttcggatcgagcagcagaggacagactagaagccggactgacgagatgaaggataactctagagataggcatgtttagtagatatgttctctgtacgggcgtatgtatatcagtgcggctacgagtatacgagtgtgtgagtgagtgactgtatgatcgttcgaggttgggaacccaggatgtatggtggccaggatgatctgaagggaatcgatcgatcaaccggcttgaccactagaagatgagatcatcggcggcaggctaggttcggtcacgtgacttgagcccgtggtcgaagcaggttagtctcggtaataacccccggctcccggcttctcgtcacagccgagctcaagcaggaactctccggtggttccttgttttccgagttccttccatcttaacttgcattcatccataaaccttctacacacgaaacatccactcagccgttcatctactctatcgtttcttcgttggctcttgcacttctccaatcacacacttgtacatctatatacacactcgatgtttacttcaatcactcgcccggttctcaggtcgaccgtcagccgatctcttcctagagctcttcctatcttgtcagtagtgccatgggacagtttcttttccacattgttgccaaccgttcagggctcatgtctttttttattgcgtttttttttaaatctgcaactcaaccataggactcgacagttcgctatcagtcagtataagcaaaatgctgagcaaccttatactccggcctctctcttcaccttcaccgaagaggaggagatgctccgagactctggtctgttctccttccttcaaaatttttgaccaacgtgcatcaagggcctctctcatcgtgattctcatcgtccttctccctctctgttctgatataattggtgtagtgaggaagtttgcagaggacgttgtcgctcctaaggtactcgagatggatgaaaaggagatgatggatccagagatcatcaaaggtctatatgagcaaggcgtaggtattcttctttttttttcctaactcaggcgtccgaagtttcttcctgacgatagtcggtctgttattcgatactatctcagctgatgggaattgagaccagtcctgatcacggaggttcgggttgctccttcgtgagtgcaatcatagccatcgaaggtttgtccattgagcatattttcacatcaacggttccttggcctaggcactgatcgatcaaacttgttatctccctcccactgtcgtaaacagagcttgccaaagtggatccaagcgtgtctgttctgctagacgtccacacaactctgtgcaacacaatcttcagaacgtatgcctcgaaagagaaccaggataaatatctacctcaattgtcagaatccaaggtcagcaccttccttcatctatagtcgttatagcctaaacaagcaatcggtataaagaaatcttctgatttggttctgcctctaaaccatctttaaattgttccgctctgttgcatttcttgatcgtagcttggttctttcgctctctctgagccagcgtccggatcggacgcctttgctctcaaaacgacggccaagaaacaaggagatggttatgttttaaacgggtcaaagatgtggatcaccaactcttatgaagcagagatcttccttgtgttcgctacggtagatccatccttaggatacaagggcattacctgctttgtcgtggagaaggatcagggcgtgaaggtggctaagaaagagatcaagctgggaatcagagccagcagcacttggttcgtggttttcatcggagatcttagacaagaatctagttctgtttcacacaaaggacatttttttccctctgacatgcctggacgtttgtatcatggatcgtacagcaccttggacttcgatgatgtctacgttcccgctagcgccgtcattggagaggtaggaaagggttataaggcatgttgttctccttcagagtatgtgatcgagtgagaaactcggatcgaacatctaatcgtcctattttcgtgaacagattgccatcgaaattttgaacgaaggccgaattgggatcgcagctcagatggtaggcttggctcaaggtatgcttgatttatcttaaacgtgcatctatgtgtcctatgcttatctcaaatgatcttttcacactctctcttaggtgcattcgacaagtccgtttcttacgctttacagagaaagcagtttggcaagccagtcggagaattccaaggaatgggtttccaatttgctgaggttagtccgtttacattaaacatcttgtacagatgagcattttgatcatatgttggggtttgaacgtgtgttcttcaattacatcttcttggatcataggtcgccacagagatcgaggctgctcggctcctaacatacaacgctgcccgactgaaagaagagggcaaggtacgttcttacttctactttgctctgtgcttgcgacgtgttgtctcatattctttgggatcctcttcgtattccaatatagtccttctcgaaagaggcagctgtacgttacagtgttcttctatcgcctcatcatatgtatagtctaatgaattgattgtgaatgtatatatcatcattggtattaattcgtagatggccaaatggtactcgtgagtatatgttcttcttagccgcaatgcagctaccaagctcactatgcaacaaaacgtttcctatacagatccgtcgttgctcagaaggcagctggaagcgcaattgaatgggctggaggagtcggtttcactcgagaggttagtctagaatatcataagctatatagagtcgtatatacaatcaaaccttggctcaatctttgaaatcttaatctctcgaatgcagaccggaattgagaagtactggcggttcgtcaaatttctgagctctcgcctatcacagccagattctgtttgatctgattagagtctggttttcctttctctacctgtagagattccaagatcggcgctatctacgagggaacgtccaacattcagctggagacgatcgctaaagctatcaggcgaaagtacagctcgtaaaacaagaaagctgatgtttcgtgttgtaaaagataacctgttcttctgatgtatctttgtccttgcaaactgtgtttctttttgttatctactgtttgccccgatgggaatgaatgtaaattatacaactcgagcgtactctataaacaagagaaaatagacgctggaatggaaaaaaggggtggggggtatcaagacaaaatgatgcaaaaactaaaaactaaagcagagccagagaaaataaggaatgaggacggggacggggacggtgtcaatcggacaacaccaatgggtcgttcatcgtcccaccatgaaaaatgcactccacctctcgatagattgacgtaacctctagatcatcgctgtccgaggtgtctgatacgacaaagtaatctggatcgggtgctaccggtcggatagccgggtagacatcctcaatcgccggaccttcctcgtgttcttccttcttactctctcgcttttcctctcccttgaccgtccaggcatcgccatgatcactaatatcgttgtcgtccttgtcttcgtcaccgtctttctcatcatctccttctcctcctggctcatctccaaacaggtcgcttgttctctcgtcctcgtcctcaccaccatcttcctcgtctccatctctgcttacagaagctgttccttccacggaatcatcaagacatgcggtcatgagttccttgtcagcaggtcgagtcgtccggaacgccgcccataggtcccttgttgatcgaggccgagagtttgtagaaggaagagtaggattggctctatcggagatacggtccttctgaggcgaggcgcgagaatcaccgttgttgaatgggttatctcgaaacatcccacgtttgtctcgaagccgcaaggcagaggcgcccagagaagaagccgtgggatgtctcgtgaatctcacttttgatgaagccttccttccggtcggtttgtgtcgaggatcgggaagcggtgggaaatcgttgaggtccgatccgttgttcaggtctttggtcggtctaggaacaggcctccaaccggatcgaggtcgagatgcggacttcgtcagagattcagaatgagcgggacgttcaaactcgaaagcttcccaaatagggacgtccgaatccgactcggatccggatctattcgaggatgacatcgccactgaagcgacagcttgatgagtggtctcgttgttgattgttggaagtgcaaacaagaacggttcaacggcaatatcgttgttaacgggtggagattcggacgcgtgaaacaatccaggattagagaagtcatcacggcgtgaaaggggagattgcgatcgcgaccgatcaagttctcgtcgacgtcggggtaccgatgtagagtgtgagagggcctgacaatcagatggttgtccaattatggaaatcatgtcagtattggaaagaacatgacttgaagacggcacaattcgtcaagggacatattttaccttgccatttgggctgtccaatgctttacgtttcgacgggaaattcgggtcagatgatgaaggtgctagagcggccggtcttgaagatttgatctttcttcctcccgtggtctttcctatcagaggaaagtgcttttctagccactacaatatcataggaatcatacaggtcagtcatgcagctatgccgatcgaagaaataactcaaatgggtccttcgcgcgaaaagaagaaaaggacttactatcggtaaatgttgatcggatctatctaaatctgaagaatctgacatctcaatcacatcgacatctgtaacaaccggcgccttcgcctctctcggtagcacggagcggctggtctgttgctccatcgaagcttctttggtgtcttcgttaagagtaacttctgggaataaagattgacacagtcgtttaaattcactgtatggaagaagaatctgtgaaagaggatattgtacacctgtcgtaagaagctctttgggtaagtgtttgctttcctcagatgaagtccaaattcttgaactacggaccatagcgttggctgaattgagtggcggttggtagagaaaccctaagaaaccatggaaagttatgggaggaaatgatttagactaagctagaagaggtccggtcaaagagcgatttgaatctgacttaccagacaccctgccacgtagggggtttagaatattctccaggtcgagcactgtaaggatgctttttgccactgtgcagagaagcgaatactttatttatgtttcttttggtgagcccggctagaaacagaatggaatccaactgaatccagctgttgaagcaaagattgcaaagcccaggtcaatgtttggatacagaaatgtctgaacggttgccggcaggcattggatggcatacctagagcaaaaatctcttgatacaacagctgtacggtcttgtatcgttacctctgtttggtgtaattttctctacaaacaccgcggcagtgtgaatatatgtcgaccaaggaaaaggctagagttagtgtggacatctcaaggactcacgttatgatctacgatcacttctcgtattggaggaggatcacaatcgtatggtaattgtacaggcctatcgggaggaaccggacgtcgaggagcatttggatccggtttggggggaacctcgattattcgctcatccagcgcactaatcgaagatggtttgagaaaatcatcaatattgagtcagcgatcaataaatctggaaattgcaaaaattgtaaaaccaccgattacgatgaaagaagaaggagaggcttacaagatgagtggtagacatggatcaatctcatctgtatccgagtcaatctcccctgcccactgaacaaggtcttcagagctcacggccggtagaatacaatctaaagaagaatcctcttccgttgtagtgtttgctttggatagctcctcctgggttgttctctttttgtcttttggtcgttttacagggattggtcggtaaggccaatttagtccaaagatttttctatgccggatacatctataatggaggttgagaacgcaatcaagtgagtcgttattcaatggcacatacgaggacctcagaagaaggcagaacagaagaagaacgaaatctaaccttacgcagtgtagattcaaaatgctcgactctggatcaacttcctctaaagcgcccttacacctcctgcagaaccacgcctcatcattgtcttcttcaaccaaaaaactcacggcatcctctctctcttttcctttacgagatacagagaatcgaacattgggaaacgagttttgctcccggctgtgtgtcgaccgggtcgttcgagtgtgggtgaagaagtcctgatcgtccgctgggggtcgagaggtaaatgctgacgaaagggatcgagtgctagattgtttgctgtaccagcctttcgagtcatattcgcaagatgcacataaacactcatcgttcttcgggccgaagtaatcatctccactgaatagacggtggacgtgtatacacgattagcattaaagtcaactgtctcatgaactgtcaagacggaaggcagggcacgaactagtatgctgtaagctcctctcctggcagaatgtttcgtacggtttcgaacgaaattccgtgttccgtcttacacaggattgtgttgggtcgacaatcgtgctatgaagaacgttacagagagttgcgtgacccgtcagtacagtgttcttccgtctgacataatatctgagcattcgtaaagagactcacgttcaagaatcgagcgggcctgagagacagttcgaacaaagaatgtcaaacacaacaaaaatcaaaatatttgaggaattagcacatggtcaagcttttgattcaattggcgagtttagtcatgcttcacataccccaaaaacaactcattcctcttcaaagcggttgaccaaacgactgagaaatctcgcatcgctcttccggacgccaacgagcttccagatgctttctgagagcccttgccggctctctctttcaacttgatgagtttcttgcccgaacccttaacaggactcgactctggtctatccgttgcttgaccgttgactgtagcaggtaggtctgtaaggtgatggtaaaggtttgaatcaaaccctgacatctcgtcttcttctctccgagagagaggcgcaagcgatccccgaatgtggtatgtgagctttgttcgtttggagatctctttggtagcatagatggccaattcggtcttgccagagacatgtgagtaacgaggtgttcgtccgatatcgatcgccctgtcgacaaacagcatgaaggagagtatgagacggagtgactacatcttgtgagtatcgagtgacatctttgaggtgacatggaacatacgtttcgaaacaatatatcaaaagatagtgctccagatggctacggttagtgtaggtagaaggaagtatcagtgactttgcgcgtcttgtaaaaggaaaacatatagaacacaagttgacgaacgtctgaaactctgtaagcctttttctatcctgcgctactttcggctccaggtactgtctgactccgggaattctatacagatgaaacaaagaatgagagtcaagaatgagcaaccaaaacacttttggtagaagaaatgtacttaccttaggaaagcgccgatggcgctaggaatatcctgatgacctatgatatgctgaaaccatgcaaccaacaaatcagctgtcgattttgtgagccgaatgttaactccaaaactgaaacgagacatgcctccttgacgattgcaagcacagtcctcatgttgaccttaggaggaacgaatccgagctgatcgcatttgtggaccccgactaagaagaccaacaaaccgacgcgatatacgaagtgaacgtgagcaagatggcgagcggatgagcttcttccgtttgaggttcctgtccgcttatctttggacatatgcacacttctcactaaaactacacgtacgtttagtaccaggagctgtcccaaacacgtcctgtatcgtcaaacagatttgaaaacagaagaacgttagggtaggtatatcggacgactagcagaacagcccatgggtcatcgtgattatattcccattaccaaccacaaaaagcacttacaagtaacacatgcgacaaaaagtcatcgtcctccttcagatgggcctgatttctatagacggggaccatcagccggggaggataacacacagaagaagcaaaggaggcgaatctgatggattctagatggatactgagtggacgattgttgacatgtttacctgtatggcggggtgagcggaaagactacaaaaagagactacaaaattagaggaaatccattagaagacgacagtccgaattctagttcgaccaccacgcccatcggcagtctccgtctctttgaacatgctgctaaccatcgagctgttgaatcgtttatccatctctggagctattaccttggtagtatgtaccggctaagactgatagtcatgtttcctttggtcactagctcttctctggctctggacagtaaatggctttcctggtgcgggaaacattaccagcccggttcgccggcagttcctccgttaggaaagatgaacccgcctgagcgatcaagcattcctcttcttgactttagatgcagtgaggataaaatatctctctagtcttgcttgttgttattttctctcctctcttttgtttgacgtgtaggctggctttgactgtttctctgatgtgttgaccacaatgctttggctacccttcggactgaacgccagctcctacaatccaaccatacctctctactgacctatcggcctcgattttactcgatctctacacttcttggacccatggtgtgccactcacctcaacagacatggttcttgaccaagaatcaggaattaactggatacaaactgatggttcttcctatcaagtcttcgtcagcgccaagactgcctcttctcactcggagacatatcccctcttggcttccagcatatctctaaactctaccactgaggcattcttcgacatctctcttctcccccctgcagttgagccttacacaatcacctgttctcttcttccactgcctcaaggactcatcagcgaaaacagacttatcgagacgacgagtttgttaaggatcttaccggaaacgaatccatggggtggtagcacgactaggatagatcgtaggaagggatccatcctagttccagtcaatggaggctgggaaccgatactgcctgtaggcttctacactaactatggagattatttggccaaagatttgagccatctagacgagatgaagaaactagggtttgtcagacgaccagttgcttttaactaatggcggactaaactgtgcagctgatagacgcggcccatacctggcaggttcaacaccgtccacccagtgccgacgtttgatgatattgacatccttaagaaggtccttgaccacgctgaaaagatcggagtatgtgccagaactctttgctctgtcccagtggtttgtttccttgaccaagagtatctttccttatgcgtggcacaatctttttccctagctctggctgatgtacgacatgcgtcatacatacaccgattctgtcaaagtcaaagatcaagtcaagatgatacagagctacaagaacttgcttgtttggtatacagcagatgagtgagaacctcgttgaaaagtcaatcgtatattttaggagttatcatcatgagactgaactctatccaaacggaattataggccagatggaaatgaagattctttatcttctacaaggactgcctatgacttgatctacgacctagataaaggctatcatcccgtttctctcgtgctgaactgcgccgactgcaagtgtctttgtttcaatatctgtcgaacttgctaacataactaataatctcttacatcctctccagactttttcgccgaccatgtctctggagccgatattgtcctgatagacacttactcattcaacgtgaacctcaccttctcttccacatggcatactccatgcaacgagacgtatggatgttgtgggtgtgacaactgctattatggaggcgcgcgagatgtcagcgagcgcctggatcaaatgaacaagtttagaacatggttaggatgggagagaaggatcacgttttggggcgtcccccaagcttttggagggagtgaatactggttagtgtgtaatctgatattttatcattgtgcttcgttctgactagacagagatgtgtatctatcgggcgggcaaccgatacaactacaggacatccgagccgactactcaagagcttcttcttagttctatcttgggtcttatccacggaaccaaggggatcatcccttgggtggctcccacctccgattctctcacctcggcattttccactttatcaaaccatatcaccaacactttgtctcgtgttattctctccccggaacatgttgattctcccatagatacttcgttggctcatcggacatccatcttgctggctggtcaaacgagaacgagactatcgtcttgttggcccatctcgggaacaagatggaacacgtggaagtcttcgtgaatgagaaggctatgagagggcataataacaaggaatgggggatcagggatgtatttgatgcgaagagtgatgtacgactgatcaggggagagaaacacgacgggggtgctctcaggctcaagggggtgttgcaaggcggtgggatcgctgcttggatagtctctcaaagttgattctatcattttcgtagcttgttgaaaagtgatatagtgatctgtaacagtacatccaatgttgtcttctatgtttgtcaatctgcttggagaactcttcgaagcgcaaaggacgaaattcctaaaggcacgctgcggtaatgacgagtcgggacaactcttcataattctcatctcatctcatctcatctcatctcactttccatctcttgaagaccaacaatccttatcccgtagcttgcactcgtcacaaccaactcaaacatatttgtataaacataccgagtatgtccgttccagcttcttcgacgcccaaatgggtccctatcgagagcaatcccgacgtcttcaccgcatacgctcaaagtctttcattccctaccgaggcataccggttctacgatatcttcggtctcgatcctgacctactctcgatggttcctcagcctgttaaagccgtgctcctcctcttcccaaccggtaaagaacaggatgggaagagtgagagactggaggccgaaggcaaggtttggccggcaggaaaggaagaatctgagagaccaggtggagtgctttggattcctcagacggtaagtcaggttgactcttgtcatttctagttatacaatgttattatcctaaacgaacagcgatatattcatttataatgatagattgggaacgcatgtggaaccatgggtctcctacatggtctagccaacgctggggtagacttacctagagactcccctctgggtgcattcttcgccctgtccagaagtaaattcatccttttacaagtacatctcaagaccaaatatcgtatactcacgtctccttcttccactttcctctgaagcgcttcctccaaccgaaagaacagccttgttggcatcgtccacgcttctcgaacgagcgcactctgtggcatcaggaaccgggcaaacgatcctccgagaagaggacaacgacaccaaccttcattttacctgtttcgttcaagctagagcgttcgttccctgttacctgagcacttcatcttgaaagataattctaatcttgatagttgtttgcgcgcataatgcgatttcttccttgtgaacgcgcagtcaagacggacgtgctcacctcattgaattggacggaagacgtaaaggaccaattgaccatggagtatccaccgacctgctaaccgtacgtcttacttgcctacattccgtgaaaccattctcctcctcttctcagcatcttacttaaggctaaccttgttcgagttcgaaacatctctcaggattcagccaaacttgttgagacgtttttcatgtctacctatcccgattcaaacacgtactcattgatggccttgggacctgcctctgacgacttttaatctcagtcttgactgtaattgtgtgaaccctctacccactgcaactaactagttcgaagagaaacttgaaattttgtccggatatatcataggctattttgtaatgattggtacaaattgaatcatccaatagctgaaattgtatgatgcgttaagagagaagagagtgtgcctgtagagctacagatagaaacctgcttgtacatgaatggatctggtgacgggaaagagatcggatatagaagaagacggagaaaaatagtatctaaggcgagaagaaagaagaaagagatctagatctaaattcaggccataaaatccatcaagttctgcacaaaggtatcaaccttgtccttatcctgccttgccatctccaccagattcaacagctttttgattccgacgtttaactttcctgcctgattaaagccggcctgtgccaacaactccaagcattgtctgtgttcctgctcagaagtgaagagttcaacctctcgaaggaccttgtcgagtgcctggagagagtcaatggcaggaacccggatctgggcatcaaacacatcagaaagctccatctcagagagcatcggtcggttggaagttgtgcagatcaccaggagtcggttcccctatgtcgacaaagcacacgccaaaagatacataccagatcagattatataggcagaagttagaatgaagaagagacgaaccttgggaggtcttttggcaatgaggaccaacagcgcttggagcacgctgttagagaatcgaggacccaaaggaacccagtctttttattcgaagattgatcaaagagagacagaaagagaaacgaggtcaacagaaggtaggccaagacgaagagtagtgaccggatcaaacggttcagcctatacttacccaatatcctctcgatgttatccaccacaactacgctcaacggactcttgtagctgtccatgaagatcttgttcagatgagcaatcttttgctgctcgccaaacccaaccatgtcctcaggagaaaccaatttaatgaacgggaagtcagacgccatcgcaattgtagccgccagcgctgtctttccggacgaggcaggacctaaagaggattgaagcgatcaagcgacgcagaatcactcagaagaactcagtggatgaaaagacttcaggcaaagaaacggaaaaggagagcttaccatgtacgagcacactaacaagcggagttcgctgactctttcgaacctgctcaacataaagatttccatctcgtaagatagtctgagaatccgtttcgagacagaacagcataactctggattagcctcctgagtgacaatcgagaggtagatatttagccacttacatcgaccttcttgttaaagtggatgattccgttctgaacgacctgttgaagttctgcttcggaaactccgaatgcagcatggacttcatctaacgcatgcgtgaagtctcctcgcatgacctgcatcgtatcaagatcgttagagattcctgcctgcgttccgacctgaagaatattgaaatatagattccgattccaagaaagagagaacccccagcatatcaatatcaagcaaatccagatgaacggtgaatactggctctggtacgctttttacaaagacgaaccttgatatgtctgttcattgcgaaactggtcgcgctcttgatcaaacctcccaactctgctccactaaagttctttgtcaatcgggcaagttcttctatgtcaacgtcctcacccagaaccttgttgatcttcattttacttgtgtggattctcaggatttggagtcggccgtgctcatccggaagagaaatttccatgtggacctcgagtcgaccgggtcgaaggagagcctcgtcaatcatatctagtcgattggtcattccgataatcaaaatattgttgagctggtccactccatccatctagaattgatgcataccatgtattagataatgagaattcgtttagaatgaaacttgactagatcacttggacaagacgagttacgaaaaatgatcgagacataccttggagagcaactggttgacgactgaatctccgacacctgttcctccaccagtagaacctctctgcttgcagatggcatccagctcatcaaagatgatgatgtgtagaccggattcgtctcccttctccttgtactatgttccccaaccaacagaacgaattaagaaatgaaagatcgtgttttcggaaagcgaaaacgattaatatctgtctaaagaaatctcacgaaaactcaggagatgaatctacgtacctccttctcggcatcagcgaacaattttcggatgttctcttcactttgtcctacgaatttgttaaggatctctggtccgttaacaatcttgggctcccttgcgttaagcatctttccgatctgacgagccatcaacgtctttcccgttccgggaggaccaaatagcaacagacctgtttgcaggagaagaggagaaggacattgaattagcaggaagtgaatgcaaaagtttactgcaaggaaaaaagcgatagatcacctttgacatgctgaattccaagtttctcgaccagtgaaggggggaagatacgggaggcaaatgctcgtcgaaagattgcgctgaactcagtatctaaacctccaattcccatgtcttcaaatttgaagttgggttgcaagatggcgttgggcgcgggtcttcggggtggaagcgatttgattaggaagacaagctaggggtcagcaaaaaagaacagttgacaagatggcagctcttggctatctagagaagataaatatactttttaccactcgctttgatcttgatcttgcttccctcgtcctttcgaacaattacatctgtctgagcagtaagaataccaatcgtagcctgggcgcctgctcctgtcccatcaactgaaagatccacgactgacagcgcacggacaaaggccttaagtggcctgcccttgaaatcaaatacgatgggctgcatcgaagagagagggatgccagagtagagctacgagatattcaagccaccagacgttggatgtggtgtcaatatgtgcgctccagaggaaagtctaaatgcacaacttacctggacgacatgagcagagatatcgtccgcactgaaagtttcatggtcctctgtagttcgggaaaagaatcccacctaacacgaacaaggattttgtcagcctcgagcactcatcaagggtatagcgagcaggagaacagaaatatgtcgccatccgtgggaaatagaaccaacatcaagttctacgctgccaagccagtctccttgaccgcctagctctacaggctctacatcaatctcctcgccgatagaagttcctagccattgtctctgaatattcgacgcccatactgagcctgagggcacgttaggatccattctgtagagatgacaaaggtttcatagtagtatacgtcggtttattcagaagtgattgtcagtcagtatatggtttcttgaactaaaaggtaggaggtttttgaagataaaacaaacagaaggtagacgttcaacatacctcgtactcaggtagaactgtctcttgactctgacgtattgatggtttcctagatctctttcattaacgaccaaacaatttgagagtgccgttgcttctgttcccttctccaaccggtaccttcccttcccacctccaaccagacctctttgcttttcgtctgagtaaccaccgcctccggttccacctccaccataagatccatacgcgccctgagaagcggacgggccacggtagtgaccagagtcataagcggacggcggctgctgatactgatctctacgaggaggcgtaggaggtgctgatggctgggacgatcgagagaagaaggacattgtgtagttgattgtagagaaaggaaagacagtgagcagctattgggggggagagatgggagtggttgctctatgttgtgtggcgtatcgatataaaggctgtgtttattttgccgtgtcttgcatggtaatatcttatcgctcaagcggtcacaccttttcgcgcctgctagccttcatcatcagtccgagccctccgaggattcatgtgtttctcaacagatacttacacaaacacctttctcttgtcccactcacacacacatatatatagactcccgctacttctcagatagatatccctacacagcatgagttttagacttccaagatcactctcgatctgctcttcgatgtttccctcggctgcccgcgcacgccttcctccaactcactacactcgatcgttcttcagccttcctgatctctctccactattgggaaacaagtctccatcggatccgaatcaagagcagcattatcgtgaagagaaagtttttccgttgagttcctgtctcttgtgttgttctttttttactcagcctcaggactcgttagctcggtacaacgactgaacttgacccctcccgtctgctcctgtgtcttcttactgcttaccttctacctaaagctacactcccgaacagctctacacggtcgtcgctcatattccatcctacaaatccttcattcctttttgcacgtcctctcggatcgtgtctggctcgccaggtctgggagacgaaccatttgagatcgaggccgagctcaaagttggcttcatggggttcgaagaagggtatgttagtaaggtcaaaggaatccccttcgagagtgtacaggtttgtccccttctttcttatcctttttctacaacaaagcatcctaaactggttatgtttctctctttctctcccttccctctgattttgggtggagtgtaggcaatagcttcggaaactccgctctttaaaactcttgtgacgacttgtgagttttttctcttattcttctgtctccttcttctggtcttccttcaacctcgatctgaactgtctctcttccttctgatgcttgattctcgaatcttcaacaagggacattccatcctcctgctcgtcttgcgcatcaacgagcttctacctcgactctaccgtcttcccagatgagtccgacgatggtgacgttggatcttcgatactcattcaacaatccatcccatgctacggcttccagcatgtttttcggtggcgtgagtgagatgatggtgaacgcgtttgagaaacggtgtagagatctgtatggacctcgatgaggcttcttgaaagcttccttgttctttgtcttaatcttgctttcgtctgttaccctgtgattccttccgagttgatcggctatcaagaggtgcacatttcgcttactcgattttactggaatagtttggatggtatccagagcagatgaaaagagagaggatatcacaaagtgattcaaaaaaggggagatcacaaaccccaaagtggcgacatacaaaacaagaaactagataatgaagaagataggcaaggaaaaagaaaaagaaaggaaagagacacctctgtttgtttctaatggagcgaagcagaacaaaaaaagaacatcgaggctcatagacctaaagggtgatgttatcgttggtggtggaagaagaatgagaggactcgaaaacactctagtagcccttagctcccggcgcgctctctccctgccttcgaagcttcaacagcacctccttcatccgggccagatcggatcctcccggtgtggactttgccaaggttttcgattctacaggtccataagagaaagatcaacaaatcagctctcttcaagagaacaagaaaggaagaagaggaagaaaaacgcacgagagttctccaaagcgatcatgtcggtgatacgctcccatgtcgtaccctgagagagccgatccgacaagtcggccaagaaagcagcttcgttctccctggttgatagaaagaaagaaagaaagaaagaaagcgaaacatatggaaggataaaacgataagtgagaaaggacgattctaatatagcttcatcttgaatgaaacaagagttggcttctcacttgttctccttgatggccttttctttagaggcgttgtattcttcgtagaactgatcaattgccttttccgctttcaacacggtctcttctctcttttttctgctggcctcatctcggcgcttgatgtcctcctgctgttttgccttccacgcgataagcgcctcggattcaacatcctccgttggcgtacttgactgctgggcgttgcccgggacagaaagagatccagccggctgaggaatcgaagcagagtaaggcgagtcaccatactggtagttctggcctacaacaggggccggctagtgagagaagaaatggtgggaccacaaatgatgttcagctcagagattgtccagtcagtttcagaaagagccattggaaccgacctgaagctcggcagggaggagctcttgcacatctggaaactcgttctggaacttttccatttcttcatcctcgtgagcaccggtgatgttgacgtcgaatccggtcttttgaggggtgagcgaatcgagagaagggaacccaggagcaagagacgatgaagttggttcggggagaggaggaggggtggaggttccgtctatcgtatatgattgaacggcatgattcggaaagaatggattatatggttgcaataaagattaggataagagtttgggacatgttggcgacatcagcagggagatgggtcgtttgatgaaaccgaatagcccgatgaagatagagttagagtcagacagaccgtcaggatcatgaacacagaaactgaataaagaagtgagaaggaggaaaccgtacctcctagatccgggaagtcagtcgttggaagatcgaacgagcccgaggttggcacgtcgtttgatgaaaacaagccggcatcgtttcctgatggaggtcgaaagaataatgagatttttggttgccgggtaggatttgaacaggtattggcgcaaatttaatatttgattgttgaacgacgcgtgaaatcgtgtgcatggacaggagcgagaaagagattgaaggaaagaggaggtaaaaggacgagagaaggtaaaagaaagatggttagagatgcgaaagaaagagatcgaatggaggatggacgtaccgagagcggctcgttctctagccaagaaatcgtcggtggagaactcgtccatggtgttgtttctattaagctttcttgttcttttttagataggagagaggaaatgagctagacagctgagtgaatgaggtggatgtacagaaagagctgactctggacttttggattctatccggtacacaaacagcaggatatctttgggacgcaaggctggacggctcccgccagtaggtggttacagtaggtggccacgcttgtcctgttcattaggtaagcgagatcgccccaacttggggactccttgggtccaatttggggttcaaattctaaccctaacaatgccaaaccgtcctaaggaacgctagttaatcatcattaatctttctggtagaatctcggatggccggaggaagggattgaggtgtgtgtgtgcacatctctgagtgcatctctatgccaccatgtgtcggcgtctctagctgcttgcgcttccgatcttcatgatcttgttctcattcctcatattgtaatcaaatctgattgtgtttttctaatacacagagcccatccgtctcgtctcccttgaaaatctctgctgactatgccatcgtatgatatatcagtcagaccatgtttacctgcgggacaatgttcatcaggatggtataaacatggggtaaggaagcacgggaacgtatcagttaagaaggattaacatccctaacttggattgagactgcacatagaaccaaggacaaaggtaaccggcaacgtcacttgtttgatagatgaattattcatatgaaaatcaaaatcgtcaatcacagacttagatagccaagtttaggttcagtttctaacccagggggctcgtgcggctcgcaggcatttttttcctggccattttttgtcgttggtctcttctattcttccctcacatccaacattcttgtgagtttctttctctcgatcacataccctgtcttgctctttttctctatcatggcgaaaaggctaaagtctttacgtgtgcaatcctgatgcttagcccttttttccctctaaaaacaccgcggaagaagactaagaacaatgtgtatgtcgctctcttctggattcaaaagagatgaaccaaaaattctgacctgaaccttttttgttctctttgcctttttaataacagctgacgctggatctgaacccattgataccgtcgaggaggtcgaggtcgctgaggccgaggctcccaagtctggagctctctccgttgaggaggccctccaggaggtcctcaaggttcgttgacctttttcttcctgtgcatacagccttccttcttactaactgcccaattctatcgaccaaacacaaacagaacgccctcgttcacgacggactcgcccgaggcctccgagagtgtgctaaggccctcgataagggagtcgcccacctttgcgttctcgtcgagacctgcactgaggccgagtacatcaagctcattgaggccctttgcaacgagcacaaggtcaacctcatcaaggtcaccgaccccaaggttctcggaacctgggccggacttgccaagatcgaccgagagggtaacccccgaaaggtcgtcggatgctcttgcgtcgtcgtcaaggattacggacaggagtcccagggtctccaggtcctccttgactacttcaagtcccgataagtttttcacaatgcttctgggctttaacatcaactctttactttcaaggttagtttttctacgtatacgaaaaagcaatcctgctcttcaccttcaacacactccaccccttcccccttcccattctataaaaatttcaatgatgaagtacggtactccctcttccgaaagggcgcaagcccccgacgacattccgacaggaatcgaactcggtggaaacaccaatatctgtcacgtctgagctctccaatttctacagtcctttcctcagccaacgaaatatttatcttgtgtttatgtaactaacctggttcgttggcactgctgctcctgttttagattactttggatttacagagtcgcttcgttttgggttggaagataaatgaaaaaattatttggtcctgactgtcttctcagtgtacaaactataacgctcgcaagaccaaataaaaaaaaactcgctgaaagatcaatgaaaactagagattatacaaaacatttatatatagtgaatgcctgtcaaagtatagactcgcttaggtcatttctacctcgaattatctttttcttgatcatttgctgcttccaaagctcaacatcagtcccttcctctccctctccatctcggccccaccttccgcatcgtcatcctcactatcattctcactatcactatccccatcggcaagcccatcgagcttgctatgcactttgtcaaactcactcaatgagctcgtcctccgcctgatacctccatcacttccagataggtcgttcatcccttcactgaccatcccggctgtcgttctgatcgatgttgaccctgctaaagagccggaggtagcttgacctactcccgagtggacgttggcattgccgttggtactactctgaatggtagggggcgaagctgtcgatctggatcggatggagtcttctggggtggagctggtagggatttgggtgtaacctgatccttgtggatgcgaagaaccggtttcgcctgatggcgaggaatctcggtgaggatgatggtggtggtggtggtgatggtgagaagaggactcgttgtacttgagaatagtatcaatgatagtgaactgaacgacattcatgatgagcgggaagatcgccatcacaaacacgacttggccgtgtggatcaagcctgtttttgaaggggaagaagaaggaggaaaagacgtaaggttaaaacgtatataaaaaggagattctatatcatctgataaagacaaacatcacataccagctcaagatcctaagagtgaagaagcatcaagtctaagaattcagtattgggccttatcttcacttggaaaaaaaaagggcgcatttatcaggataaaaaaaccaaagagaagagtttacgaaccaagatccgaatccaaatatcccaggccagatcgagaaaatgatgacaactacacctttcattcctagtagacagctcacgtagacgaaacattgctttgcctgattcaagcccaagatgatttttattccacgaatagccttagacgtcagctcgagtgtgggatagcgagaggagcagatcttctagacatacccagaatgaatacctaacatccccgtcccgtaatcggtaaatccccatctcccagccgacacctcctagtgtgtcgactaggatccatcttgataatctcagaagaacccagatgatgaagattccaagggtcgtatcgatcaagacttttacaatgtaaataatcccatccggttgatacgcaaaaaaaatgtcagtgacctgatgagcttgattccgagggaagaacagtccaagcttcaccattgaggaagtacaaagagcatggattcggacgatcgaaagaagacttgactgtttcatcgaaggcagtcggcgaaggcgagggaaaggtcgatatgaggatactggattaaggttagataaaggtagtggttagggttaacagtcagagcaatcaagtgctaacagaacaagagagagcatactttgatagatggactatagcctaaccgaagagagagcagagacaaatgagagagtgcagatatcggtctacctgggttctgaagaaaagaggaaaggagaaaaagagagagtcatacgaacctggccaataaattgttctgatcgccattggttcaaggcaaagttgagccggcagacatcagcttttgcgatcggactcgacaatatgatagataccactcacttgatgtatccagtgtcctgataaaacagcccgcaagtaaaagttcagtttacagtcaaggagcgatcaagcctacacacgcgcgcgcgcgccacggatgagagagagtgtgtatgtgtgtaagaaaaccgaccagatctgccatggtcgtttaggtttctcgagatctatggagagataaagagatgtactaatcaacaacatggtcttgacaagtcgaaaagaaggggaacatgcgcacatcgcttcacaaccagagtgaccaacactcccagacccatcaagcctgttgagcagagcgaaagggggcggtgttagctagcttgctggctcgatggcgaaagcagataggatgaacccgccttgaacaatcaatcctgtttgacctctaacaaattgaaccgacagcatgaacgatgatgagagaaggtcaaacccatccaagtacataacaaaaaacactcacaagagatggcagttgttgttctcggttggcaaggagaggatcgagcttgttccagagtacagtgcagaggagggcgaaggagagctggcagagaccgaagaactcattatcggtgaagggatataaggaggagccatatctaggaatatacaacaggccgtccgatatcgacctagataaacaaccgaaacaaagagatagatagagagaaagcgaaaggatgatagccaacgatcagaactaggtcaacccaaccttgctctcggtctctctctctcactcaaggttggatggtgaacacgcgtttaatagatttttgaataatttacttacgtctacttacctctcctcacgagacacacacttgccatccagtcggttcttgttgacgaatctttgacctccatcttgtacatcatcttcttcgtctctctccttgcgttgctcttctgccactctcggatccacaggactgattttagtagcaaggaatacttggataagttgtttctctgactgtgtccgtcgaagaatatcgttggaatatcgatcaagatcagcatcgctcttctcgcgatcctatccctatctctactctgcccttcacctactcaaaccattcatcatcatttccgcctctagcagtccatcacgtccctcttcgaatgaggccctcacagaggtagacctatctgaatcaaacaatcatacatcaaccgacaaaccatcccttgaatccacgtcaacctcagtcgatcctagtaggtcgacaccagacacaaagcatctcgaatcccaaccacagcgcgtcaaaaagccaagatcttctcgaccaccttcttccacttcttcccctctctttgcagcgatcgccggtgaggattctgatctctccggtctagatccaaatctgctcggctcggatcctcagcggacggtctccaagaatccggctgacggaactcgtacagagaacgccaatccttcttcttcaggcgactcttcttcagaagaccacgagatgtatcccctctcttctacaacctccctctccgctctctccacagccacgtcatcttccgatagtaccatagcagctggagagtcccctctcggtcttcccactcagatcaccacaaccggtcagttgaaaaaggtcaaagtatacgaacttcggaatgatgcgtggttcgatcgagggaccggtcacgtccatgggttatacgacgaagggaccgatcaggcgttgttagtcgtcactgccgaggaagtgctagatgagacagtgagagtccggatggcaaaggagaaagaggaagccaagctggcaaagaaggaagaggtcgctgctaccgccgcttctgtcggtggaaacgcagattcagctcaagagggtgagccaggcggcttcgtggtcgaaggagacgagacagaggattcagacgacgtgtggggagatcctgtcgcgctcaagtcactacggatgaaaggagtagagggtagattgatcatgcacacctttatccaggggagagacgcgtactccagacagcaaggtgagctgctgttatcgtctgacgtgtcttgactgacgagttcgtgtctcaaccctgtcgtttgccttgcttatccaccggaccgacccaacagatactctcatatgctggacggaggctgatgggatggatatcgctatgtcttttgccgatccggatgactgcgagaatgtgtgggagtttatccaagatgtagtcaagatgcttgattgtagtaagtaccaagtttcttgtgttgggacaagaacaaataataagtgtgtccgtcgatattaacacgcgtaactaggtatggatgaggaagatgtctttaataacccaccctcagacgatatctcgtttgcatttggctccatgtcgcctatcggaactggaatgggtcagagtagaggatcgttcagagccagtctaataaagccgactattggacatttgaagtaggagtcttttctatcatgtgttttagggaggtttcaagaaataaactaaaacaagcctcattttcccacttcgtttccatctgttatacagggatgcttcagaccaagttaagatcatgtcaaaaagctccgcaggcagagacaccattgtagaagccgttctgaaagaggtaaactctcgtttccctcctcagaagacacaagacgcgtatgaatgcctattaacgcatcaacctaaatcctttctcttcctgtacctcgaccttgtccctctcaggattatctcaaaacaatgatcgagactttcgagcaatctgaagatctcgaggtcttggaggatctgcacatgctgtttacattgatgcagacaattcgtgagtactccagtcaagaaatgagctggcttgaaatctgtggaacactgataggctcttcggaccctttccttcctggattgatagtgtacatcaacgatactagtgtggtagaattaatacttgaagaagacatgtttcctggtgtagtcgggctcctagagtgtgagtttggatcttatgatgcggcaaactcggacaagttgatattgactggttatattcgttgtgtatggtcctgaaactagatgatcctgagtttccaactctcaaggcgtcatatcgagatttcttggcggccacatccaaattccgagaacctgttgccatcaaaaacgaaggcgttcacatcaagatccatcaaacttaccgccttctcttccttaaagacgtcgtcctcgctaggtcactcgaggattcgacgttcaacatgctcaactcattcatattcttcaaccaaaacgatatcgtccaacacatgcagagcaacgataacttgctccaagagatcttcatgccattcgtcggcaaaaccaaagctcagagtataagtacacctgccgataggaaggtgatggaattccgatcggaaggcgatgagatcgtgcccgggctagagccctcgcctgcaggatcgccaacaccaccggaagcgccggacgtccgaacgcataagcgcgagattgttcttctccttcatcagctgttgctcatgtcgaaaaacattccgctaccggctcggacgcagttagtgagaacattgcttgacagaggcctcgtccccgtcctagaatgggcgttctcttttggatcttcagccagtcggcctcagacgaaatcggatatagaatcgaacaagaccacaagttctccttcaccttctgcttctagcttgcccgaagatttagattcagttccgaacgcggcaatcgaaatgttgactcattgtctagatcacgatcctggctcagtccggaatatcattctcaaagaggcagataagttcgaaagaggcgaagcacagacaaccctggtacttgagatcatcaagctcttgttagggaaagatggggcccaaataccgaagggaggcttgagaagtcagctggcagatggactgaggcaacttttagatactggagagtcggatacaggctcggtgagtttgttgtccattccttgttctcggtaacgtgtctcaagcgttctaactctctcttctcgttgtaacttctcttttggttgtcactagatgacaagcagagggcctgtaaaagatggccctgtggcggaggctttcctgacatacttttatgagagctgtgtagagtccttaatgcagcctctatcctcgctaccagattttgaaacactcaaaagtgagttggtgtttcttcttcgaagaaaatctggtttgcatttgttgagaactaactgtctataagtgcttatctctaactatacctgtgtcttcaatagagtcatcattggtcttgacgacagaagagacaccactgttacttcacctgtgtgacctgctgtcattcatggtggagaaccacggacatagaagccaatacttcattctttccggaacgatgaacttcaaagtgggctgcttactgagtgctagagataagcctttacgacatggtaagttaatcctattttcgttcctctgcttcataccgtttcatgtttcattcgagtgagtgttaatcgtctttccacttttattttctctgtcctgtctcagctgcgatcaggttcttccgcgcttgtctaaaggtccacacacatttcatgtatcgatatctcaacaaaggggatgtatttgcacccgtgttggagctatcagcattagagtctccgcgagacaacatgttgagctcggcctgcttagaactgtttgagtacatacgtaaagtaagactatcttctacctatcgaaagcctctcaaagactattgtcccagataattaacgatggcttgtttggtatatactaggaaaatatcaaggtcatccttgatcacttgatgagccgacatggagatagaattcgacttttgtcgtcaagaagggtgttgaggggttgcttcgaaggtttgatacaaaaatgggaagccaataatgagcccccgcctgttttgttggattcacgttcagctcccgaggaatcaaagtacgtcttcaacatgtttctcacatgtctgtttcttgagtcacattcatgtcttcctgtcattcaagctaatatctgcgttcttcttctgaatcaccagacgacgcaccgatcgagaagaggaagactacttccgagaatctgatgaagaaagcggaccctcttcgacttcccctggtctaccagcctctcccttaacccgatcactgtcttcgctagcacctaaacgaaagcgtcaacgcgtccatacaaccgagtcgcaaccgtctatcacattcactcctgcatcatctgaagacacctcagcatctgactcggcctcgaattcttcttcctcatcaactacatcaaaagggaaaggtctcgatcttggatacggcgacgatgattctgatgaagaagtaatcggtcctctggaaccaagggatgcctcgtcttcaacacctcagctagactctccggagaagattgaaggcgttactctgcgaatgagtgagaaacgacggagagaagaggaggaggatgatgggttggacggcttgggcgggcttctagctgggaatgtttcgggtagtaagggtcacaagcgggttggaggaatttcttctatgaagggagagagctcggctgtgacggccaaaaagccaagggatgggaaggagccgacaggggtctcggggtcaagatctgatttggtagaatcgacaatgccagcctcgacaacggctggttcacttgctaaagaggccagtaaggcttcgaacaagctccggttcagtctgaagagttttaaatttggaggggcgggaggagggaagtaggacaattattttaacagggttcatttgaccatcttcttgctcacggagttctttttctctttccctctttttcctataaactgtttatatctacatagttcgctcttccatcgcatgttacctgcattctgtgttcatctgtttgagagaattgtacattatgataatgcggtgatgtctccatagttagtgacgtgttacacagaatatcacaagcaaagaccaaaaataataatacaatattcatctggccgttgacgtttcgcgcgtagccgaccgaatgtcaattttatcaccttacctttctctccctccgtcgtcgacacgccataacctattcatcatcctaacacgttgggcttccggtgctcgttctacgtccaatctgtctcatcttcctttttccctccatagataggaaagttagttgagtgaacttatcccgattcgccatttactccttcgctggctgctcccttggttctcgcctcccccttcccttccttcattgccaatactcctagactcaatggctaccagcgtgtcttcctctcaacatgtaccaagcgtactcttacttggaggtcagtctaacggtacgatagagaacaatggagcactaaaagctctgttggcagagcctgtcgagttcagagagttcgctcaacctacaggagcggatgctgctatcattgaccctaagggaaaaggttggattgaggtgaaccctttgcctgttgcaaacagtgtatgtcgtttgcttcggactctctatcagtaatttggtttccaagcttaagtagccatcagtagagaggctcaactgaaagtgtgttcgacgatgttatgtctcgacggtcaacgtcttatagtccaatggaaacgcaaccgcttctacctctaagttaccttctctcccttccacctcttcggttactcgaccgcataatcctaaatctctctaccagggaatcgtccagctcggattcgttcccggaagcagacctattggccctgggttcaacaatgttgggaatacgtgctatctaaactccgttcttcaatgcgtcatccacacgcctgggttgggaccattgttgtttgaacacgagcctgcacaatgtacgtttgttgactgtcgcaatttctcttctgtagcatacgtatgcccgaatagagtatgccctatattgagcatcagatagtgccagagtcgcagcgaagctaaactgttgaacattttcttccttccctgtgtccatggctactgttcggtatgcaggcccagttaagaggaacccaaagagtgacggattttgtgtagcctgttcgctcaaggccgtgtatcagtactctttccttcgaccaaaccaaggatcgtataacccgtctgtgattacgaagaacttgaaaagtgagcgattccttctcaggttccagggtttacttgctaaagaagagtgcatcgctctagtctcctggttcgaagagggtttccatgatgctaacgtgtcaactcatcactgctcttatccattttgaattctctttcctccaattcaaagaaatcgcccgacatcttcgattgggaaggcaagaagactcgcacgagtttcttcgtttcttggtcgacggtcttcagaacgctgctcttgctccgcatggagaaccaaagtaagctaaatgttggctgtcagtcattagctccctctttctaaactatataacgttttcgactcgcagtaaaatcccggcggagctgaagtacacgacgtccgttcaccagctatttggtggtcgactccggtccagagtgacgtgccacaaatgccatcacaattcggatacgttcgacgcgttcttggatctgagtgtggaggtaaagaactgtgggagcgtacgaaacgcatttgaacgatttatcaagccagatcgattagacggaaacaacaagtacaaatgcgaaaagtttgtccggtcccgcgctatatcttctcttgtattcttcagaccaagtgtcaacaaacgatggtgtctgattggtttgtggctcgtgtctgttcttgctctgtccgaccgataggtgcaagactttagtggttgccagcaaacagttgacgattcagtctactccgaaagcgttggtcgtgcacctcaagcgatttaccccaatgggaggcaagattggagagatgatccagtatgataaatcgttggaccttggtccatatatgagcaaaggagaagttcgtatcatcttccgtctagttcgctttgtctgaactggtttcccgttcaatttgctgacttaggcttattattcttagtctggtgcacgttacaaactgtacggagtagtgtgccattctgggtccggtcctcactctggtcactacactgcccgagtgttgtcgaccgatggatcttcttggcacaacatggacgactcgtatgtgagctctatcggaaaaccaccgcttggtcttcgagacgcatacgtgttgttctacgttcgagagaagggggacgctctgctccagacgattaattcaacttcagccggcggtcccagtaaaaagaggaaggtcgagctcggtcagcgagcattggagaaggaagataccgaaaagtcaatagagaaagatagttctgatgaggatgaggatgaggatcagagtgatggaagcgaagaggtcccgaagcctatctctgcgtctccgaagatcaacggggttttgataaacggaaacggaaatggccacggacaaggcaagaaacacaaccgacattcctcggactctggctcttttcctgcctctgctcgaccttctttcgttggaggaccaaatgaaaacggtcacccagtacgtggaaaaaaacatagaaaaggccatctaaaggacccatatgggctttcccggggagggaaaggatttgctgtacagatgggcggcaagaagttatcaaaagggctgaagggaaagaagtgatataatacatgcttttgtgcccttgtgcttttttctgcttgttcttctctcctccatttttagaccggcagatcatcgttgctgcctacgatcatcaatgctacaagccttcatggtgactggagcagaaagagtctctgatggcgaaagattctggctcgtcatttctactgtgcaccggacaaatccgccaggcgataaaaacatatacacgcggataattctttccacgttgacgaaaactacatcgaaccttatctagtagcacatccgtaccttgtttaaatctccatcttgtcttggttctcatctccaatatcattctcatccccaacaatcgaaacttaggttatctttaccatggcagagatggatcctgccttggtttcttctgattcatccccgatactgtctgacgagttcaggtcgatctacgttcacctcattccctcagtcatcgtgctattcgtcgtgcctttactgctgtcgtttccccgaatacttcctcgattcgcttatcattacctcatcactctgccgcttgaatatgtcggtcgagacctgactctccaagaactttacccggatcagcctaacaaacgaggagttcccatctggaaggctgctattctcgctactggaggccttgcctttgccctcgtttatggatgccgagctggatggaaagccttgagtggccttgatggaggggccttctgggtagatatcgtgctggggtgctgctgggtaagtctagctcaacatgaatttgtgattgtcgagttcgctcaggacagtgccggactgtttcgtctggcttcagtcgctccttctctccttattggctggactgaaagcccagaagactgatcttctctcgttctcgtcgccttcatctctgggtttccatactattcaatcttagctatatgctgcgacttatcctattcttcgacctagaccgactccttacccgacaatcgtcgtcttccatgctctccagctcatcgcgtcgttcgtggtcttctcttctgtgggtgtgtctaggagaccacatcaatgaatgttgatcacttgcctctctttcgacatcctagcttgctcactctgctaacggcgctcttcaaactatcaatacttccacccgtacctcacgagccggtgattgctcggtcgacggagatcttgacagctctatcggcgacgctatcggctgtgctcgtcgcagtatcgctctctcttccagtagaatcagtgccggcatcgtacgaggaagagcgaaaagcagaggccaaccaaacgggtggaatggggagcagtccagaggacgggtgcagtgtatgggactggatcacgttcaattgggtcaagcctttgatcaagcgaggtacgttttcttacatagcgcatatactttcacctatttctctcgcatacaattttgacctgggaccgtctttgaaatgcaggctcgtctggatatctgaaagatgacgatgtttacatgctatctcctactcagcgatctcaacctctgtatgccaagttcaagacgattcgtggatccagcctgttgcagcggcttttgaaggcgcacggattcgatctcttgctagatcttttattaacgttcctgtcaatcatgctcaactagtgagtctggtctctggtttgcgttattgtttcttcgaacttcgccttgtcgagggtgctatcgtccggtcctgaatgcaatattccgttgatctacattcactcttaaagcgcggcaccgttcttcatcaagcgaatcatcgaggcgctcgcggctccaacccctaaaaagctttcttcagcatacgtgtacgccactctggcattgatagccaccatccttaaagctcagtcagacttgaaccatctctggttctcgaggagggcgtcggtcaggataaaaaaccagctagctagtgcaatctatgaaaaggtttgttatcacatatctctctatcatactctttgttccgtatgcctaaaaccctcaatgctctgttctatcgatattaataacgtcacattggacaggctctgaaacgaaaagacaaatctggtgtctctgagagcaaggggtcggctggaactggaaagatcgtcaatctcatgtctggagacacgaacaggtatgtttacctcgcgcattctcgcttctcttcctacctctgacctgagtgcttctttatcgtcgtgcgcttctcatcgaagaattgggaatgctatttccggactttatatgctttacggaggttagttaataacttctacttttcagaggaactctagtctaatagcttgaatgcttgcattcttctcacccagcacctttcgagatcgtcgtatgctgtgctttcttgtataggttcgttagtatttacaactatctccttgatctttacaaattaatcactgatgttttcaatataatctgtcgcttagtatgctctcctggtccgcctttgccggaatgttcgttttggtagcagtcatgcctttaaacacgataatttccaagaggaacgtcgaggttagtcctctctgctttgttgttctcttcttaagaagcttagggatattcaaaacaagaactctaataacaatgttgatatggaatagattaacaaagcacttcttgcggctagagataagcgactgaatgtaatgaagtacgtgctttgtttctctttcctcttcgttcaacctaagctttgacttactatcgccttgtcatggttgtacatgaaaaccagtgagttgattggcgcaatcaagttcatcaagttctttgcttgggagaaacaatggaccaaacgggtgacggatattcgacaagaagagttgaatgtcatggtccgggatcgtgtaaattcaatctacttcactatcctctggaatgtcacacctatgctgtaagtcgttgtttgaatctagttggacaaaacttgagttgagtctgatcaattggctgattggatgatcgatcttgtttgtggtaaaccagggtcacgatcatctccttctgtaagcttgttttcctcatcttctctttcgttctatctggaacattctaaagagtgttgcaaagattcttaaattgggctttgtacgatccgatacagtgtcattcatcaaactcgagaagggtgaattaacgatcggagtcgcctttacttccctttctttgttctcgatgctccgtaagtgtcttccgcctcttgagtcttccatcgtcaataaagctgacaatatgtgaaaactgaatctcaacacaactttctcttgccgttatatgtaactaaaactacaagggggccctttgaatatgtatgtcacatttagtagcgtacgaaggagagacattgttgaaaattgagattgagtaatcgagcattgatgcctggtatcctttcttttgaattagtattcctatgtttgtggtttctctcctacagacgtaagtaaattcatttcctaatatgcttatgtatggaggatgcttccatttgctgaccaaaatttacattctgtatcgaatttagccatgttgcaatcaaacgttcgttctggcctgctcatttatgtctctagttcatcttgtgttgctgacgaattgtccaaatatacgacaggtatcgacgatttccttcaggaagaagaggtccccgattttgtgtcctctctgaagatggccgagaatccgaatttgcgggacccgaaggatgaaaagattggtttcattggaggcaccttccgatggactaccggtgataccactgtatctgatgcttccaagaccgctagtgccgcgcctgccaccgcttctgctgcctctacacctcctacatcggactcctccactgtagtagctactctcgagtcgaccgctgctgagaacgagctcgttcgattcgagctgacggatctgtcattcgtcttcccaaccgggcagcttaccgtcatcactggatcaacgggtgcgggcaagagtgcgctgttgtacgcactattgggtgagatggagatcatcaagggaaacgtacttcttccgaaggatactgcgaccgtcgacaagtacgggcttacaaactcagtcagctatgctggacaaacagcgtggctgcaaaatatgtcgattaaggacaacattctctttggctcaccgctggatgagaaacggtacgccgacgtcgtccaagcgtgctgcctagtacccgatctaaaaatgctagaggacggagacagtactgagattggagcaaaaggtgtcagtctctcaggtgggcagaaagctcgtgttgcactcgcacgtgctatctactctcgagccaagcatgtcctactcgatgatcctcttgccgccgtcgactcccatactgctgcctcgctggttactgactgtcttgcaggaccattgtgcgcaaaccgaacggtgatcatcgtgtctcaccatgtcgagctactacttccgatcgccaactcactggtccgcattgtcgatggtaggatcgaagctcaagggacaatcgatgagctccgggcagcaggacatcttgctgcaatcattgcgaccgagaagacggaagtgctagacgaggccgctgtcgtatccgacgccgagaccgcagagaagccaaccgatgcggctgaagtcgatgagaccactaataaaactgccgagccaaagaaggatgcgcggaaaatggttaaagatgaggaacgggaggtcggaaacgtgcagtggaagacctacaaggtttactttgaggctagctcctacaagatttgggcggtcaacatcgctctactcctggttgccgcaaacgcagccatcattgaaaggtggtggatcaaggaatggacgaacgcgtactctgattctcctaagcgacctcactccgaatttgtcgccagtcatcatgtttctgcggtcgatcatccatccgccttcagcaatggttatgaaatccatacatctcagtcttcattctacctaccggccggattgaatatgtctgcatcccaatcaattgcttacggagcgcttacggctttagctcggccgtcggccgacagccatccactctactatctaggcatctactcaatgattactctcgctactgcggcactctctgttctccaggcgactgtcggatactacggagcttatcgggcatcgaaaattctgcacaacgagatgctgaagagcgtagtacggtcgaccacccgatggtttgacacgaccccttccggaagaattgtcaatcgattctccagagatcaagagactatcgacactcagctagcccaatctctcagagttgttgccagttacagcttgagtttggttggagctctcttcttggttgcgagcattgtccctcccttccttcttccagccgctttcctctcttacgcatactggcgactcagtgtagcttacatccgttgtggtcgcgaccttcgaaggatggaagctacagcgcgatccccaatcttcagtggtttctccgagacacttgaaggtgtggtgactattcgagcgttttcaagtgagattcgattcatggaaggcctccaatcccagtttgacaagtcgcagtcgtgcttctacttcatctggatgctgaatcgatggctgctggttcgatttgactgcctgggtggattgtccgtctttgtgacttctctgctggctttgggaaggggagtctctggtggatggggtggaatggcgatcttgagctctcaaggatttgtgcaggctgtttactggctttgtcgtttctggagtcaactggagatggacctcaattctgttgaacgagtcgaggaatatcttcacctgcctcaggagtcccctgctgtcattgagagcaaccgacctcctgcatattggccgagccattcatccgagacgttgatccacgtggaagatcttgttatttcttatgctccggagctgccgtctgttattcatggtatctcatttgacatcaaaccaagagagaaggtaggtctgatcggccggacagggtctggaaaaccgacgctagggatgtcgctcttgagattctctgaacctacgagcggcaagatcgtgatcgatggtatcgacattgcctcgattggcctagaggacctgcggtctcggatcacgataattcctcaagatgctgttctgttctctggtaagggcctgtccatttgatctagtcggagctcatcaagcaccacgattgaggtgatagtaaagactaatatggcctcctttgctatatgtgtgtattttcaaaatgttgtgtttgaacgtatgtaggtaccatccgagaaaacttggatccgttcaaggagcatgacgactcagctctgcttgatgcgctcgagcgggtgcagcttggaaacaccaagtcggttgcgccgagccgagtgccgtctaattcaaacttggtaaaactcggacagggcaaaggaaaggaaggagatgaagaggcagcgaaagccaacagtattgtgtcaaatactgttcgagccaaaattacgctcgataccgaagtcaggtaagcgactacttcatcgcatgttatattaatatcatcctgtgcacagctagctgacccaattctacccactcctgctgttttgacgccgctgcttcagtgcgggcggcgcaaacttctcccagggccaaaggcagctcttggctatgtgccgagtaagtgatcagttcccgatcgatggctgttgacggtgccaacccgtcattcctgacatttacgttgtttatccggttggcttcgtttccgcttcactttttcaggcgctcttgagaaactcgtcgattatcatcatggacgaggcgactgctaggtaagtttctttcaagttcgacaggatgggtcagaagggcccacggctaacgcctctcaccgatcatcggtgttttctttgtttcttcgcttttatcctttcatctattcactatctttagtgtcgactttgagacggatactatccttcaaaagacgatccgggaggagttcaaagattcgtgtctcattactgtcagtcgacttgatgtgcttttatgtgtgtttgtatttgtgatcagtattaacgtacagcctgatgttggtctacttgtctcgtgctgcactatcagattgcccatcggctatcctcagttattgactatgatcgattgtgagttttacttgtttttcgcctcgcctgcgcctctttgctggctttggacaactctcagcgagttgagaaagccattgaactgacagtgagcattgtcttcatatcatacaaacagacttgttctcgatcatggtcacctaaaggagttgtacgtgttttatcttgtctgtcccgcctatactgcttcggcgcgactgtacctaatatcgtcatttgtttgtgtctgtctgtgtatgtgtagtgcatctccgtatgaattactgcagaagcctgcaggcgaggacgcgatcttccgagggatgtgtgagaagagtggtcggttcgatgagctactggctgctgctacggagaaacacgagagggaggagtgataggttgtgtgccttagggcatggtgagagtgacctcaaccgatggcagtcgatacatggccctttagacttgggcgttctcagagcggaaaccatcaagaccccatgggtcatgtatatgttttgtgttaggggcgtgaactgtgtaggtaattatgtcgttataggatgtgtaaccaacacagggaggagcacagaagtgaaagcccaagctcttagactgagactgatgagaacagaggcgcgaggtgatacgagagatagatctcaagtgcagggatagaggacaaagataacagggagtagtatcgagagaactaacaaaggatccaggctcggtagattatgctatagatgggagaggaagcccatcttatatacgaccctcagactccaacgatactgcacagaagaatagatctcagaacgtgccgagaatatttgcgctgaaagactacatgcttgcaagctgatgcattgggagagcaggagaagatgggaagacgaaacgatctaccagtcgtttgttatcaacatgtaacactcaggtcacatccctggccatgatccatagggttttggtgatatgtggtctgagggcacccaagtcgaaaagcgccatgtatcggccaccatcggttgaggtcactcccaccaagcctaaggcttaataggtatcgagattttatatttgaatattcaagtaaagtacacaaggcacataaatttatcctgaaatttgtccaaaacccacccttgtgtatttttttccacagtttgacagaagggccttgctaggagagaatcttcccttccccgtaggatacctcacagcacctctcaagaaaaatggcgagttcttctttgctcatacagtccctcccttctgctcctcttgaatttggacggaccgctctcgaattcgctctctcgactatgctttttcattctggatggaagggagaaaaagggacatgcggatggagaagtcatgacctttttcttttttctcctgatgttttgaagaagaaaaggaacaacgagatgacctatgcgataggaagcttgaaggcgagcaaaggggaaaagagcagccgaaaaggctcgatttttgggtttagagggagcgagggaaacggagacaaagccaaagccaagaaggaagcggtcgttgatcacccatacagatcccataatccttctcaaacgacatgactctgtctttgcggtaacaccctcgaaacttttgatcaggccgattcgctagtcaacctgtctctgtcttgcagtacggggcagagagaagaaaatgtgtcttgtttactcagaataaacaaaaacttaccttttctctacttctctgatttttcaactctcgatggaaaaaataaacagcctaaggagatcagcgacatcaaggagttcctcaccatcgctaggcgaaaggacgctcggtgtaagttctctttctcataccattctcttctgtcagcacaaaggttaatctactcctatggatgttttgccatgtttgatttgtgatcacagccgcccggatcaagaagactgtttcgacctcgcccaacgctaaggccgtcaccaagttcaagatccgatgcgctacctacctctacactctctccatcgctgatcctgagaaggctgagaagcttaagcagtcccttcccccgggtttgtctccttttcgtctttctttgaaccattggatctcaaacaaatctcattcggcacacgcgatgcttatcatacactgtttgattttataattgcccccttctgtcgcgttggaaatgcgtatatgtgttggtcggccatcttggtgtgtgtctgtggttgggaacattcaataggtcttgatgtccaggagatcggcaagaaggctcttcccaagaagaagtaaatagttatgactgtttcactcttcctatgagattaagacccccttcgagcttgttttgcagaaacacgtctctgccatcttctcgtcacccccacatgttccttatatccgttctatggattattttcgccgttcttggtgtcttaattatcttgtcgatcatcgcccgtgcaaaagtgtctttgttaaccttgaggaaaactaatcgtcattgtgtgaaacaagactcgtgccacgtctaatgttcttgctgatgagaagttgcccgtctagactccttccggtcctcgcatcgttcatccgtcttcctgttctcttcttacttgcttgagagttcatgtgagacgctttcctcaagtgaggaagttctggttgagtagctagaccagttgacgtcttgctcaaagacatgtatacatgtgcactggttcactcatacatatacacatcacaagacgagactttgaaaggagagagaaactagaagaagctagtcctgacatgttaattttttcattgattattcttatttcgttttgaggaagggtagaaaaggcccaaatggggccctgacaattaagctagaggatgccatggtggacctggaatgtcctgtctaggaacgaacggtggttgttggacagcagcagcaggagcaagagggatttgaccggctgcttgttgagcttgttgagctacctctctttcttgtgcttgctgccttgtccatcgactgtttgtttgttcgtcgagatttgttcaaggggatcacacaggagagccattagatggatgagtactcgtcagaaatgtttcgtggcctctgtgacaagttagagagcttggcatgaagaataagagagagaacgtacgcccggagccaggcaaagaatccgacaaggaagcaaagtacgacgaggaggattgtctgttcatttggcccagattatttgaaagctttagtatacgataacgttcggttttctctttcccttggcctttattacgagggaaagaaggaaagaggacgaggaagaataagagaaaacagtcgcacctcgaaccagacttcttcatcgtcttcgacatgttccccgttgggtcgtctctgtcgatgacccatcgcagtccagtcgccttcatcaaagtattcatccgtggcaccatactcatctgtcgcaccccattcactttcggctccgcccggtccatccccttcggcacccgcaccggcggcagcagcggcgtctagctggtctacaagatctgtccatctctgagcgatcgcttcccctatcgatttgatcgaccaagaccctgctccacttcctcctcctccttctcctgctccttcagagcccgtcgtagaggaagctttctttgattcgaccgaactccatgggaagatacctttctcaggcccaccactcaagagtgaccaaagtgatctcacatacagacgagagagagcgaggtgtacagggaaggaagcttcgacgtttgtctcgagcgcaagatcatagtttcgtttggccagatgccaatcctttttaaaacaaaaatagaacaactcgttagtataaagatagaagagcgattgaaagacatgatgggaaacgaacctttggaactcctaacccgttctcgtacatatgtcccaagttaaaaaacgccagagcagaatcttgccgttcggccgctgaacgaacacaaggagatatccaattggaagtatacataaatgggacaagagtcaactgtcaataccatcatattaaactggaagagtagattcaaaatgcatgtgaaagaagtgacgaaccagcctgatagtagccggctgctttctcatattgaggctcgcccgagccatccaagcctttataaaagtaatctccgacctgaaagacgtacgtcaacccgagaatgaaacgatcgtgtttgttaagctaggtcggcaaacaggaaggcgaaaggagtgaaagtctctcgttcttaccttgatgagcgaatcaatctcgccttgagcggcggaccgagtccattggtcgagtgccagttttgctgtcacgttattcgctccgaaggacctccaggggagactgtacagtggaggatctgattttgacgccacgaacaatgcggatgagaacagaaggttggcccaggatcagtgagacaggatcgatcatctgatagagaaagaaaagaaaacgcgaaacgaaccttgatcgagtagataggctagattgttctgagcgctctcataccctcgctcggctgccatccaccatcccaagaactatacataaggcagatagagatagagacttgtcagagaataaagtacatgtgtgggcttcgcgtctgagaaaaccagaagaaagcagacgacaacgaaccgccttgtcggtctctcctctttcccaggcctgatcggcagtgccaacgacattatccttccaacaacctcgttcgaccacaagcttcaggtgggttactgccggaccacaagtctctggccgaaggtttgcttcaacctgcgctttagcactagaagcgtacatcgagcctaggtggtagtaaccctcgaacggggagcccgctcggagagccaattggaggtattttgtggccatgttaggatctccttaaaccatcgatgaaagtttgtgaaaagggaagagtgcaaacgtagttgagttaaattgagggaaatagaggttctgagaggtgaaaagaaagtaccgaccggcaagcagtttggcaaggttgatctgagcctctgcatggtctagggctgatgccgcttcaaaatgagcctttgcttttgccaaatctcgttttactccaagtccatcgcggtagatgattcctaatccgttgtagcattctcgttcgcccttgtaagagaggcaagggagatgaccgggtcaatcactctgatccgcgtttgcgacgaacagaggagaacgtctgagaaatagactcacatagcttgccccacgatcaaaccagagtttcgcctttacatagtcaggcttgcccttcccgccttctcctcggagattcatcctgccgaggaagccggctgcatacgcagccgattcaatggtgacatggtcgaattccatctccttaccattttttgcccgtcgtttgatgatcccgctctgttcagagggccagattggataggctgctttgagaaagtaagaggtcgcgagatcgaacgattgggcgattcggcctgcgccttctgcacccgaggcatgacctccgggagccgtgctgtaatgatgtatgtgagcgaaccagaaaagacagaattgaagtgagcacgcgaaagagagatgatcgagaaggataagggtcgacatactatatggaacccatgtagtaaaacttccctagcttcagagaatatgagtgcgagccacgctcagagtgatactgtcgttgagatgaggtgcacacaagaacgttggcaaaaggatcacttgacagaggaaacgatgcgtagctctaggagactcactttgtaataatccaagatgtcatcccatgtttctcctccacttcgagcgataccagccctgatggcagctttttttatgttaactccggtgctctaagtgtcggccaagaagaagggtgggtaagtttgagatcgtttagacagagttttaggagaatatagagaacgcataggtggacagatgagagagaatgtagagaacgtacagcccagctcgcccccaggccataagctcctccagcgagatcggagagccgagtaggcgtaatgggaagagtgcgaccacctttggggccggtcaaaaagtgactgtacactgagagagagccaaagcctacatgtcagcagggcgcacaaagaaggtaagaaattttaaacagaaagaccaagacgaactttgttcggcagcactctcgtaccagccaagagccatcatgcagtcctctttaacgccaattccagcccagtatttgtaggccaaagactgttctgcacctgggtgattctgaagtgctgcgaaagagtagtagagcaaagcctaagtgaggggaatgatgtgcatttgaggaaatgcgagagagagaagaaataaaaacgaaagaggagaaaactcttgggattagaaacatcgtacgccgatagatgaggataatgcggatttagaagaagacgacgagaccggacgcactttaccctggtcaataggaacaacgtctccgtatcctgtggaatggaagaatcctagcatgtattgcgcggttgagtttccagtaagacgagcatgctcctagattttttcgattgaatacacgccgagtgttatcttctcaagaaatcagaaaaaagaagagagaaggacaaccgaacgtaccgagaacgcgtggtacgcgagcttgaggttctgtctcataggggctggaggaaactgagatgaaagaggagacagtgtcatgcttagtgtgagaaacagtccaacaagagtctttgactgaacgaaccatggcgatatgacccctggttccccaagcgtcgggacagcctccgctgagggctttatcgagctgagtgaggatctctcttgatttctcgagaatgtccgtctcaagtctgcctagtttacctgcctgcttggtttcctttccaccagccggtagcctagtctcatatccttccttccagaagcgctgtctgagggcgtgaacgagctgatggatgcgagagggtcgggaagcagggtctgggttggcggtcgagagcatcatgaatgtctgtggcgggatgagggatcgaggtggattggtgggtagactggccagcagttcgagtgctcgtgtgagatggttacatgctgtgtgagtaaagcagatagataggtgggcagaagaagacaaataagacggaggtgcccagtgttaatcgaagtgtgtgtgtgtgtgtgtgtgtgagggagagacgcgcgcgcgcgcctgtctatcttacctttggcaatgtctacctcggatggaggttctttcggtatcgactgttgggccgaatggtctagttcgagttctgttcctgaagatggaagtgtgtttgtctgatggtggtgtccatttgatggtgtatcagtatcgagcgtgatgactgtctgtggaatctctcgatcatttgcccaagcgaccgagaggaggacacacaggcagagtgcaagtctgatcctgctcttccttttgttcattctgaagagagaagtgagtgggagaccgaaagagagatggaagaagaagaagaagaaagactgagaggattgacaagaaagaaggcagacgctcgctttctctctcacacagagatctacacacgcacacacggagtttccttctgatggaactgattacgtggcgagatggaaaaacagggcaagggacaggaaccggtaagatcaactgcggatgagtgtaacgttgtaaccagggtgtagggctggtgagtacataaccctaacaaggagagagggaagcttagctaagccgggcggtgtgtcgttccgctttgacattctcactggagttctgacgactgggtcttttaggtaaccgtcggaaggataccatgggtaaccggggttgagtgtctggcgagagacagcaagcagagaaaaaaatattgttccgttggttccatcgagggactcttctgactgattgactgatttctcttcttcttgcctttgctcttgcccgtgttgttctttctttttccttcttcttcatcatcgtcttcatcatcttcatcatcctctctttttttcccgttcgacacaacacacacacactctcttcgcgtatcatacccgtctactcacacgtatcgatcgcattgctcacatcgctcacgccgcttgatacaccgctcatcacattcacctaagaaccgtctaagcgtgcttcctcctgatctgttcattgttcctcctcctgtctctctttcttggaaacgacacacccgatggaggactctccccagccttctccggccgccgtgccgaccggcaagatatttacctgtcactattgtgagcctccgcacgtgttttcaaaggagggcgaacgaaaggtgcgctcggaccccctctctttctcaacgcccagccaggcacacaggcacacaagcattcaggaacagacacacaaaactgactgactatcatctcttcccaggttcaccatcgaatcacccaccaggcctccagtatgatcaaccacccggtcaccggcgagtgtaagtatctctggtcttcttggacgggaacggttactcagatacctgggctcatcttcttcctctcttccgtattcttagcctacgaatgctttcgagacccgacgagcgggacgtttagttgtccacggtgcataagccatgcggatagagacccggtcagactgaaacgacacgtactctcttgtctgagtaaatggccagaaaagtcgtatacctgtgaagattgtgacgactcgatcgagtatcctactatcattcatctcaaggtaaatccttgtttttgttctcatcttgcgttgctcttaccctcgtcataattcaatggttgacctggttttgtttgctcctgctctggtcactcttcttaggaccatcatcgagtcgtccatcaggagacaacgccaatcaatcatccctccggacaaggtcagtcactttcttttctctccctttcctcggcccatcctctgtgaccatcatctcacccctgtagactctcttacgaacgaacagtcctcgatgtcccccggtcacctggttctcacacgttcacttgtccccggtgcgtaggattttcacacaaagacccggacaggctcacctggcactgcactacttcatgtacctcggtcttccccccgctctcggcctatccgcccacattcttcaaaggctacgcctcacacgcacctacctctccaggcgcccaatcggatcctgaaccgacgttcgtcgccgctaccctgcccgtgtccgctagtccgcttcctagaataggctccttctccgcagacggttccccggttgcttccgccaacggcggatcggtattgatcaaatatcgtcagaaacggttctactgtagactgtgcactcctcaggtctcattcgataacgcggatacaaaagaggctcacgtccaggcccttcacccggacgtcaagaagaagaaaagacggccgaccgaaacttggagcgttgccggtggtgggtccggactcaggaacgagatcggtgaggacgaaccggagggcgagccggatggacaggaagaagagacacaagagccagccgtcaaaagaaggatcaagccgagaaagagcagggcaaaaccgaagaatcttgatctcgaaggtgcacaccccaccggtctttcattcgatagtcctggtggacccgatcaaggccttctcagtccaggaggcatcatgttccatcagtctcctgctcccggctcaaatcaggcgaatcaattctatccacacgccggctggccctcagcctatcttccaccacctcctcgccctggggcaggaccccactcgacctcaacctctccctcgctctcggccacgtcaacatcttacccaggtcaatcgatcattcaatctcagccaaatcggctgttcggacagattccgtcttttgatgcattccgtgcccagtacccggcgcagcagcaacagcagtactatcagcaacaccaagagcagcagttgtaccagcagatgctacagcaacaacaacatcagcaacaacagcagcaacaaccaccttctcggtctacctccacgcccggtccaactagtcaaccaaaaattccacctcgacagccctcaccgaaacttccaacgcccccacctgatgacagaccaagctgtccgttctgcatcgtctatccgtccgtccggtttgactcgccggacgagcaggctgagcacgaaaaacgcctacatcgctggcctctaaagaggaagcgagcgatcttggatctagtccatgtccggatcacccggccgtgggcggcctcccagctggagaaaaatcaccaagaatcaaacgaagcaacgggcgaggacaagaccaagactgacgggaagaacgatgagcgggatgaaaaagagagagagcaagagcagctacataaagataagcagacagaccaggatgaggacggcgagaaggaagagaaaggtcgatgggaatgcacagaatgtatccctcacatcaacttccagactgaaagcacaaaggaattccatcggagagtctcccacttgaccactgttgatgtcatccttccaaccggagagtctgtccaggttgtccggtccgccgtccgaggtgggttcccttgtccagtgtgtaacccggaagaagaaccgacagaggaaccgtcgatagaggagatacagcatacgccagagacggatgggaatgttgataaggacgtaagtgatgatgtcggcaaggatacgaacgaggacaagatggacgtagaagtagacacagttactaccgagaaggaagaaaaggacgagaaggatgagaatgacgagaaggacaaggaaggcaaggaggataaagagagcaaggaggatgaagaaagcaaggaggacagagaggataaggaagacaaggaggacaaaaaggaaaaagaggagggcaaggaagaggaaggagaagaaaagaagaagaccggatacgtatcttgggatccagagcgactcaaagcccatctaaaggaatgtacgctagtacgagaaccatcgccggccggatcacctctccccaaccagtctatccttacatcacttccctctccaaaaaacaacgacgatgcagctgccgccgcccccgtcgtcgaaaactccatcaccaaaccaccttcggatccaaaggagccagccgagcatatacccgtccctacatctcttgaaaccacggccgagaccggatttgttcgatcggttacccaggatctcccttctcattcatcccctctcaagctgatcgagaaaaatctgatgtcgaccgaatcaaggctaagcatgtcgcctcctcttacatcggccgtcccggcctctgcctccacctccgtctcgaccgaacatcagcccgtgcaagccaacgggcaactagaatcgtcccctgatggacaaaaagctattggtgggacggaaccatctagacgaccgctatcaacctcaacttcaaaatactcactttcgagtttgttgaacaactaagaatgaaaaacgggttgacgtgccattaggatgaatgttgaatttgttcttgtttcttacaatcttctggtctctttgcctttcttttttcttttttcttcgttcttgaccaacatgaccgttcgtttttaatctcaatttcaaacaagaatttgcctttcctgccttctgtcttccatcatttcctcattctaaaaaatatctttcttgacgggttgttgcttctcagagaaatcttgtcttttctcacctggatctatcatgttgtatctttttttattatggacatcgtttcttattaaacagtcgtaaatctatatgtatgcacgcatcgcatcacgttttactgtttcctcttacatgaaaaaaagaaggagcaaatgagaagagaaaatagtaaagaggatccaaatctactcatcctcttcttcctcctgattgacggtcggcaaattcacagcctgccagagtatgaccagatcgagcaagaatctcaggacatcgctcattctgagagggttcgtctcttggaatttaccgaatacagaatggaagaccgttggcgtccacaagactatgaagaggaccaagagcgtcataagaaacaacgacaaccggaagcaggaatagcgaaccaaattagaaagagagagagagagggggaacaagagagacatatcaacgtacgaacggtgcccactacttgagtccatgcaagagccggaaacgaccctgcgaacgttcccaacctccaattcagcaaagcctgcgccgacaccgccattatcgataacgacgtcctgagagacgctccgtattccaacagccgaagctttgttgaccaggtagagaccgtgtggaagaagacggaagatccgtgacgatcataatagctaggagggacctgaaggtaccttgggctaatgtgataggtgagtccaggtaggtatgttaggatgatcgtaaggatgactacaagctaaagcggaggtcagaattagtgatcttctcgtatgacatccctagtgttgagccgatgaccgtgcaagaataaaaaaagggacataccacgcttctttgaacccacgtaagcttttggtctgctctcctgctcgtcctctccgagtgtgttcgcccaaatctttcaagtcccacagggattgagccactccggccgttccatctgaagccgatgccccaccaaagacaagcccatcgccagatggaaacaatgttgatcacctgtactgtggccaacatccatgcagagctgtcataatgataccgatgtcggtgataagagatcgcttcgtacagactactgaaacacaggtaaaggatggtcgatcgaagactgaggcctgtgcttaatgatcgggaaagagataatacatctggaggatgcacccgagggggtattggatcaagccgccgataatgaagaagacggagcgaaggacgggtcgtttagagtacgtatggctgttcccaaagatagcatctaggggtggtgaatgcgaacgcataacagatagacagacagttggtcagagaacttctgagaccagaaagatgagaaccgaattctttgacatcaaaggaagaaagaaaatcctacttatgaaatccatcatctgcagtgtgagggcctccgaataaccgtcgcccccaaatgggttgtatggtatataacgatcaagccatctagaattgtccttgttgatcttatcgacagcaattatcttcgattttgatgagagatcaaaggtaatgtgccagggaacgatgaacggatctataaggacgtcggagcgaaggataaatgagaggttgatgagcgcgcagaagtcagaagagtggattcgtcctctttctgtccctgactactgcttaccagcttgggtgttggaggacttatcgatacgaggcaaggggatccaatcctcagatccagctgcatggtcacctatgaaagaggttacatttcgagggagagaacgagagtgtttaaggaatagaagggtcatcatggtgtcgaccaaacctatacctccaaatgagaagaacacgttgaaaagaatacgtacgtagagtcatatagggtccgtagaaagatgtttcttcagacctgtgagaccattgttcttcagtaggtccacgagaactgctcctgtcaaagtgctggatgattagagaccgataatgacctatgcccctgaaaggaacgtggcggaggtcgatccacgtgttgaggtggtctgtctgaaatgtcgtcttcataaggaaaccacaagtcaaaccgacaaaaggatccaaaagtcaaagatagtgagcgcccatatgtcttacactttgaactcttatgacgcaaaccacaataagggatgaccaacatgtctaaaattcacatcacgtcgctttctatcatattcgacacgatcatactttggtgtttccttaaccatagaaagccagctcctggatttgatcttgaggttggcatcccgcttgtaagctataaaatggctttcatgcatagcattttccatctcttcggtttggccaggctgggaatcgacttcatcaaaccagttcgaccggtcccagacaacccgttcatcgatgacgggccgcaaggcgaactctttaacagccccagaatcataaaaggcattgagcgaccgtgaagcattctccagacgtaagttatcttgaggtgggccaaggataggatccatagggcgagcgaggtgttgaataccatttttagtcagtgaggcggggttcggcgtataaaaagaggggcgccatggtacgaattccaccatctccactcgaggtgggttgggagagttcaagataggatcgggatcagatggaacaatgacgaaggtgttaacgatttcgggaaagaaggtatggggctcgtaaaatcgagatctatctttccagcaggacggagtaggggaggtcaggagttgaactcaggaagacaaaggagatacgggcaagagtcaatcaaactgacagaacatccaaagggatgggcaagtcgatcgtctttgtgaagatcgtgtcggtggagttgaggctaattcgagaaaagacggcctggctatagagtggttgccaatcttcgaagctccatgtctctggagggaaatccacatagaggtcactatcgttgatactcggaaactttttttccaaatctgataaaaacgctggctacgacatcaaactcaggaatattctcgccatagtagctagccacggcatcataagggtaggacgttgtagtttcccaatgagggtcaaaggccagacgccagaaatacctagccaccgagaagacaaggcagatagctccaccagagatgccgaggataaccagaatggcaatcagaatgagaagacgacgacgagtcagaacgggtttcctacgtgttcggagggacaggcggtcgtcggctgaatccaagatggaatctgtagacgcatgctctcggttgagaggggtgagcaagtgtttctccatgatggaggatgatgttgaaggaacgaaggcatcattctcatcttgtttgacttgtcgttgactctcacttgtccttggcaagatgatcaaacgaacaaggtttggaggtgataggttcaactcggaaaacgagtgatgcgcgaaaatttactgcgctttcgcccgtaatgggtccggtcttccggtcaaacgttcaagtttcacccgacctaatcttccgtagatgtgttgtgtcgataacagaagaaacaaccaacaggacatagtgtaaaggatgtcgatgtaattgatgaaccaactatggggtgcatttaatatgaataaggaaagtgcggcgaacgtaagtgttcatcacaaacggagcgtcacaagattaaacaagacaaagaagcagagacaaaaagaagtagatggagaggaaataaggatgtattgagagacagaagagaggtcacatatgcaagtaataataaaaaagttctgggattcggtctcttttatgggcgtgccagaattttaatcctcgtagataagcttgaagacaacgttggtaagaacagagactgtacgtagaacgcaaacacgagcgcgcgcgaaacaagcattggtggaagaggcgagcaaaaggagaaaggtaagtgatcaaccttccgagaggcataactatcagcaaacagacatacggatgagcacgatgcaaaggattgtctgttgaatgggtggaattgaggttgaaacgcgtcgagtcaagagagatcagtttagtatcagtcttgtagatctgactgggtccaaaggaaaaaaccacacgaaccggtccgacccggtcatcgtaggcctgagccttctttcggatggcctgagctcgctggtgatacctgaagagagcgtaggtcatcatggccatagcttttggaaagaaagtgtttaaaaagagtttgagtatatgactacaagtgaagctgtctattttggtcgtttgattaaacgaaagaagaggcattaccaataagggtgtagatagctccaaagattttcgaaagctgcaagcgtcagatttgagtagcatgcggttcagcttcaagcccaagaacgttcacgcatgaatcatcaagaaagcggaccttgtctccaaagttgagcaatccaacggccaaacctccgaggacgaccgagaagtgcatcctaatcacagtcggaattgaaagagaacgttcagaaaaagaaaggagaacaaggctgccatagccgctctaggttgtagaaccagaaacagagcggcgagataagaaagaccggtcgtaccaactcaggtacgttcgctcgttagcgaagtagacctagtacgttcgaatccagtcgatcaacaaagaggcggacgagatcagcacaaaggcgaaggaaagaaacgaaaaaagaggggaaagtgagaaaaaagaaagaagaacaccgaaaataggtcaactggtctgaaagttcacggaaacaccaaccttgggttcctgtcggacgggaagagcgattcgcttagccgccgttcgctgaagtaaaggctgggtggacatcttgttctaatacctgtctgcggatagtgttcaggaagagagacgaaagaacctaagagataggagagtagggatatgggtggatggaaggttgaggagagatgcaaaaaaaccagtctgctcagttcattatgttctctctacctttgaaaaaatccgaaaacgtcaggctgccgccagccgagagggaagcgaagtatagcgatcggcgggcagaggagaaggtgagccacccacgttcgtcgaacaattacgtaactagtcacgtgctagggtctcacatatatgaggtcgatcacactcggggtttttgatatctatttttgataacttaaacaaacctttgcacgcgtaacccaccgaattctggtaaccattcagggcaatgacctttcctgccaacgccagactagttctgtgccttcatcgtcattccctccaccaacaccatcacgaccacgaccacgaccaccgacaatgccgccactgtcagtaaccgatctgctggcaaaacagaaggcagaaaaggaagcagcttccagagtgagttgtccaaatagtcacgtcgttcttctgtcagaccatctcgttgacctcttcttctgtcgtgatccgttacagccaaagtttctgacgaaagcagaacgagcggcgatcgctctagagaaacgagcaaaggaaatagaggatcaaaaatccgtgtccgatcgagctaggaaagaaagagaagagcttgaacaaagaatagaagaagagagaaggagaaacgcgccgtctgactaccgtggatcagactatggatcagccggggggagatatggagcacggggaggagcaggagcaaacgggcacaatggcaacagcagaggaagctacagcggaggtcagtcctatagctatcatacttctatcagattgcgtagccagactcatgcgaaacattgttggcatacaggtcacaacgagagataccaggacagggaccgagaagggtcttcattcatgggtcccccacctgttccatccggtccgagaggcttggcaccctctggtccgcgttccaattcgtcctacgcgccacctaccggtcccaaatcctccaaatccattcctccatcgagcactccctcacaagtgcaagacatcgacccggcaattgatctagagtcaatcaaggcgcgctacctcggtatcccgactgaggcgagcaagaagcgaaaggctagaaagattagcgacaagaagtttgtgtttgattgggaccaggaagaggataccgcgttagacacagcagaattcggaggaggcggagtcatgctcggtgggtcagttgcaggaatagcaagtggaggttggggacgagccccagaaggttccgcggagggaaagcccggcaaaggaccagatcagtacgttgatcctctcatctgtggatgcaaacacaaaggaagaagaagcgccaagctaatttctgttctttgtttttctcaacttctaggtttgctgacgcattggagcgaagatctgcattgaaatctggtggggacgacagacactggacagataagtcgttggaagagatgaaggatcgagattggcgtatctttagagaagacttcagcattgctgccagaggtatgttcataggtttcatctctaatacacctagacgctgcacgtaagctactgacatgtcttcggcgtctttctttctttcccttatcaaggtggatcaatccctcttcccatgcgaaactgggccgaatccaacatccctcctcaaattttggacgttatccaacaagttggctatgttgaacctagtccaattcaaagacaggctattcctatcggtttgcagaatagggatttaatcggaattgccgagacaggtttgttgaccttctttcttaggttgataaaatatcgggttccctcttgcatactaactctttcttctctgtttttcttaatctacaggatccggaaagacagcggcgtttgtgattcctatgttgacctatattggtcgactgcctcctctatctgaccagaatcgacatatgggaccatacgcaatgatccttgcgcccacgcgagaactggcccaacagatcgaggttgaaaccaagaagtttgctgccccaatgggttacacttgtgtgtccattgtcggaggtcgatcggtcgacgaacagcagtataaccttcgagatggagcagagatcatcatcgccacgcccggtcgattgaaagatgtgatcgactctcacgtgcttgttttatcccagtgttcgtatgtcgtaatggacgaagccgacagaatggtcgatcttggattcgaagaacagttgacgttcattctagagagattaccggcggcgaacgtcaagccagaaggtgtcgatgttgccgatctaatggggaccagagaggatggtcagccctggagggtgaccacgttgttctcagctaccatgccgccgcctgtcgagagattgacgaggaaatatttgaggaaaccggcggttgtcacgatcggtgtggctggtcaggtccgtgctttgttctcctcatctctattgttgtcagctctcgccggaggaacttactaactcttggttcatctttgtgcttataacacgaatttcaacaggctgtcgatacagtcgaacaacgtgtggagtttgttcagggagacgagaagaaaaagtcagcacttttttacttttcaagcttccctggcgctttgctctggtatgcgcctgtgatattatgcttactatacactgttgcttgaaccatcagacaacgaatgatccaaattctccgaacggtcggcttgccgccacctatgatcatcttctgcaatcagaagaagacggcggatatggtcctcaaggatattcagcgagcaggggttcgtattcatttcccgagccctgtcttcttctctcatcgaaatcatctctcacacgaggctttactgactcaccttttctctttatttgattctagttttcggctacgacacttcattcaggcaaaaaccaggagcaacgagaagctgctttgcaaagtctcagggatggaacgcacgatattctcatcgcgaccgatttggtatgtgtattttgttctttgtttatgttcaatggacccgcacgactcatgacttacactgtcgcttaattttctgggtttcgtcacataggctggacgaggtatcgatgttcctgatgtctctctcgtcatcaactggcagatgtcaaatacgatcgaggcttacgttcatcgaattggttcgttcttttctttcgtattcatacctgcttttaaatttagcctgcggccagacgagagcgttttttcctaacgaattttctcttctctttttaaattccatcttttatcaggacgaaccggtcgagctggaaagacaggtcttgcaatcacgttcttgggtcacgaagatgaagaagtcatgtcagtcctaccgtttcttgtttcttttctctttcgagaacgaccaaagttggacaacaaccaaactgacatgactcgtgttggctcgaatcacttcgcgcctttctttgacaggtatgacctcaagaacgagatttccaaatcggagaggagtaagatggaacctgaactcgctcgacacccagccgctcaacaaagaattgtcgctgctgacaagtacaagcggaagcgaactgaggctgaggattaaacgtctcaaatctagtcgattgaatgtatccttccttcatatatgatcctctcgatcgcgatgtatctggtttgatggaaggagaagttatgtggtacacagtctaccccggtggacgagtgacagatgaaacacccatgtggatcttttttggtacacaaacagacaaatagagcaaatgactttgtgacggaataagcaatcgagagggcagagatcgaaacaaaggattttgaataagaggaaagatgtagactatgaaaacacaacgagattggatcattacgacaactgataaacagtattaagtacgaataaagcaggaaggtagacagaaagcgatataggaaagagaggggaaagccacgccggccaaaggatcgaccgggagggaaatacaagagacgtattcagtcgcttaagcagttttggcgagaatcatagccgttcgagatggcgcgtacacctgaagcctgatgatcagaagatcccggaaagataacgaatgaacaaaaagtaaccaggtttagtatttaccatgctaaggttgcgcaggtgaggttttgagaatagatgaatggacggaccagttctttctgttgttccactccatgggtgtagtaaagtgcttggtatccaacgcaattcgatcgaacccgccaaatcgcttctcgtctgaggacaacacaacattatatgtgcctgcttcctcgacaccaactcgatagtccacgaaggattggggtccaaagttgaagatgaagagcaagccggcacgctcgaagacgatcactttgtcctgttggttcttcagagacacgtatgcctataaagaatgtagaagacatttcagacatcagcatattgagtgttgcaatcctggacgctgagacaacagaaatacatacttgaggagcttcaagccatcggtacttgcgctctacattgttcatctctgcatcaaagttgtacaagtatttgtatcgcaacaaatcatcctcaatgagattgaattgtcgacgagcatagtggaaggagtttccgtttccctctcgagggaaatcaagccactagaccatcaaatgaaaaaaagcagacaaaagttagtttaataaatgtagacgttcatatacggagtaacaggccacaaacctctgggtgtccaaactcgtttccttcaaagttaagatatccctctcctcccaaagtatggacgatgagtctgttcggaataacgacaagatggcagattagcttgagtagaaacgcctagtccacgaacgagacgaaccgaatgagcttgtggaatcccaatccacgctcgataacaggagtcatttccgtcaggtctgacatgtgggtgtctggtccaaccaacataacgtgttagatgatcgccaattgtctatgataaacgcagtcaattgaatcgactgcttttgcttaaactactaacacatttctttgtccatcaaccagaaagcgagcgtcttgtcaccgaccaatgcttgatcgtgactctccgcgtacgcaatactcttctctccgtgtcttcggttgatcagcgtgaacacgatgtttccaatatcccactgatcgtcggacttctctttgagcagtttgatccacatatctggcacggccatagcaagtcggtagtcaaacccgactcctccatctgctacaggtacgcaaagcgcgggcatgcctgacacatcctcggcgatggtaattgaggatgggtaaagagatcggatcattgagtttgcctagttcaacagaaaaaatgagatatgctgttggcgtcatcatacttcttttaagccatacgatctgaactcactagcatcatgtagacaacggcttcgtcgtcgacattgggtccgaaatactcatggtatccacctggttaagcaaaagcgcaataaaacatcaggtctattgttcttaacgatgagatggacatgaagggcgactgaccagaaaaacccgttccgattccgtgatgggtatacatcatgctcgtaactccatcaaacctgaacccatcaaactgatactcctccatgtagaatcgaaggtttgagagtaagaatctcagcacttcgtggctaccgtagttgaataatcgcctgcatgaaaggtaagagagatagttgacagagagcaagtcgcatgatcagacatgagctaggccaggtgtcttgctataggagaataaacgagaacgaacgagtcccaaagctcatgctttcctttaggtccagagtgaaagtactgatgatctgtaccatcgaactcattgattctataaggcgtgaagacaatcgcaggacgttacacgaaaggtgctcagcgcgttagcatggatcaagtgacgtcgtactagcctatagctactggtttgaatttactgacccatccaagatatttttgcaagcatgactgtgcaccatatctaacagcacagtgagccccatcccgtgggccgtatcgatcagactcttgagatcttcgggagttccgtatctggatgaaacggagaagaacgaggtaacctggtatccgaatgaagcgtagtaagggtgctccataattgccatcctgatcaaagaagcccgaagatgttggtacattgactatacacaaagaaaagcagcagtctacgaagaggttctcacatttggatagtattgtagcctagagccttgatcctcgggagcatgtccctttcaaactccttgtaggttccaactctaccctcgggagtagagattccgactagaatgggtgacgagcagtacagagtaaagatttagaatatggcgtaaggaaagctggtgcgttacaccagtccagaaagagagtattttaccatgagcctcatagatcttgattcctccattctcagcaattcgcttcatctcggcgacaggtcgtgggtttttgaattggtatttctggggagggttccagaatcgggcatcgtatacaggtgaaacagagagatcttgtgtaacgcgagtgctgtacgaaagatggtacaaatcgtcagaccgaaagtgtttatgagcgcatctttcatagcactgtcgagatattgcttacatccaagcaggcaaccgatctccctcgcctccagacttgaatttgagatgaatctgtacggacgaacgccccgtgacaagcgcaagaacaaagtcaattttgaaacaaagtcttcccaaattcatccggggctccacaaaccttgacttttgaatcatgtgcaatagccggctgtccgccagatgtagcggggattcgaacctcgaacgttccgaatgggtttcgcgtcattgggtgtgaggtcttgtcccaattgtctaaaggaagacaaggaagagtaacatcgagtatcatggtaaatgagtgaccgtcagatagagaagatgacatgaaagacgtactgaagtctccgattaatgaagcctgagaagctccaggagcccattctcggtaaaggatactgttgtccggaagaatttgcagaccctgcgaccaagatataccaagcgcgcattggagtgtttgagattcaaaatctgatgccatcaaaacgaccaatttgtactcaccaatccgttgggaccctcccaacctttggagaacttgtcgattcctccttcgttctcgttgatggtcttgacccaattaagataggtatcgaatcgtttcttgaagaagggggcgaacggttccaggctggtgtttcaacgttagattgaatgaacgatataggtgatgatcagtgttcgagacttaaccgcttctcagatatcgactagaggatcgggagatgagccagggccttactagggatcggtctggacgacggcggttctgaaagtcagaacggcaaacgagatggagatggttatcagcgatgggtggagatgacgacagaaaagagagttactcacccatccgtgggacgcgatgcgacactgctggacatggttgaagggagactgatggatgtgtttctggatgtgttgtatgcggtctctttggaaaacggagaaggagaataaggacaagaaaggagaaaggagagatgagagatgagatgggagatggaagtaagaaggagaaaaggagatggggatttgaacactttccgttctctttaagagttctcagaactcaaacagaaaagagatggagcgtcttttgtgggcagaggggtccgagagcgcgtaccagatttaaattacgtaagcgggatacccgcctaggtaaaagcctcgaaccccggtctctggggaagtcggaggattcagttggtacaccattctgagcattcggatcggagagagtagctttcggtcttggtcgtaattcttctggcccagatgtcttgttacggatcccctttgtattcgacgtcgtcttgttttccgttggtttctgatgcgctgggactcgctcaatcgcattctccgcataatctctctgtgcagtctgatttgaaatcgccatcagcaactctgcacaccacacctcccctacccatgcagtcgatgtcggatgagaaatatcctcctttgacgcatcagtcaagaatcatagtagttggaggtggaggtaccatcgggtcctcgaccgcactccatctggccaggagaggatacgtaaacgtggtcgtgttggacgagttcgagatcccttcggctcagtcggctggatttgatcttaataaggtatatctatcgttccttttcgacgtttttgcacacaataattaacgctgatgccatcattgctgatcattctgcatcgaatcggtcggaggtagattgccggaggagccgttaaagagggatggaggggtcagctcagcggcgagatcatgaaaggatggagagaggacccagtgtttagtccctactaccatgagacaggcagggtaaagtctgttttcacaaagcctaccactctactctgtgttttgatctgtttgtttgaacgccaataggtaacaggtgcgcatagattccccgaaaagatcgcaaagctgagagcggcatacgattcggctaaggccgatgggtatggcaaaaactacgagtggcttgactcgggagaggcgatcgtgtccaagatcccacaacttgccaaaggcaatctcaaggtcaggagtggttttaatttatgagctctacacaaaccttaagtgattcacgtccatactctacattctaaaggattggaaaggactttgggtgcccgactcgggttgggtagcagctaaagataccatctcgtccgtcggtagagagctctctcggctgggtgtccagatgatctttggaccgtgagcaaggatatctattcatcaaatcatctcttccctgctcttatatctagtcaggcccttccgctcttcttattctgacatgtctctctgatagataggtctgggaaattcaaacgacccgtcctctcagcttccggtaaggtctgcgttggagtggagacagctgatgggaccatacacaaagccgacagagtgatcatggcttgtggagcatggactccaagtctgatcgatcttaaaggacaatgcattagtaaagtacgttcagtttaatctttggcttgaaaacagtctcttttttctgatcagaacgaatattcatctcgcgcgctcatagtgttgggtgctagctcatatacagttaacttcagaggaagtgaaatcatttaagaacataccggtgctgtacgatgaccaactaggattcttcatcgagcctgacgaggagactggtctattgaaagtacgtgcatcctcctgtcattgaaggtttcgagtagtcactgacagacctttgctttctcgatgattagctttgcaatgagttttctggatatgtatgtcatcctctaccgataatcactttcctcctcagctctccttttacagatcaggttctcctctctcgttgtgactctgtgtagactcggattcttcattcgcaaactccctttgggacttctcatcctcaagatatatccgttccgcgatcccatgccgtacaccctactggtttgtccactgctcattttcaccttttctaaacactctcagtctgaacttctgcttcttgtactcttcgtacagacactattcctaccgaaggattggatgatattaaatacctcatttctacccttcttcctgacttccaagaccgtcctctcgttggcgccaagatgtgttggtgcacggatacggctgatgccgaatggctctttaccgaagatccaaggtggcgagggttgtttttgactacaggagatagtggacactcgtttcatacgatcccgtacgtagggtctgaagtggcagatttgttggaaggaaaggttcgttcctctttcttctgtacctgtctctttcggtttctcaagacgaggaacgagctcatgaatgacctctctgtttctacccaatttcttactctggataaatagatgtcggctgaaaagcagaaggcctggggctggagaaaacctaccgatccaaacgggaccggtcgtggaggtccaccgcctaaagatctgacagatgtccttgggtggacgaacggagatgacgaggaggaagtatgagtagaaggtttgtattctagcacgggcacaaagttgttgaacttctttccagaataacgcagtgtatgttgtatggttatggatcagtattattctgggttagcttgagaaccaacacgagtcagaagggcaaaaagaaatcttgtgtaaagtaggggtgccgcaacgaaagaaagtttgagaaggaaataccagaagaagcgtctgaaggatgtttgacaaacagatgaactatgtaagaaacgacatcgatgccaatagcagatgcgaaaggacagcaaagcagaggagagacgagacgagacgagacaagacaagacaagacaaaaaaagaagaatcagagtgctatcagatacaacagaggaaagaaataatgaagaaatcctatgaacaccggtcgcatatgaagaaccttgatataaggcgcgcagagaacgagggtagacagaagctgagagaagcaggatgaaaagtaggataatgtgtatatagctacgtttgaccatagggtccaattaaaggaggaagaaagaaagaaattggaatagaatatagagacggagaaagaaagacagagccttaccccctttcagcaacacgcacacaatggtcacataaccacacaacccgaatttttcttctttccccaaccaccacctttcagcttttcaacaacacctccgccaccacctagatgaagatggtctcccgtcaagcccgtggatcctcctcctctaggtcttgcggtcaatgctacggaagctgtcatatcgaatgcttctaccacacctcggttatgtttcgccgagcattctgttgaacacataaaagaagaagaagaagaagaagaggagatataccatgtcagtcagaaagtctcggatctgacattacctggagtaaaaataaacgagaagtcgatagaaagtgacagaaagaccacctacctagatacctagccgcgcggatgcgcttagctacttccaaaccttcatcgtacgtgataacatctccatctgtcttctgaagatatgcctcgtcctctcgcagatcacacttgagggctagtcgggtttgttgtagaccgtggtaatttattagatgggattcgtttccgtagagcatacttcatttgaaagacagggtcagcaaaaggtatagctcaccaacgagaacgatcttgacattcgggcaatgctcagcaacttccggaatccatttcgattcgactggtaggtgatagatataatacaagacgaagttaagacacggatatgaatatatccagagtagagatcatttcacgcactgttttctagtgaaactctagagttgacctgtggatgcattatgtaagagtgatgttcatcgagcagtatgattgagaatctggatgttgaaatggttgagcagtagaatgaaattggaactaagtcttacagcgaagcatgccatgacaatctgtattatattaacaggtccgggtttacgtgatcagattctacgttctcgtgcagcggataagaagatgcgagacaaactcacatgtgtatcagcataacttaggcttctcagcctatcgaattcctcttgacctatagaatgagacagtcgtacaagcactggatcagatcatcgcaagaaagctgaggtgcagagatgcttgaacggatgctcacccgcggtgtcccacaaggataattccatcaatttgccctccactcgaacctcacaaacataattttcgaatctgtgattgaagatcgagaacgaaaaggtcaacttcctactttaacaatgattgttctccgtaaaagacgcgagaaggagctgaaaagagtaagcttacacggtaggttcgtatccggttggaaagtaccctctgctcctaacagtcaacatagatgtcttgcccgtcgcacctatattaatcaacacagaaagcttctgatatgagtcttttggtagccaaatcaaacgccttgtttctggaactaaccatctccgagaacgaccagctttcgatgtatctaagattcgaatgacatgttgattgaaagtctgttagcttgaccaactctgtttgccgatacgtctagctcatcaagaggataaaggaaagacagactggcgatgatgtacaaggagcaaattgggaacgggtagaggatgaagcgaagcaattcatgcctgaactatcggaaggatgatatatgtgttggatggggtggtgaaggtaggtggattgtattcggacgcgtatgaacgcgacttgattgagaaatcagtcacgtccgaaagcgcgcagttcaactacgtcagaaaacttccaagcatttcttgatctcattctccctctcttctcttaattttaactcttttctgtatagagggctcttgatctcgaatgccatcatcggaggctccttatcaagcaatccatcgtacagcacacgcttctgtcccatcacgcctccgcacttccctccgttctcgtctccctacaaggcctactttacttggacttttagcctgtctcttggcactcttagcgatcgtccgctcgtcttacattcaacctttctttgaacacggtcacatgcgtcttccgtggaagaacaacagttcaccgaaccaactaaatctctcaacgcctcctactctatctcctcatccttatcaaagtgggacggcatcagtagtcccaagtcaagtaacaggacgaaggagtgtaggttactttgtgaattggtaagacctccaaggacagttcggttctgcaagtgtagagatttgacaacgatccctgacctgttgagcacctacaaccatgctatccatacttgatcggttctgtggacttaaaggggaatatatgatcgacaatgtaatattgctcaccttcctgcccttgcggtgcgactgtaaagctgacatcaaccctgccatctagatcttccgcaacagctgcctgcagacaaccttactcatatactgtgttagttcctcttattcgatccgatccaaaccatgcaagggagggggtagaacttcaactaataattcattcttataaatcctgtcttttttcaacacagatgcctttgccaacgttcgacccgaaacaggggaggtccacttgactgattcatgggccgacgaacaggtgagactaaactcaacgtcttgatcaatgaaacagagattttacaatcacaatttcgcttgctgtttcaaacttcttttcttccaaagattcattgggaaggtgactcgtgggatgatcaaggaaacaatctatatggatgcctcaagcaactctatctcctcaaaaagagatatcggtacgactcaatcttgacagctcgtttcttaatcgttcctgaatacacaaagctaagcgcatgaatccccaacagccatcttcgagtgatgctatctatcgtacgctctctagttttttttgttcaccctatatgtactacagaatctaaaattcgtttcatgtcataacttttcgaattccagggaggatggagcttttcagctaattttaccaacttgaccaacgcgactcatcgtcaaactttcgctcgaaccgccgttcagctaattgaggattatggattagatggtcttgatatcgacgtgagtatacaccgcttttcgtgatctactgttgtcttcttttgtacgagctgaatcagatcgctgtttgtagtgggagtacccaaagaatgcaacacaagcctccgcttacaccgacttgctccgactgactcgagaagagctggatagacaccaagttagacgggacggaactagagtcacctttgatcttagtgtgagtcttccctcgaagtctgaatttaatatcatattatcccaacggtgctgatatttgttcaagaatgtctatgaacctctcatacacatgttcttcatctaaagatcgcagctccttgtggtccggaacaaatgaaacaattagaagtacgcgcgatggatcaataccttaccttctggaatctgatggtaagctccttcctctgactgtgtgtgcattattcagaatacgtacatgcctatactcagtcatcttgtcgccctgggatctcaatggcgggtatataggcgtatgacttctctggatcatggtctcccgaagtcagccatcagtcccaattgtacggtccctcgaacgaagcttcggcccatgggagcgtatcttggtatctctctcagggaattagatctgacaagattgttcttggtgagccaaacaataagaaataattgagcttttcgcaagctacagaagacacgtttattaacttggaatatgaataggtatgcctctgtatggaagatcgtttgccaacaccactgggttaggagccaacttttcaggagtggctccaggtacctgggaagcagtacgtccatatagcttctacattatcgttgtctcggttttctgtcttccttcttgccccgttggttcagaaaagcttatttgtttcatggatatgtagggaatgtatgattacagagctctacctagaccaggcgctatcgtcggtgaagacataagcagaggagctagttggacatacgacccgttcgtatttctctacactctaacgtcactcctgacttgattttgaccgcctaaatgaattttgatttgttacttgtgctctctccatcttttctttcaccgagatagatctttgagagagtttgtctcgtacgatacaccgaatgtagccgccatcaaggcacgatatgttcgagaccagaaccttggcggactgatgtggtgggagatggacgctgatcttcggcccgaagatcaactggcagcgcacgctctggtaccactcgccactcgagagatgggcgggattggaaaggaagaatggaactgtctggattatggcagcagcaagtgggacaatctgaagcttggtaggatatagataagcggttagaaagacgatcgaaagggaatatttcattgagacgacgatgacgtctttccgacgagctttgcttatatcttgaagaactgactcgtagtcatcaatctcaattgaaaagtttcgtaaacacgacacagtgataaatcggaaggaagcgatgaaaggtacacaaggaagccattagaaagagaaaggacatttctatcgtcgtctcctcttcttcttcccctccgcatctgctccttttccattggactgtgcagatccagccttgcgcttgacagacgcgacaaggctctcaagctcggtatccttgttggatgagctgaccggtttggaggcagccccaggaacagtctctgaggggacttgcgtggctcgaaggttgttacgctcctcaagaagcttggacattgccttagtcttcttgaacctaaacagcgagaataggataaaatatagagttgttagtgaatgtacatggcttgacaagggctatgaaaaagacaaaagaagagagaggacaaggaaaaaaaaacatactggggatggctagggtcaatagcaaatcggtggtcaacgttcaatttgttgaatcgctcatccttgacgttgatctcgaatccggtgtctcccaactccttgtccttctctctcatttctgcagtctttgtcttcttgtggggtgcacgcttacgcttcttgccggccccagcgttcttctcctccttgataatatcggtcatggagaagtgctttgagtcgtcgattgcaagcgggttggttgagggcgtaggaagtgtcaataggtccagatgagcagcagtcgtttcagtcggctgatcgtcctcagtcgatcgggtagacggcttcttcccattcttcttgtctccctttgaagccttcttaggagcttcttcttcatcactggatcctccgaagaattcatcctccgactccttgtcctcatcctcctttgaaccgccattcttctccgcacgcgccttctctcgcttttccttctcagcctttcttcggtctcgcattttccgcttgtaggcttcgagcgaggtctcgttagggtcaatctccgcgcttgtcctttctgacagtccaggagcgaaggttatttccattcctcctgcaccctttccttcctcgtcatcatcgctcgctcccccgaatccatcggcggtatctcgatcgagagagccaatgttaccaagcaggagttgtcgaaggttcgacctagcgtcctcatcctcggattcagaatccgaagcaaggaaggctgagaagtcttgctcgtcaatttcttttcgagagagcttccgtctggtcaccgccactctcgacggcgcgtcgtcgtcccaagtgagcttgacggaggagtttcgaagagcctatggtggcagtgacgggtcaaaagaagaaaaagtcaacggaggacctggagactatatgaagtgaatggaactaatagcctacgtcagtaacaaagtccaaacccttgtagatcttgggatcttcattggcctcgtctctatcgaaatcgacgcagaggtagaacagaaatatcaaaacataatacgatcagtttcagccatcaagcgcgagacttaaaaaaagagtacacataggaaaacataccgtggctcatcatcgaaagtcatctcgtccggaacatatctcaaatcaaggatgttggctgtcctctcgaactctgttccgtcacattcagaatgaatgtatccagcggcatcaggagacgagaaggtggcgaccgcataataatatctgcatacatcaaacatttaatgcattcggtattcaatagaatcgccacagcgcagagaaaaaatatgaaggcttaccgaagtctctccaattgatagctcctgagcttgtcttgatcaacatcctccccctcatcttcctctacgagggaggatgcatcatcaaactcttgatcatcctctaactcgtctacttcttcttcgtctgaaacctcaagatcgccttctccatcaacgctctccgtatccgcaccctcttcgtcaacaccatcatcttccatgctctccatatcctccatttcttccatctcatcctcaataacttccctcttcttagacttaaactttctcttgttactcataaacaactctggcggcggtccctcaattgcctctcgctccattctctcctttccaaactcggatggatacaccttgacgtctacaatcttgcccctcgcggtatttccatccctgccagccaggacagaggagaagaccttgtaaagatcggtggcgtgaacgtgatcccaatccaagttgaccactgctagtcggttcgtcttctccgttgtcgttggctctgcgttttcatattcttcctcctcttgagcgtatttagccgcctgagcctcgagccgagcgagagctgcaggatccgtctcgtcttcatcctcattcaggtcgacttctaagtcagaagatgacattgagtctgatctcttcttttttggtttggatcgaccggctccaagctctacaaacgcctcttcttcctcttcttcttcgtcatccgaggaagcatcagaatcttcgtcgccagaggattcgagaagaccttctcctcgggcataatcgatgaagggagcatcagaaccggacggcacaccagcctcagacttctcctcgagtttatcgtcctggcctaatcggtagaactttcgaagttgatctcggttgtgcgtcgcagtaacctttcgaccgtacttatcggttttggctagtgagtatgattgagtaaaaaagtcaagcccccatatgtcaactttcatatagctcaagtcatgccaaatgaaacaacatagaagcaaccgccaacattatcttccacgcctgctattaattttactcacctttatctcctttaccaccgaccttcccgtcgtcaagtattgacttgaatctgtcgtccaattcaaccttgagcttgctctgcttcggtttcctgaatcttggatccgactgaaccgaggcaaatcgagcatccttaggggccatgttgcacttgtgattgataccgtgtgttctttgtgttattggtgatgttataatgaaagagagggacagaaggtttgaaaagcagaggatttctttgagtggtttgctggattgagcgtagaacgagtataagaaattggtttggttgaaattgtggtggtaaacacagcctggcaatatcacgtgtcatgtcaattattttcctggtcaaggacctgattagattatggtctttgttatatcagcctttgaccaagcttagcttggtttcttgggtatgtcttgataagaccaaatttggtctgacggtgtacgccctctgagactcctagttgaggcatctttgaaagtcatgtctatagcgaggttggacactccctccatccaaagctagtcatcatggcgttgtggattgagatcccacaagaccaaatacgatttctcccccgacgtcactgctgttgtcccagaactgaagctcagatgattgacgtctgatacggaagaggcgccctgtggctggttgaactacgtttcgttgtatgtgtgatctgtatagtttgctatttggattagatactttcttaattgttgactttcttctccaagcattgctttatttctgtttcatcttatctttcctctctatccatctactttttccattcagtatggacgcatctctatatactcacacgaaatatggatataactgatatgcaggagagtagacgatcgctatgacttctttccgttgaagatcgacgagctcgtgtgaaaacgcttgaaaattatcatacacatgggcaacaaaagtgcgaacaaagtctggatgcggacacacacttgcgagggggctggttgaatccttcctcttcagaggagattgtccgcttagggaagagaaaaaccgatcaagaggaaaacaacaagcaaaacagccagcccatgacataacgcgcagtgagggatgggcaaggacccattgttgtgaatttatgttcctgactgcgcgtcatcatcacaggcaccagacggcgagagatagaacgaacaggcactctggatcttttagcccaggccttttccgattgtttgcaagttttcttcctcttgttttccttttttcttcttctctcttctcccctttctcctcttcgcttccttccttttctcccttttgcccgtcgtctacgaataccgacgattagcctttcctcgttttgactgtcgactctcgtcacgtcgtcgtctttcgtctacgacacgtcccacatcggttccttcccttttcctttctctcttccctttctccttcctcttccaagtcctgcgaaatcaaggacatccatccatccacttccatctaggtctcgcccaaaccgagtcgaacgcggtattggaaccttcttcgatcccaggaacgactctcaactctatccaaatcagacgggcaggtacctgacaactccatccagtcttcatctatccttacttccagccagcaggcaagcaagttctacgaccttctgtgtctcgtctccgttctctttcccccaaacctttccgcatctctctagaattgattttcattcaggattcgcattcaaggtaggtggtgtaccttggtttcttaacactcactctttcaactaggcccgtccgtcctgtatcccttcaccttcccatcctctcatgccggtcgcgactgcctctgtcgtccttttctacttgacgcgtgctaacgttttacttgacctatcctccacatagagacatcaccgacgctatcgctactcgccggcctctttctatctagtccggtcccgcatctcgcgtttcggtcgatattcaatctatcgcgttgatctatcaagatgttctccacatctgttcccaactcggttactacacttccgtctcctcgcgagctaaacgcgtctgaggtatccaagaacgccgctttatcatcccgattcgatacagagtctggaccagaacgggtgaaaaggtaggtctcgacgtgctacgatattgagtaagaatgcgtattcttttcggatttacttacggtcctgtttctcttcctcttcctcttcttctatctcagcagatttctcaccacccagtcaagcgagcatctcatacaccaacctaccccctcttcggcctcttgcaacgttagcaggccttccccacttcttcagtctcgatccatcagtcaaatgccggattcaagccctttccccatttctcagtctgcagccaattacttggatggtcaccagacgcggtctgtagatgggttgttttcttcgtcttcaacctcgctcgctgcacctgtacctatacacttccaaggcgaggcacctcctcgaaacttttcatctcctctatccaggaaccgtccgtccttagagcaggtcatggctcgttcctctagcgttcttaaacagaggcctaccatcggagagctttcctcacctccgcccgctcgctcagaaggcaacacagacaagaagcaggaagagccaaagagtgagagtcaaatgaatgatgggattgaaatggcgagcgaggtcgatcagaaggcactagagcaacaaagctttgaacagttcaaccggtcaaaccaggaaggagaggacaacggcggggatgaagagctgacgcctccaccgttgatggattaccagttcagtgacacaagctctgagcctgaaacggaacctcagtcgttcgagattgatgaagaatctgataagggagggatgctggacaatctcctcaacggaagcgttctcgctcgggaggaggaacagaggaggtggcggtctaggcgagactcatcggccagtgctcttttgtcgctacatcaaggaagcccctcaacggaccaacatgagttcgatcagcctgtccctcatcctcaatctccatcccggccctgttcacgttctgccaataattcgtccaatccatcgggctccaaccatgccctggtttccacctcacagttcagttcgcatcgctaccctcgacctcccgcctatccagattatcagcgtggactgccgattacaccgctcgacggccgatatctccctaattccaagctcaacatgattgagcgaacactttctgatccattcatccccagtcctcacgtcccagccgctccgttttttgcgagcccgcttccatcgcttctgccttcgtaccgggctcctgctgaacttacccgacatcagttgacccatcgtcgagagctgtcacggacagagccagagtgctactggcattcatcgccttccaatccgtccacagctggccctctctccgtccattctgcttcgacgtcacctaaggaagatctagaggtcgtgatccgatcgtcaagcgaggttgaggaaggattgctctcacctgggcaatctagtcgggaggaaagcacaagcttgccagcacacatcgaggggtctgagacatcatcgacccctcgagaggcttcaatgattccgaactcctcagacataccttcgaacgcttgggcaagtccgtcgttcgtcctaccaagtgcaatgggaagcttgatacaggctggcctgctggcagcagaaagagagggaacgactaagaatccgatacctcgttccaaccaatgggatgaggatgacgacgaacagagacagagggttctacaggatgagatggaagatccggaagaggaaccagcggcggaagaggaatccaatttccagaagggaaaagacagacttcaacctgtctcggagaataagaaatcaaagaagaagaagggcggtctgattaacagcactagcaacaacaacaataataacataaccaccaacaaccataccctcaacgacaacgaaatcggtacgtcttcttatccaaaaaagattgttgtcagagtggtgcttggtcttggaaactaaccgatactttcatctttcttgtcatgtgtatgcatatagccgtcgatatgagccatattcaagagtgcgatctcctacctcaaggagtcccatccgatccacgacccctggataagccttcatactcgtatgcagctatgattggtcaatcgatcttggcccatccccgtcaacggctctcactcgctgagatctacacctggatctcgactgcatatccgttctataagaagggtgatccaggatggatgaattcaatcagacacaacttgagcttgaacaagtgtttcatcaaggtcgagagggaaaagggagggcctcaagggaaaggtatgctctgggccatacaaccaggaacagaacaacagtttgaaggcggaggattcagaaaaaagttagtgtgcaacctagttcttcatgtctgtattctagaaagattctagttcttttgcttatatgtcgactattgttgctgttttctcttcaggactttgcctccttcaggcaagggttccaaaggaaaagctggctctcctgctggtcctacatctaaaggctcgaagagcaaacgaggtttgcccgagcctgaggtgttctatgagcaagacccaggcctcatgggtccgcctcggcctcccgcgtttgccccggttccaccaggaaagaaggcacgattggacttccagaatggatggcccaccaatcccaccagttctcgggctcatgaggtctttgtctcatccccttccacctcatcacccgctcttggctttggacactcctttgagtcgaatatgagcagttactccgatcactcaaacggtctttatccttcgcaccgatcgaattcgaccatgaaggagaagctctctaaggtgcacgatcaggatctagatgactttacaacccctcgaagggcgttatctcggggaccttctggaaacccttctctcgctgaaagcaacgagccgattggatccagtggccaacccatcctgcctcctagtgctctgtcgggtcttcctcacttgaccccttcaatatctagtccggtgtcttcaagtcctggaccggcaacattgcctcggccaagtttgattcaagctcatcgcgctcttctcaagagctcgcagagagatccggagaacgtcaccgttattgagggagaagaatcaaccccactacgaatcatgatccctgctcaggaagatcttgaaggagaaggtttgcagcccggattcgagttcgatcaagtccggttgacaccccaggatcaatctcaatcgtcgcattatcaatctcagcaccaacaccatcatcaacatcaacacgagcagcaaacgtatcatcatcagcagcagcttcagtctcacccgccaccatcaccgtctcctcattttgctacttcaacctcaattaaccatagcgtctactctccaatctcttctttacgagcaaccgcaaacgatgaggaatctcaggaaccctcggtatggaccacatcgatgatgcataatccgcttcatagctcgatccatcataacccgatgcctgcatttgcgcacatgagtccgctgcagagtcgaaaagcttctgccgctggcggtggaggatccggtcacaggcgaggactcagtgcgaccggcgagctgatcgctcatgctatgaatcccccgtcgtcttccgcctacaagacgccagggatgcaaccaatgatgtccagccctaggcgacctctctccaagccgtacagcttcccttacaaccacggttctctttctcccgcctcggcacggaaggcacccccaccgttctcttctactccaaaatcggcctcgattctcacatcgtcagctaattcgagtaatatccgaacacccgcctcacagacgacatacggactgactagtcagtctccggcaggggcggccatgcttcagcatcgagccgagatgggtatcctcggtttcggtcttggatttggcgattgtggaaattatggagactttcaacccggtactccacggttggaagatccatatgattccagcagagcagtagaggacgagctgatccacctgaacgcgagaaacacaggtagtccggcgagccattggggtggaatggggactcctcgtatgggccttggtatcggtggtggttggtcgttctcacctgggatcggcttcggagatcgtctgagaaatagctccaactaggtagtcgatttcataagagttttccaacctttttttttctttttttctttttccttcagtcgtctctttccgatagtacatcctgtgcctgtcttttcataaatatctactcggagggctctcaaccttcttttgcttcctatccattttcgctagtcatttttctttctatgtctgtcttacatcaagtaagcgtgtgttcatccatcatttttcttttttcttgactgtatacttcacttctgcttcttctgttctcatcgactcctctttcttctcttcttattctatcttgatctcttagtatattctcatttatctatacattagtagtacatctctcttgtcgacaccttttcccgtagattccttcattgtttcccttttggctcacttgccttctcctctgtgtgtgtctctatactgcgtgatggatctctggtcgtccgtctttttttcctcctcttatccttagtcatgttgtgctatatgttatcttgtcccgtgcgtttgactctctttcttcagataaaaggactggaggagtcagtgaaagtgcaagatattaaatagaacaccatgtgaatcacatcaaactagacatcgaagaagaaacaactaaacacaagtaaaaagagaattgaaaaaaagagttaagagtaaaccagtctacgtctatcttttcgttcgccttacgatgacatggcggtcatctcctccaacacatctaggagtgtcgatgcactccaggcttgggtccggcatgaatcatggcaatgtcctccattcgaattggtgagctcgggtaaaccagcccaagcgtcggttgccacatgccttcggtgctctaacaagatctctgaaacgtagtgcaaactctctgacgggtctttcttgccgagtccgactttagagtcgtacatcagataagccttgaggaaccaccccatggggaatacccattcaggtccttggtggtagttccatcctttggccacagattggtcgtcggagtcattcgagttgtcataatcgccccggtattgagaatctccgggatcgagcgtcttcataccgagaggacctcgaagaagcttgtcggccatttgaagcgcaccaagtgctttctctggagtgaacaactcgggggcgacaatcgtggcgataggaaaattagatcggaactggtaatcagaccattctcgtccttcgccagagcctacgacgtccttgtagatacctcgtcggttgacaatactcgggttgatgttgtattcagagtcctcagcgggatctgaagagttgaaaggtcagtctgtctgtgtcgttaaggaatatcatctggtggcaacgacttacccgatggaacgtagtaattgtattcaaacgactcttggatgagatcggaccatgtttcataggtaacaaaggttttctttccagcaactgtgaaataatatcactcgttgtcagttcgatacacaggaatttactttcggttcactatagaaaaagttatttactctcagcgtcaacacccttaaaagggaactttccagccttggaaagggaagcgacccatcgaagggaactcttcagcaaagcggtaatctcgacaggggcaccatctcggggagtagcggggaggcccttgttgccagccttggcggactctcccatcttgtcttgccatgttccacagttgtatcggtttccgccgtggatgaatccggttttccaatcagtatagatctcttgatcgaaacctcgatcatccatctgcatatcaaggttgggtccggcgttgtactccctaaacttgatcccagatgcatgccgttgcaatatctcctgaatcaactcggcgaccgtactggaccaagagtaggccctaggatcgtcccaagcgacccaggtgtcgtcggccgggaaacgtcgcttaactgtatctgagaggatggcgattccattgggggccttctggacatagtcttggatgttttcgatgaaccaccaaggtccatctcgacagttgtatcggggagttcggcaggaatccagaaggttgggcaccaaacctgacgccaacaagaaaatcattgagaaccaagacacataagaacgagccgtatgtgtcaactaaccatgttttagaacagatccaaaggctaagatatgatctcgagcggctgggaatgcgcctgtggttaggaagagaccccggagggagatgaatacctaacaaatgagcgataccagcacttggtaagttcttcggtaggggttatatacaaagagtggaggagaggaacacgaacatctcgtccccagcacctagcccagttggtcgagaaatgaggaagccccgcagcgagcgacggaactggcgttcccgggtcgatggatgcactatgtactaggccgtacatttgaacggcacaaagcgccagatcatgagtaaatgagtggccggacgagatgaaattggtgcattggtcgatgacggctcttctggcagccttgtaggcctcgtacatcacaattgcaaagtacttaggtcggaggaacgacggaactgtgttcttgatgacgtcgaatcgatgcttaaaccaagcggccggcttggatagatgaggcaaggctgatacttgcctgaacatgagtagtatatagagcaagccacgatgagtatagtacggtttatccaataatcgattagaaatgatactcacctttctagtcgctcaacaacgtaatcaagcgcccaagccccgtgtcgtaggtgattgcagataggagctccgagatcctataacgatataatggtacaacgatgaagtcaaaatgatgaagcagaagacggactggtaaacctaagattacatacgttgtatcgaataactggcttgaggggcgccatccagccttgcagaccacaataaaccagagtaccatagtctgggatagtgtatgcaccatctccatctagatcaaggagcagtcggtggtatacgccaaaagcatgacaagctagtcaatttattgtcaatttaagattagattctatcctaacttactggttgcatcacgctcctcgccatcagttctatgaaggatcacattcagatcaacaagatccaattcgctcattgcttcgtccgctccttccaagcacaccgcgtcgaggtttcccgatagtcctggcatgtcggttgcgaacaccataatcgatcctgctgggaactcatccgggacgatgatctcagtgaacgcgccctgatcatcatacccatctctttgatgaggtgcgggaacctcgttcaacgtggaaggcatccctttaagggtcttgggatccttgggatcctcatatgaatggattttgatagaagcaccggtaatgtactttgtggtggtacgagaaagcttgatggggttgacttcggatagtgacacaaagaacagtgagcaatagggaataatttttacagaggcatgatggagaaaaaaccaaccatatcctcttgattgcaagtcattcttattgaacgcagtatgagcaatgagaagatatcctttatgagtcttaggatgaactctatgaatgacgatgtactttcgttcgaaatacccccggataaatcgtcagcattgcaagcttaccccactcattgcaagagaagataaagacagaataaggaggagacatacatcattttcttgatggacgtgtccttctgagaatccatccagagtcatttctgtatgcagatgattcaataaccttttgatctttccgattcctcggttgacaccctctcctccaacatcgtacaacctcgtgtccgtcacgagattcaaaagctttgggtacagatcgtcaaaccctttgttggagccaatagcagcagccgcaaatgtagcgagcgctccggtactcagcgcatcttcacccgatcgcttgtcaagaggagactcattatcatgggtgacatccatgattagcgcgtggggattggaaccaaagatgggggacacaacgcagggtcgagagggacccttgccggtgggagatggaagcattgcaggagaactgaggcacactccatccatagaaccgataggcttatcgataccaaaccggtagagtagtcgagattgttctttgggatggaacccgttcatcatctctcgaatcaacgagttgattccgagctgcttgataaacaacaggtccagatcttcacttccagtgaacagttccgcgaccacatagaggttgggatttctctttcgggcagcgtcaatcatgtggactccgacttccaatggagtcgaatggcagttgtccaatcgaaacccatcaaacattcccgcaagcagctcgcagtactgcgtgatgaatttccagaggaacgggttgtcctcgggagactttccgtatcgcaatttgacacaatctccccaaacaatgacttctcgtcggaggtatgccttggaaggttgctcagcaaagttagcaagggggtcagcatcccaaatccaaccgttgttggcgagcgcaagagaagcaggatcgtgcttcttggtcgtatcgtttaagggaagacgggtgaaatacgatccgacaataggcgatctgtgggaagagaatcattgtcattggaaacaattcatcaaggaggactaatttcaaaagactgacctagtagagatctctcccattcgaggtccgttactctccaaccgctcgtactttgccctcgacacgatgttatccttctgggcggtcttgtcagagttgtattcttggtaaagatcgacgttggccacgttcaatacattggcccatcgatcaactctgtctccagcgtctccaaaggccgcctgaacaaacccaagagcaacctccaccggaaccctcacgccgtttctcttagcaaactttccaagtccctcgactgccccttttactgatttgagaattgaggcaagctcctctatggactttccctggagcgaaggaccctcccaagtttggggttttacagactcgagcgcttgagcgagctcctccttatgggatgcaacgtggaacacatagtactcgtataatttgagatcagagatcaccctgtctacagcggaagcaagtgcattgagatcagattccgagtttatgattgtagggattcccagggaagcgagacgtccagagagttcgatgatggcagtatccagctcaagagcaggtgcgagatggggagagttgaccacgttgtaacctagtaatcatggaaaatggtgtcaatcagtaccatgatagaaagcaagtctattgcagataatcttaccagactctgggtgatcctccaaccaaggactgtcatttgcggtgtggttcaacactacatctgtcagactcaacaacccatacttttctctgcattcggtgatcatcttgccaatctcctggacaccatcgcctggctggccctttccttcaaagaagagtgctgggtcaaacttgagctgatctcggatagagtacggactaccactctctccccttaattggagaggtgtgaagtgaagcatgttgtaaccccttttggaagcctcatcaaggtaaggtccccatttcttaatgtttccctgccacttggcgatcacgctaaggacagcaagcccatccaacgggcataactgggcgttcgaaggaggcggaacagcgccgccgtcaggctcgacaatgaactctttcgataggatagggcttcgtcggggaagaagaataattggatcaaccgaaaagaatcctttcgtagattggattcgctttcgaggggccgaaggctcgttctcgtcaatcggtccgtcatgttcgataaagtaggcaaacgaccccgaatgggagattggaactgttgagtgagttagtatgcgtttggccacagcctaccatggaagacatcgtatggaatacaaaaagcaactaacgatctatctgaacgggcttagaaaagtcgatgggaagccttttgtcccaagtgtagaaaaagtggtaaggtgtgctgatcgcatagactgacgaatggtatccaaatagaacgtcgaatgacttacttccgctcagcccacctgcttcgctcaaaccgaccaccatctaggggaaagtcagacttgatgactccgttcctagtagcaggcgttccaggctcaagagagatcctaagcacgtagggcttggggtaagggggaggaagtcgaatgtactggaggccgtacgaggaaacagatgaggagaccaaacgcagagcaatcgattaagttccacgcgcatacaatacatggagaatggggtgctgaaggcgacagggctacgcggacgaaaggtacttacagacttctcctttgaggggcttccgtcaggctcgagggccaactcccaaacctgaatgtcaccctcatccttgccgacacctccttcgaagaaggaaatcccttcgtctgctggggttctgaccgagatggactctttggtgactactggaacagtcggctctgggatcgagattgactgaggcttggcctgtgcacgagtggatgatctggtcgtttcttcgacagaaacagccttcagggcagatgtagcagagatggcttcgccaggtgaagaagcgacctgggcgggggcggcctgcacggtgttgacagtcggaggagcgactgtgacaggaagggatggtgcaaccttgggagatactttcttagaaactttcttggccatgttgtgaagattgctcgaggaagaagaaagagtggttggtgaaaggtatcaaagattagagtagagatgggaagggacaggtaaagaagtgaaacaacaagtatacaatgaaaagtgacacaacagcgagggatacacgacttgtgatcagaggaaagagtgagaagggaactgtgggtgaggatgaagatgaggatgggagtagaaaagaagaggaagaagaagaaggagaagagagagttgtaaagtcgagatgagaacgttcaactcaggatggaatcgagccgagaccaggttaggaggagagctgagaaaagggcagagtgacgttgtatgagtatcgtctcggtccgatcgggcctagaccaggatcgcttacgtcaggagccgagtgactacccaagttcctggttcgttaatgacgcttctgtcggcagttttatcgtcttcacgcgtggttgtgactttttctttctttgtgttttcttatttttcttttctttcttctaatttttcttcttctatattcccgaacgatggcttgctacaaagcaagttttttagaatcgatacacgttctgtcattttgagcaccttatcaaactatcggttgtctacccttcattcggatacaaccgagtaaagatacagagaacaatgaacttgataaagataccaaactagaggacagaggattcaaagatatgaatagatcacaagttgagaggagagaataagaatgacgagttcaagtaattgagaaagagagagaaagaaatgcagagggtaggaagcagagggcaaagaggacttcagcccttgcagtgagtggagagatcgtttggcgacgcgagaaacatagattcagccagggccaaccagaaaattgatttgatgctgcggaaggacctgatcggagacttggctacccggggtcagtacacgacattcactggggacgccagcgacggaggagagtgaagcacgaaacaaggggcagatctttctttcctgtgcacacgcacccgcaggatagacggatctgcttctggcccctcttgctcgccgggggaaaaggaaaagaaagaaaaaaacaatatcatcttattatatcccgttaggc

SEQ ID NO: 1195 - DNA, 5125 bp, Xanthophyllomyces dendrorhous
gctcgataaaccttctcagacacacgcatttacttattctcatacacgcacatcgatcaattcacttccaccctagccctgcctccatcttctgagtaagtctcgttcagttgtttccatctcaaccgatcgatgaagatccttcttttcgtatcattagttgtcaacatcgtttttctctatttccgtctcaagaatctctacatttttctggagcgtaatgaatagaaattgatcctaattttcatttgctctttctcagtcgtctctttcacacacatcttcttctatacattgttgatttgtgtgcctcggtcgacagtttgatcggacactgtagcttcagttgttgttctcacccaaacgtctcaacaacccaaagttctcgtagcagtatcacttggtgagtatctggtttgaaggagagactcattgtctcaattggatttagaccattgaatgctcaacgatctagaagcatcctcttgcctcttctcgatctctagacgtacactcgccctccggtgatcacttttgtggttgaccgtatgctcctttttgtccttcccactcctcttgatctggattatcactaacaacatctggttcctcatagtttcctaatatttgcataccctcgaccgacatattctgaaatttaaattccgtaacgccacgttgttcgaaaagaagacgcctgtttaaacacacctcaccgacggtaatcaaaagcttctcattaatcatataacactaagtgtatcgtgactgatcttgcctctactcttctgtatgtgcctgaacgcatggtgtgtcatacgtatctgcacacataaactgggtaacatctaaatccgtgtttctttgttcctcccccagccaatgtcaatcaccaccttgtcaaactctgcaaccatgtcgactccccaaggacttgtctcgaacgtttcttcggctatcagtgcactccctaatattctcgtcccgtcatcctcaccacacgactctgtacatcctcatcctcacgactctctccgagaggatcttccaagatcacctagcccgctctcctcgccatccagaaaagtcagacaggctgacatcgtccaggttcccatcagaatacatccaaagccctttgcacagaacgggcaacaaggcatcagactgatgttcaagcctgaacgtgtccagacagacacaggaaaaattcatcaggtatctcattctgatacagaaactgcctctcgactggatgtttccgatggaacagatcaagactccgaggaagaagatgaagatgatgatgaggacgaagacgacgaagattatacagagcatgaataccaaccgacgaggccaatgtctgtttccacccgaaagtcgctcgccccgccggggaccgaaccggctgctgcgcccggtgaaacaattcctgcattcgcgcctgtgcctaccactcgcaaaaacgctctcccactgcctcgtggtcgtgccaattcaccgagaggtcgtcttccctctcccacaccatccataccttctacccgacagcgctcacgttcacgttcacacactctcacttcgcctcttcctgtgtcatgttcagcttcggttgatcatgagctgtctcctgctattgaatcaaattcagcatcagtgttgacgtcagcagctgtagcgtcatcgccatcgtcatcttcttcaccttcatcgtcatcatcgtcgaccagcaaaagatctgtcccactatccgaattcaatatcgactccttttctggatcaaaacgaactcgaagaatatctcactctccaatacaaccgacctccgctcaaggccctaatcgccggagtcgatctagttcaccaggagcctccgtcgattcgtcgtcgacttcctccaacaacactgggccacgatcgacttctcctgtaaaggttgatcgtcggaggaagggaaatggaggtggtagatggccgtcgggagcgcctcgttcatccactgtctctctaaataacagcggtccgagtctctcggatggtcagtcggaagtgaatcaaccgaatggagtgttggacgttaaaatggaggagcagtcaactgaattgttactgaacgtagggaaaccaaaaaccttggtagacggcgctcaaaacgacgagggaaaagaatatgtatcagaattgaggacaaacgcagaaagggcgagcattattagtccgataaaagcaacggatgtgccttcatcggcccctcccccaccatcatcagaatcaccgtcatcattatcaaagattgactcagttgaatcctcctttaatccgctcaaaagaattgttccaaagattgtactggttcagccgaattcgttttcagatggttagtttgtttgtgtttctcgtcgagtcttcgagggtacgcctctcgactcttctgtaaggtgttctgacaaaaagcatcctcgtatcttgatgtcgcccctggtgatcccataatcattgatccttgtggccttcagggtcacatacgtccactcccgcgttgttaaccaacgggtcaaccaaacctgctcccacgtcagtcgtaccatcgaagccaaaagcgtcaagagagacaacgccggcaggacagccgtcgaagaaagctctacatgcggcagagatgaaactgttgagggcgcggaagaggcaagaaaggttggagcttgtcgagatgttcgtcctcattacttccctccggcattgcctcatctcctcttcgttttcactgaccttctgaacccatttaactgttctgcttttgaattgatctaaatggaactctgatagtgaactcaagatgttggacgagctctacgagtctgtggcgaacaatactgatcagtccctggtggagtgctgggcagatcttcaaagacgatacactggggcctctacattgattgaaaatcgaaaacggtatgggcacctctattatattctgtagttttctcctgtctggactttgaagtttgaaatctgattaggtctacacatttttctctttcatctcatcagacaggccgaagcagagttaatgagggtgtatgatgctgatatcagtttcacttggagctggtggaacgtaagctgttttctctgtgtgtttggccatatccggtaatcaagatttattctgatgttatcttttgtacttcaaatcaacactttccaataaaccaacagatatcccggttcgatacgcttaacaaggagaaggccgagctgtccatgaaacttcaaaagcttggccgggaacatcgacaaatccagactgccgctcttcctccgtccgagcggtttttgcctgtaggaagccgagcgccgttggtaccaaatcctcgatatgttgttcatactcccgagtaccgactttcaaacgataatctggaaaaacaagaaaaaaagagaaagaagaggaggctcgtggaacccgaatcgagcgacgatgaatccatcggggttaaaggacttagaccagacgatatagagtctgatttgaacaaactcggattgggtagagctgaaaaagagaaagaacgacttcggttgatcggagctagacaggaagaggaaagaatgaagcgggaagaggaagaacggattcgagcccagctagagtgggaggccaaggaggctaaggaagccgagagaaagctagaggagcaggaatgggagagacagcgagcgatgagcgttttagaggctcaaaggctcgaagccgagaagagagagcaagacgcggtggattatcgatcgaaccgggactccggctcatacccactacccatggcgaaaccttcaaggacaagggatccatctggaaaaccaaaatcgaaagcgggaaaatctacttctacttccaagccaccctcacggtctgctggtatgccagctccacctcccccttctgcgcctactcttccttcttcctcgtcatcctcttcggatatcaggcctatccgacctgtcaagatggaaccctcgtctggcccgatctttccatccaacgctcctctttctcctgtcatacccccctcagctcacccttggaatgaccctcattctcgtgagccggcctcttattacttaggaggaggatcgtctcatctaccttacccgtcgcctcactatggtccaagttcctatccaaacatgtctctcccgggtggctatccccagcatttctttccttcacctttgaactggattccgggtcagtcagctaaccaagaatctacacaccaatcggtcggtccacagggtggctcgtcggggtcatctggatcatcaaggaatgtgaccctctcgacgcaggaccatccaagtgttcatccgtttcacttgaacccgtacgtgagcttctccagtatgggtgataatcggagtttgttgtcgcatgttccccagcagcagcagcaacaacagcgaccaaaccaacacccctatcagcatcaaccttaccaatctcaacaccaacagcagcagccatactcgatcagtccgtcgcatcacgaacatattctgagcactcagtcgcatccacaccaccatcatgttgcccatcgtcatcaccaacagccttcacatacaccgtctggctcccaatcaggtcttctggtcgaccctccccatcgtccactctctacgtccgtatcgtcatcgacaacttggcgccccgccggaggaagtaaaccaatcgaacccgttcgatccaactatctcccccattcatttctaaatcctctaccttccgttccccctaaccaggcacaccatccacatgcttcacagcagcagcaactaccgcctcttccattcggttcctccaaccaccaacttcatcctttaacaggtcctggacatccactttggggaacgaattacggggtcggtaactctaggtaaatcatcgattttcaagacctgagatgaatgaggacgtagaaaggaccccaaatgaacgagagacggatgggtggaacgaaacgatctttatgatctgtacctctatttcgctaagcgtgatgattcgattggtttttcttgtctgtttctcatgtgtaacaaaacttatgttgtatct

SEQ ID NO: 1196 - DNA, 24652 bp, Xanthophyllomyces dendrorhous
aacttatgttgtatctagactgtcgttcgttaatgagatgaattatcaccatttctaaactcattgtcctttattatattaatttcgtcccgatttgtaaaaacgtaaagaagggataataacaattcattatatacaatgatggacgaaggatctcttctcttctgcacggatagagaataaaaaatccgccttcatgaaaactaagatctacagggtgaagaatcgttgtttggttcatactattttcgatcggcgtttctcaggtcaaccgctttgacgcaacagtacagtgtttccaaaatcggaacggacatgcccagtcgtttcgcctctcggagaggtgttccgaggatgactgtgagtgttaatatttgcgacaaatccaaataatcagtttcagggctagtctatacttcttcaaatgagataagattggagggaaaacgagagggaaatattttatacggaccttcaacttcggtttgggatccgttggcgacgtcggccatcatcgaagaatttaatccctctttgtgagctttgcctatagtgttgtaggcaattgatagggtcgattattgaggcaaatatcaacaagaaggtgatcagcacattcaaaccacgacagtatcggtcaagatgaaaataacgcgtacatcgattcatcagaacgtccacctccgagtcgggaaccttatgtcctagcgcctgggccacagctaccacttccttcactgtaaatgaagtcgacggcaaagatatttcagtgcacacttttccgaagagggaaggtgagaatagagcccaacatacttaggtttcggcagagatcctccgagtaaggcgtagcggccatgaatttggctgtgttgtactgcacgagggcggtggtactgttccaagctgcattcctataaaacccatccgatccgacacagaaaattgcaatccaactcatgagtgttctcattccttctcttgagcaggataaactgaataattagagacgaaccagatgactttcttccatctctctgtctgcatatctaccacaacctcagcccctatgccatcgacggcttccagcgcatcttgcagtattttcgcgctttcaagctctccgatgtcttctccattgtccccatagaaaggaccgaattgcatacatggtgagggtaagttgttgtgattgatgagtcctgctgacggttgggaagctccaatccaagtgacagctgtaaggattgggttggtcgggaaggccttcttcagggctaagagttccgattgcgaacgtttagaggcgttgggttagtatatatgtatatctgggcataggcacaaacatacaggaagctacgaacgactctcggcgcctacgccgttttgaacgatcatcacggcagtatgatcgggagtgaccgccggctgaatgatctcctcgagagaaggcgtagccgatagttgcgctttgttgcagcctagagcagatcgaaagttgggtaagcagtcatgacagagaagatacagtatcagtaggactagagagggtgcatacagatgacatagtcaaacttaggtacagccgtgtgagcttcttcgggtgttctataagctggtcacatcatccccaggagaaagaaagagtgaacacaccggatcaactcaacgtcgactcaacagaaaattttgaattaaaacgcgaacaaacctccagcaaatttaagacctttgacagtaccgaacttgatgctctcatagtctaatccctgatcctggatatgctcgaggtttgatcgagcgaccacatgaactcggcatacgtccttgagttctggttgagaaaggatgagcgcgtagacggctccgataccgccaagaccaaagatgagaatttccagaggcgccattgtatttatgtgtttgatacgggtatcagagtagagaagaacgagaatagatgaacgataagtatacggagatggcgactgtgagatgtatgagtactccctaagcccaggcagtggatgtggtcggatatctttaagtagagatgagacgccgcctatagccgaatcacgtgatgagtttcggttagaccggaccggccgcccggacgggtcgttgatatgccgagtgtacaagctcttaagaagcgtctagcccgccctcgctttctttcttttctctctgcactcttccccatccttagacttcttctctcattcatctcttgatcttaagtaaaaacacccactgtaccaaattacaagtaacaatggtttctcgagcatttactcctggtgtaagtctatcgaacaatcatcttcttcatcgcatggtactcctacatgagtggatcaatttgacttgaaagagtcgaagagatgcgtggacagcaactgatcactggcatttccgatcgtccattttttctgtgtataaaggttttggttccccttaccacccctttcaagcctgaaaatagtgacgtcgatatcgaggccttgaaggctggtgtcgttcgaatcgccaaggctggaatgggcattgtgagtctttttatcgacctatccgttttatacttttcttcttttgcacgtttctccatcgggagctagactcggccatgactaacctgtatgcgcaactctattactcaggtcttgatgggaaccaacggagaaggtacgctttaccgtctatcacatactaagttcaatacagatcatcatctataacaacttgttgtttcttttgatccattgtgacacagcttcccatctaaactcggaagagcgaatggagattatctcttctgcccgtagcgcgctagatgaggctgggttgaacagcattcctctcttggtcggaaccggagccggttcggcccgggcatccatcaaactcgctgaggatgctaagaaggctggagccgacttcacgttcgtatcttgatctatcacttgaccgtctcaaggctatcacaaaatctagccggggcactgactttttatttcccttgcacatgctgcttccaatgcatatagtatcgtcattgctccaggatacttttccttcgtgatgggcaaggatcgacaggctctccacgacttcttcactgaggttgctgacaagtcgcctctgcccgtgatgatctacaactttcctggagcggctgctgggatcgaccttgactcggatctgattatcgcattatctgagcatcagaacatcattggtgtcaagctgacgtgtgcaggtattggcaaaggtaagcagcgcttgcgtttattttgaaggcaaaagttcgaaaccatagtctgtatgtgggactgaagactgattgtttcttatcgttgtcaccgttaataaaaactgggcaatctcacacttaggtgctagaatttcaaagtacgttcagacggaagagtacaagaagcggcacccaactcctttccttgttatgcctgggttcacggactaccttcttccttcgctcgttgcccgaggagatggatgtatcaccggaacgtatgtcctcagctacttttgtgattgagagagtacctccatctttgacttctttcgctgactaatccgcttgttcatcatcagtggtaacatcattcccaagacgatcgccaagctataccagctttccactaaggctctctcctccggtaaggttgaggatcttcgagctgctcaggagcttcaggatttggtcagccaagcggattggatcatcgttaaagctgttcgtctctttcctattcttcagtcagttggcctgcatctgacaagtcgattgctcattatgtatctgcaaaattaaatctcgcaaataattagggtattcccggaacaaaatacgcgcttgatcagtttgcgaccgacccgacgggtaagaacctgaagttgggaggtgccgttcgatcccctttgactcaggtgtcggatgccacacggaaattgattaacgagggaatgcgggagtcagtcgaatatgagaagagcttaccttagaatttgttaggattttctgtactgttcttgatgtgtatttttgttcttttatcgttccctctgggtctaatgttgtaaagcacaagtaacgtcttctgacggccgccttgaacttccttttttcctaaatcatatttcttcttgatccaatcctacgctctatctatattgtaagatgaatgagcgtgtacaataacaaacgggcagaatgatgaccaagcggtaggttgaaacgccaaacggaagacggcaagaaaacggagccgaggccgggcaggagtcctggtctgggagagtcctgcagagctgacgtaatatattagtagatattgagaactaattcctcaaaattcaggattaacacacacaccttatacacacgtacactaagtggatcgactctcttccttaggacctctcattgatttatctacctcgatcgtccgttccaaccatattgacaggctctgatcactcttgaatcgttcagactactcttttcctatcctccaccaggaatgccaacaatttccaagacctcctcagcagccgatcatcttctcagcggagcggtctccggtctggcttcttccgtcctattgcagcccttggacctgctgaagactcggattcaacagcaaggacatagttctaggtgagttttcggaatgtcgtagacgttcttagttccttctccgatacctttctgtggtgatcgatcgtatcccgtagaaatgtacgactttacaaacgcactctcctctttgtcgtttcttcatgttcgcttttctctacttcgacaacctcgatcgcgcgtccgaactttatgtgtctgggtctcgaccatgctgggtccacgttctgctagaaagacatgggaagtgactaaaaacgtcatccgagatggaggcgtcttgggactgtggagaggaaccgcgccgaccatcgtaaggtgagttctttagttccctacgcacgtccgattgcgtatcttcgacttattcgaggctcatacgactgtctcctttcttctcaatcgcccgatcgttgtgccgttgtctgctgctccttctttcctctgtcgtgctcctgaaggaacgttcccggtgtggctgtctacttttacaccctttcagagattcgagccggtctctccacccttggctatttttctgtctcgacaccacatgtgcagtcctcttcgtcgacagcgacaacaacatcatcaccgaaatcatcatcaagcttggtaaagctatcaagagaagggaacctgctagcgggcgcaatagctagagctggagttgggttcgtgctgaatcccgtaacggtgttgaaagcaagatacgaggttcgtccaactgtcgttcttccattactttagtcatcggaggaaacgcgttctctttactctcttcttcgagtataagacctgtttccattcatacaccgtgcgcgcgctcacctgaagaaacttcttggtatatgttttttacttcttcatcattcttacgatgataccaatccgatcagagcaatctatacaactactcgtctatgctgcaagctttccggtcgatatatgccgaatcgggtatccctggtctcttcagaggtttcaccgcaacggccataagagacgctccctatgcgggcttgtatgttttgttttatgaagaagcaaaaatgatagcaggtacgacgttccgcttcttctcacttttgtcctttaagatgatttcttcatgcccggatctattagttgttgttgttttcgtttcttcttttctttaggtcttcgtgtattttactgacaaactctgtgtctgtctacgtgtttctctctcttcccggggatgggaacactatacagatacattgattgcttcaagaccagaactagggatccccgctccaataatccacagtttgtcaggttagcccaatgttctgctcctggctctgatgaatcgactccgtttctctgcgttgttctcactcttttcctcttctattcgccttctgctttccgtttcggatatctaggcgtgtcggccgcaacattagccaccctggcgactgcccctgccgactgtatcaaagtgagtttcaaaccaccctatcatcctttatattcatctttgcagtctgatggaagaaaggcatacaacggatcctgctgatctaaccgacgatgttttgttcatctttttctactcagacaaaaatgcaagtcttaccagatctgcatccgacagttcgcaaatcgtcctcgttaatctacaaagtacgtctcttcagttcaccttgttgtatactcaacgagcaaaacctgactgaatcgtattctacgtaaccaaccccgactgaaacgaaaaaggaacacggcatcaacggtttcttctctggtgtgagtttacgtatagcccgaaaaggagctagttcagcaatcgtttggacagtctacgaaggtctccttctcggcttccaaagtagacaacagcgatcgacaagcttaaaggcggatggagcatgaacggaccaagcatacaggggattggaaggaactcatatatctcaaagacagatgtttatgtatttatctaactctagtttgtcgatgtttgatttagaggttttctctggttttcttgttgtgctctaccattccatttgcaagccggatgaaagcaaggtcaggagctggcagctgaagcagtcagcgagagacatgtttctttcttcttttttttttagcacgttcaatgtatctcgaaaggttgttagagtagaaacaaaatcagaattggtacagtcggatattcaaatgtgagtttccgtgtcgaccaatagagaatctggtagatctagtaaggacgctttcctagtgtgtatgtattcatgtcaaacttaaatgtgtcgattgaaagagatgtaaatcttctgaaagaaatgaatgtgcaaggtatttgttcttttttttgttctttgtattgattgccatgaatcttgacactccatcatccaaaggacccagcaagctacagaacttaatcctgcttggtggttcctcggataagaccagtccttcgggcggcaataagaccagccttctgaccggcaacggcacctcgggagatagtggaagcctttccaatgtgctggtggtttcctcctccgtggggatggtcgacggggttcatagcaacaccacgagttcggggccaggagtttcgcttggccttgaacttgaagtaagctcgtccggccttgagcaagggcttgtcaactcgtcctcctccggcaacgataccaacggtggctcgggcagatccagagacggtcttcttggcaccagagggcaatcgaagtcgggtcttgttctcgtcaggggagtgtccgatgacggtggcgtagtttccagaggttcgggccatagctcctcggtctccaactcgctcctctacgttgcagacaacggttccctcagggcaggaggagaggggaaggacgtttccaacgttgagggaagccttcttaccgcagtagacgaaggatccagtggtcaaaccctcggtggcgatgaaagtctcctttcggagcttgtatcggtaggggtctcggaagacgacctgggcaaggggagcacctctgtaattttgcgggaggaaaaaagcaatggtcgtaaggagcagtgatttttgagatcgagatcggttgtggagagcggatgaacgatcggattcagtgtcgaaaagtcagacagagagcgatagggaaaggtcgaaggaagagaatagtacgatcaaagtagagtaaacacgatcagaatgaatcctttcatgtgtaaagtaaagcatggtaaccccatcggagactttggaaaaatgacacgaaccgtccagagtcgtggatgatgtccttcacgattcctcggacgtatccgttcttctcggcgaagtcgagagctcggagtctagccggctccttgttgtggtgagtgtgagacttgaagatccctccggactttcgctggttaaggatgactcgctgagaagaggcaaagacagaaagtatataccggtcagcgttttcgcctactagaggaaatctatcgaccgctcgattggagctttttagggcgaagagaaatttactcactcccatggctttagatcagatccgatgttcagaaggaaaagtcgaaagttagtcctgtgggctacttggagtttctcaatgtcaccttctcctttcgtccttctccttgtcccgccgccagatttgcagtccgtcttcgtattgcacctgttttatttcatcccaacagtttcccacgtgtcctccattctttcgggccctctgtatctgccacaccctactcgtccacattcgagaaacatgtccggcaggatgcaatcgttcaagaaatatggattgtgtcgaaaagaagttgctttctttctaaggagggaaggacaaggtgggacgaaagggaatttgctgcctgtaaagaaatccgtgagcttacctgtgatcaacaaaaaagaagaaaattcccaaagaaacaaaggacattcgttagaacatatgtactatccacccgagcaaagaacatgctttgtatctcatccaaccagataaactggcttacgcacctgattagtcttgagtggaagtatcgcctacacaaaattagcgcaacggtcacttgttcgcttgcttgtcgcttggtcggtcaagaatgcgaggagaaaccaaagtcagatcggatttcacaaaagtcatacgctgaatttgccacgcgacgcgacgcgtcttccggtgacgcgtctttcaaagacgcgcgtcaggatgattgttcatgaactgttcgctttcttcagaagtcgctgttgagtccgatgtgctcttatcgctgatgtttctcggtcatacagtcgccttgtcgttctgtctctctgtctctttatatgctcatgtctttgcgtgtggactgtagagccagcactgatggacgtcgttaggccgttcacaatggccgacagccagtcgaaccgaccagaagggattccttgcaaagaaggaggcatcaatctcaacagctgacaagacacagagaattcggggtgatagggacaatcttctgcgtcaggatactcatcggttgttcttacttggagaagttctgctcgcctgggtcgctcgacggccgcaggaaggctggagacgtctctggacaacggcggtctggctgagcacgacacgcagtggtcgctctctctctctctctcaagtcatggaagcaccttgcggggatgaaccaagacgttcggaaacagtggctgtggatgaagaacgatacggaagggtcaaccaccctccgtggcgagtgccgcttacgctcacactcacgctcaagctaactgtgcaaacagcctttctcacctcgcaaactgccttaccctcctcggtgtcgttcttcggcttctttcttcggtgtcttcgttcagatttgccagtctcgattgtctccacgctgctatcgtctccgcgctaccagtccttctcttcgccgctcggcggtggagacgtcttcgctggggcgcgcacatcagccgcgagcaagcgtaccgcaaggtggcggcgctccgtctgtcagcaggacgtccacgcactttcctggccttcggcgacggcgccttctcatcaacttctcgtgggcatgctcctggtcctgtcaagatgctgtttgccaagctgagggcctctccgctgcttcaggtccgcaaagtctgggagtttcggacatcgagggtgtgctccaagtgccatggcgagttctctggaaggagcaaagcgtgggcgctcaaggagtgtcgaggcgcctgtcgagtaagtgacgtgtgttacatatcttatggtagtgtctcgatgactgatcgttccccatgcttgttcattgtgtgctatgcttgctcttggacttggtggaacagagatggcaatgcgccgcgcaacttgctgtatctagcctttcaccaggaggagaacgagggggcaagaatgctgggctttaacgctgtcgctagtgaggctgaggccgacgttgagactgccataactgctgaggctggggctggcacaaattaaacccatgaccaatgggatcttggtggtttatggtctaaggacactcaagtccaagtccaaaagggccatgtatcgaccaccatcggctgaggtaactctcaccatactttttgcatataggtttctaaaattatgtattctatctctctacacgccgtgtcttacaatcagatgatcgaataccccctccccccaaaaaatagaccgtcttagacttcccttatcctgatttcttccctaatcctgtagacttccataagctctctcctctatctttcagactagggacatacgccggcttcagcggagttgccttataatctctaggtccgttcaactctgctccggtgctggtatcgagagagctagcgccgcgcgtaggcggcggtctcgtcgtcgagtttgagtttgctctaggaagggtgggaggtaacttataagacgggggagaaatcgccgtagcgttggctgatggagttctagaaggtagacgaggttgaggctgattggtctggacaggaggataaggcagaatcttgacatagttgtgcggctatgtgagtgattgagaaggcaagagatcaacacaaaaacaaacgagaaggtttctttctgtgtcagtacaagcagctaagacgaaagaaggcatagaaagaagaagaggggacgaacgaagagtccggtcgtaccatcctctctcatccctgtccaccattcgccatctcgtttgagaataacaatcgatgcatcctctgaaaatgtgatttcgtcctaaaattcaagacgcatagagttgaagattgagttctctgtttgtctttgcctatgtatgaaattgagcattcccgtccaacggagacatccgtgtggttcgaatctgagaggaatggggttcaaatacgtactgccgctctagcatcccaagccctatatcagaatggaaagcccctatcgatcgattaacaatcaaacgagagcatagctactctctcttctcttcacgacggatgctgtctagacaaacatgtctgagcagcatccgattgtacataccaattcgcttgacctagtattggtagactctcgatgatcacatctacctttgccttatccaagaaacccatctgttgtagatcctgtagatccgcggctaccctagcggatttctctatgacacttccagacatgttttatgttgttgttgttttttcccagttcacagatttaggagtaacagacacgtcttggtctttaggatgtttgtaagagtgcgtggtcttatttggcaaggtagatgcgattggtagttggatctgaaggcggtgtagcgggcgaagccgggccggagctattgcagaatctttatcctcggatcaactctagtctgtttataaccttgctttgtgctcgatgaacttcactctacacgaaaatatcatgtatcccatccttcagccttctgacgttcgctctcggcctgggcagcacccggcttagacttcccaagttccaatgacagcttaggatcaattccggctgaaggatcccatagtcgacctgcgttagaccagatctgcttgacgttgatgatctgttcctcgagccactcatcccatttgagccaatctgtattaaaatgaaaaaggattcaacagaataggatttagtgcggtccgcttgagtggatacgaatctgcaagagaggaagcgcctgcgcgcgagaggatgagttccaagacgtacgcaacgcgacggtttccaccccgatgtctagctggttaaaatcgcccatcatccatccgtagtcgacgacatgaagaggatctaccgacgggtccaacatccgaagccactgcccggttcgggcatcttcatctttgatgatgtgagcagttgcactgtaggtcagtcgagtaacaaacgctaggtgattagtcttggcgagttggaagagaaacccacaacgaatcagagaaaaccacccatctccaaacttacatgtttgccgatccgatccacgaaacctatatgtgtgcaacctgactgtcagtcatcacttcagagtaatatttcgctctgtaaccagagtagaagcaaactgcataccagaggccaactcatggcatatccgagtcctcgaagatagaattgatagtagtagctaattccggcagaggttccccagtagatattctcagagcagtccagagactcgaagctagcgatgacattaggcatggcgaaaaaggtctgcacgaacaagacgaaaggaagaaactcatgagtacgcaggtggcacagcattctcaagaaaaggagtctaactcacatcttcgtcggttttcctgcggcaagataaggagaggagaggaaccaaaggagacagaaagagcgacaagcagacgcattgcaaacagacggagatcagaatcaaaaggcaggacatagggtagccacgaagaaaaccagcgcaagccaacttacatcacaaactttgggttctctccttgtctttgagttgcagcccacttgaagaatgcatgagtctttccagagttaattgcctcaaccccatcgacgacgacgatatcgccatactgttcttgctcggctgatattatacttctgatctcctccgtccgaggagtaccaaagataaatttgatctcgaccttcgatggccagtccggaatgattttgtctctgatgatgtttcgtctgttgagccttttgatgtggttcgatgtgtgatcatcgggtgcggtaaaaatgccaagaacgagaaggggtgcggttgatgagttcttttgtgggcaacctatgctagaaggttgacggctggagagaagggaaaagtcgggttcttcgaatgaacgcgagatttcgtccttgggggtttgtccaactgagtaaaggtccagtggtgggagttgtagtgtgaaatttttgggagacagaccgtggacgatgatagtggtgagagcgatggtgacaaagatgatgataagcgaaagaacagtccggacctttgaccgaggtagaatgactgagaggactctatgcctgtagcttcgtacacggcttgacagagaggaaatatatgaggtcaacgggattggcggaagagaatcgttaggggtagcgacaacgctagggcttgtgagctccggggaagaacgaggttgatcagcagcgtccattatatggaagagatctatggatctcagagtgacctagtcagatggagattctttgagagggtgatgttgctgctatctatctactacacgaaggccaagctgtttctgcttgtagtaactctattgttgtttcttctctgatatttgattatagaccccggagcgtttagattccaaggcccgtgcgcacatgcggcaaagggcaggcacaaagagcgccgagcgcacggtatacacaaaattgacccgtcgtcatccatcctggtcaaaattccttcggtccggagcttgtagtctcggcaccggcgcatacatcggcattggtatcggcttatccgaaaatttgattattttgtacgatcttgaataaggtttaacccttatctaacaaattctcttacttctctctcttggctttctaggttgaagtacgtatccacgtttcaacatatacacgccttcacgcaagagccatggacgtcgactctgctccttcagcctacgctccgttcttggcctttctcgcctctgccaatattgagctttctgacaaatgtgagctcgcgccctacccagccatgggcaacggtctccgcgcggtcactgacatccctgcccataccgagttattctccgtgccaaaggtttcggtccttagcacccagacgagcgagctgaagaacagattgtcatcagcagaatgggaaggtcttaaaggtggatggggacggttgattctttgtttgatgtgggagcaaggtcgtggcgagcagagcccttgggccggataccttggtcagtctcaccctttcctcgtctcctcccgttactctcgttcagagagctgaatagatagtctcctttgtcgacttcgaacggcaacgaaaagctaccatgccgaatgagttctacacacctatgttctggtcggaatccgaacttcaagaactcaagggcacgtccatctttgacaagatcggtgtagaagaagcagaaaacgaatacaactctagattgttgcctatcattaaagcccatgaggatttgttcccaccaacgaagtttgaggaatgtttctcaatcaaatggtttcatatccagggcagtcggattctctccagaagttttcacatagaaggtccaaaaggtgggtttgcttctttcttttctcttgaaaaatttcatctgccgttcatttcctttctctctcgcgcgcttcaacattcagtgtgccgtcgcctaatctttcctcctccccttttcctcctttagacgaacaagaggaagacgacgagtttgaggaggacgatgaggacaacggaggtgaagacgtggacactgttgggatggttcccatggcggacatgttaaatgccatgtggggtgaagaaaatgtaagctgatggtcttgttcgctttccctctttcgagtgtgagcccatcaagctgatatcctgttgcttgcggaatttttctataggcaaaattgttctatacagaaacccatctgtcgatgataaccactgaagctattccctctggcgctcagatcgttggttctcttctttctctttttcttctctttcttcggaacgatccttaactaagaaccttattctattccttcttttctggaaactttagttcaatacttatgctcgtccgccgaattctgacctactccgacgatacggtcatgttgatgtgattccaccttccttggtcggtaatgaagaagatgaggtcgagattcgatgtgatcttgcggtcaacgttgctagagatttcctaattgccaggtctttgatcaagcctttagagaaagaggagacggctgtcacccgaggtgaagaggaaaaccaggacgagtggaagttcgagggaagagtcgagttttggttggaagaaggaggagacgagtaggttttccactctccgtataactcttctcatctggaatcaactattctttagcgcctgacctacgtcttgcctttctcccctttttttcttatagagtaatccctatccaaataaccgatcccctccctccacctctcatcgcattcctcacacttcttcttcttccgacatcagcctacacgaaagcgcacgaagcaaacaaacttcctagacctaaactatcggctgacgttattgagcttggaaaggttctgattggccgtagattggaagagtatgccgatagtctagaggtctgtgtttttcttcacactttgatttatttcaccatacgatctttccatctgaattgactccttccgttcgatttgaacacgcacgcccacaaacaaaaaggctgatctggctatcttgtcttcacccgagatctcaaccatcccgatccgtaaacgactggccatcgtcgttcgagcgggtgagaaagccgtgctgggtaaaacgcttcgggacttccagaaagcagaatcgaaactcgcagcagagtcggcatcgtctggatggaagagaaaagcaaagggaccagacggatcgaggggagggtccaagatgaagcttgcttgatcaaggcaaacaagaaaaatacaatgatagaatacaatctgtgacttttttctggtttgtgatgatggaacgagtaagactgacaggatttgctatcacagaaactttcacaagatacagcatttatttagtctcacaaaggaaacagaagaaagactaggaagaaaagcgaatacagaaagtcgggaaaccaaagaggggaggaggaatgcgatcaaaagagaggatatcaaataaagagggctaatgacgaaaggcgagagtacacgcgtaacaaacaagcatgggaggacatctgggagaaactgttcaaagtcagatcgcatcactgaaaccatcaaaggcagcctaatgatgtgagaagattgaaactcaccaagtcaggccgtttactttcgcttcccgttgtagtcccgcttagagaagtacgaggcgaatccaagactaaacacaagaaaaagagacagtcttagtcatgttcgagagataatcgtgaaagaagaaaacgtggcccttacccctccaaagcagcgatggctccgacaccgatggtgatggcgctgaatacctttcggtcgaaaggtcgtcgggagaaatcgtggatataagtcttgtatcccaggaaacctgcgagaagcgatggatttgaaaaggttagtgtgaaagtgtataaacaaaagattggtcaaaaatcttaccgataagagcgacatcgactgttttatgcaaatcagtatagacagaaacagaagagacaaccgaatgagtggtgtttatctggtaggagcgcatcaacagacatcaagaaaagcaacgtacaggccgagatgataggaacaaagaccttgggctgggagataagagccttggccttgttgaagatctgttggatggatgtacaattcgatcagaacatcgcgtgaagacctttctttcctctctcctaagatgagcggtttgcatgaagcataacaaaacacatacggaagcagcctccctctccaatttggcggcctccttcttagcagcctccttaacctcctcagccttctttgcagccacctcagcctcgtgcttggccttctcagcctcttccttcacgagcttctcagcggcggcagcctcttcggcggccttctcattgaactctttggcaacggtctgatggttgatgggagaagataaagagattgtgatcgaaatattagacaagacggaagaacgattggatatgcattggaataggtgaacttacctcagggtgctgatacaagcaagacatttgtttatggtgaacacagaggagagaagttagtatgtagagagagtgattgaacaacgaggagagtgatggaagtaatgtggaccaggacgactgggtacgaacctccctaaagtcatgaggaacgacagtgacaccgtgtccgtctgggtgctcgttgatggcctcaccagtgtgtccctcgagcaaagcctggtcagggtgaggctgtgatgaggatagatcagagtaggatagcacatgtggaacgatcagatgaatatacacaaggagcaaaagaaacaaggagtcaagaacatacctgctcagagggaggaggagcgttctttgcggcgatatcggcccaagtagccctgcagtatcacacgcacacacgtacgcgtcgtccagaaggaaggatagatagttgtaagatcagaaaaggcgcgatgaaggatgcagatcagtggatgtactgggagatcccacttacatgtttgtgaaagatgaaggtagggaaaagagtagagagtagagagattgagggagagaaggttggtcgtttcgagagaagtgcaagcagaaaaagacggcggacggaagacgcacgggtctcgtgtgagagcgcagggtccgcgtcattgcgcagcacgatgccgtggtgcctgatcacgtgttttgttattcaggtgcggtcttaacccgatttaaccctaacagaccgcgttggtgcgactttctcaactcccgacggacataatctatgtctccaggccagtccaagatgagcacagatgaacctagtctggcaagtctgtccgatctggtagcaaccttgccgccaacgattccctccctagaagcatgggccgatcttcaacttacctttcagactatcgctaaggccaaggcactcctccaaggtttgttcgtctagctattcatacagtcatttccgcttgttgttttgagctcaccagccctcttttcttttgttgtctacacgcgtctacctcatcttagacccagtgtttcagactttgccagagccacccaagccagactcgttggctccccttccgttggtgcctatgatgtctgctccatctgctgagccgactatagcaaatacggtagcgactgtggttgttaaggaagagaagaacgtgggaaatgaagtagaggaggttggtttgacgagtcaggacaaagagcatcaaatggatatctcatgagatcgtatcctgagtcaagtcgagacaagacatcttcgtcttgcttgatcccgaaagaggacgtcaggtcgcgtcgggcagaccggtagattttcctcttacagagaacacccttcgtaggtacgtgtctctcctatggatccgttcatgttgtatccccttgacagatgaatcgtcttttttttttttggacgaaaaactgttctttttctgctttatcttgtgatgggtttcccttcgtcataggatcttcacctctcaatgtcgcgtccgtttgagctttcaagaaagaaatcaagaccagaactcttgagacgcgtctaatttgtgtagttgtggccgtcatccaaccaggctgtcgctctcttctctttcaagaatataccatgaccaactttgtgtcaagagaagaaaaaaaacaagaaaaaaacaaggccaagaacatgccattggtacaaaacgattctttctggagagaaaactcatctaaccttcgagcttcgctttgagctgcttctcatctttcttccctctactggtcgttcctcttcctttgccgggcctatctcgtctttcttcgccttctcatcctccgaggcttcttctgcgccttcagtatcgacgtcgatatcgacatcgacgtcatcatcaccgatgtcagcatcatcagtgccgactgaagggtgatcatgttcccagatctcgagatcatctgcgatctcgcctaaccgtttgacgagtcgtcttactttcccttctgccgcatactatggagatcccgcaaagccagaacgtgataagagagaagaaaggtgtgattagatcaaggattcaatacatatgagaaaagaaagaaaaatgagaggagacaaacctcgccgacgagcgtatcgcctggttgccagatctcctcaggcaaaccagtcggaccggaaaggtaacttaacattgatgggtgatgcattctgtttgatcgcaaattggcatccgttcaagacaacatcagacggctgttctctgcctctttctgaacataccaagaaaaagcaaaaggcttacaagagaggatctcctcgggagactgcttcgtcgatcgcttcgtacgaaatcaagttttgcaatctatgtttcccccagattagggcacgaacaaaaaaaagagtcaactttgctatctgatctcgatcttgtcaaccagaaaagacagaaggaagaaactgaaagtaagactaacagtctgattgactttgaggtcgaaaaccgagcccacctcgcccgcttcacactactcataccttcttcgacctcgagcgtatgcgcatggtttccattgccattctcgtgagagttttcccttcctgaccttcttctttctgacccaaaaggcggaccatagaccctgacgccgaagccccaatcctcaggggtagccgcttcccaagtaggagtcgtatggacgtaggtcctgtttttagaatccgtcggcaagaccgcgctcgatctggccgaaaggacagatagggtcgaccgatgatgagccaataatcggagatgagcgtgttgggccctggcaatgtcttgacggatcatttctccatctttcggctgttgttccatcctttgttcgaggttggcgaacttttcgggttcttcgggttcttgttcaatctcgacattcatgggagtcggcaaatttgtcgagatcttgatttccccaacttcatcaaccttgacatccccagtctttatcctctctctttccctttccctttccttctctctttccttttctctctctttctcgcgcccacgaacgttttccagagcggagatctcctccatcgagagctttgcctcttttgtttggattctggcaacctccgagcgctcctgaagtccttcatcgataacttgtcgagcatcgggagattcaaggatcagatggcttagctggagaagaaccgataaggtcgaacactgtcttcccttttttcctccccctgccgacttgctattcgtctttgttgaaggcggtggtggaggggtggcagtagtagaaggagtgggaagcgaggaggaagcagaagaagacagggcggaaggaagcaagagatgcaaatctcgaagggaggtaacgaattcagacatcgttttgcatagttcgtccatcgggatcgtcgtgtttgacttcatccgtttcctcgctagggcgtagatctgagtatcatcgtttcaagaccgatcagattttcagaagaggctagaaagagaaaagacagagaagagaaggaaataaagaaacatgagacaaacctcatattcccgagcttggacatcatctacctcttcgtcatcttcatccaactctggtaactgcagacagagatagtcaaacatcgttccaaataatttccgaattgcctgattttgaaccggtctatcaatttgttcaaggttgtcgaacaccttgtcactagtgtgaaggagaagaagttcgaagtatgcgggcggccaggagattagatcgcagatcacgcaaggagcaaaaagtcaggacacgcacggaataggaagcaatgtcgagaactaccagattccaataaaggaggagagaaaaagagagaaagctagtcagtattttgagaatgaaaggaagtgaagaggaaagaaagaaaaaaactttgaaaagacggaccctccagaagaactccctcagctcgactcgaccgacgagcccttcttcgattgtacccgatcggtcagttttgtccttccatccaacgatgttctcttcgtcttcttgttcgttctcttcatcgctttcttccttctcacctcgacgattacttcttatggggattccttcgacgccagccacagcacctaatcctcctggtccgaacgtcgttttctccctcagcgtttctagtctgactctggctgcgagcatcaacttttcccttcttgattcctcttttcttatccgcttctggacgtctcggagttcagacaagaatgctttttgggcggctgtcggtatcggaacgggcgatggtggtgggagaggaggagaagcagggaacggagagcatggttccttggtgggtgtaggtatgggaggaggtagaggtgagaacgaggtgaggaaagcgggtggagtgggtaaagtagatgagggggaaagtcttgaaatcgttcggtctgttgatgagtggacgtcgggttcggatggtggtggtgatggggttatcaactttgatcgtttctgtattccctccccgaggaagagagaggagaaaaggaagtgaaaaaagaagaaagatcgttcgcttgaatctcagccgggagtcgcgcgtcaaacgaagagagaggaaaagaaagaggcagggaccgacccgagaaaggttcttgatctttttctccttctccttcttcccaaccacgggttctacgctatcaatctctctaaccgtcaagccagccgctttctttgcggcatgtgaaaggtttctgataggtccatgatcaaataaaattcagcctttctctcattctggacgcattttatgagcgcaacagagaagaagaagaagaagaagaagaagaagaagaagaagagagacataccctaacgggacgagacctctacgttttctacagatagagcactgcaagccagccatacgcgggagagaggaagaagaagcgaagataaaactcattcagctcatctcttgcgcagcgtatccctatccctctctcaaacagaactaggcaaagtggaaaaaaaggcaagagaaataacgaacgaacctgacagatttcatcacaactcgggcacgtccatttgtatttcgcccctggggcatgtgtttggatctgcgagtttatctgactaggatcgagctcggactgagcctctaaggtgagcgtctcattctctgaaggtggagctgatgatttgacaagttctgggtcgatgttgtacctgtttatcgttggaagatatcagaatttcgtttctttcgcagcggaggaacgaggacggtcgaaggagagaagaagagaaaccaaccggtaagcggcacaacgatcacaaaagaccaagttgcattgtctcaattttggtcctttcgtccttgaacatcttaggccactatcataataccctcgacacttacgccccccgaaccaagcgcgcatcaatgtagaacatcgtgattccagtgaagcgcgcgcaagtgtgtgagcgtttggtttttctctccgagacaaaacaagataaaaaaaggttgatacctgatgacatgtcagactatcacctccattgacagctctgtttctccttttctttcccttcttcttgtccttctcgccgtcatcttcgccgtcatcctcgtcctcatccttgactttttgctctactttggtctcgacttgttttcgttcggactttgaatcagtctgtggaccgagtttggcaggcgccatccgctttctcttcatccgcttccctggtggccgtccgtcttctgatcgtggtgtgcgcgattctcggtcgtgagcatcgttcccattgacatggctgagctcggtaccgagcgtatcgttcatggctatatccatccagggccggcgatgaatgtccggcctgatggctgaatgtttgtaccatctcgtctcgagaaacccgccggcaggattcggggtctctgtcactgcggctaacggtggaagcgggacctggccggctaccgagggggacgcggacgtggacgcagagttggcgtttggtctgaacgtagaccttatcagcgaggtagcttcttctcgttcttgttcctcttcttcgtcaaacggttccagggacgattccctatcttcgttctgttcttcctcgtgttcgatcctaccttgaactgatggacgagtggagaaagatctattgggcgagagagaccctaaggacgctgcatcgtctgttggtccataggccgatgggggactgtactgttgttgattgtggtcatggttgtggtgatgatgatagtggtgctgactaacaagcggactaggaggatgactaggacgatagtgacggagagggggtaaccggttggaccggaaaacattcccgacgaccgccgaggaggacgaggacgaggatggaggggaggtctgagcgatcgacgttgacgagaggggcgcgttcgagagcggatgggagtagtcggccggatgatatgacgtctgatggtggtgctgctgctgctgatgagggtattgccgaaaagaaggcggatggtagccttgtgggagggagagagggagtgaaggggcctgctgatggtactgatggtgggaggtgacaggtggttgagggtatggattaagtaatgaggagagcgaggatgacggaggaagaggatgtttgggagaggggagtgcaaaaccagaggagaacgaggaagaagaagagtgagaaggactgtggtgatacggaccggccgcgctcggcatactggtagaggcgttcgaatgagttgcctggatggtcgtagaggaggccgtcgagggacctatgatgggcgggagatatgttgacgagagaaagactggtgggagctgtagatgaggttgcgatagggacgatgacatggcggaaggctggagagggtttggaggacgaaatgatccgtagaatggataatgataatttgaattggccatcctttcaggtatgtgcatgtgtatgtatatttatatgtggatgagcgtatggatgagggtatgaacgtgagcgtgaaccaaactagcgggatgtagagtgatccgaaggagcaggagcaagagcaagagagaaagaactcagaggatggtgttcaggatgggattgtatggcggccggttggacccggatgacgataaaatgccgagcgagtgatgtagtgagcggcagatggagtctgtgaagccgacgaaggaccggatgatgtgcagatccagataaacggacaccagcgccaacggtgagcgagaagcgaagaccaagcagcacggagtgatgagcagctgcaacagaccaacaagcaagcagaccgacgagcttgacgaatgagcttgaccgagttgacgaacagagacccggaagaattcaaaagaagcgagacaaaattcagcaggtattttattttattttatattttttgtattttatattcctcttc

SEQ ID NO: 1197 - DNA, 55772 bp, Xanthophyllomyces dendrorhous
ctcttcctcttcttgcctttccttcatcaacccagcctgtttcttcggcctctttgttctctctctctctctctctctctcgggtcttccgtgtgggtgatagcgcgcgcgcgtgtgtgtgtccatgtctgtgtgggcgtgtcgatctcaccgtgtctcggtctatctcccacgcgcacactaaccctaacagaaccatcctgcccagcttctttttgctctctccattcttttcctttactccttctctctcactcactcactcactcatacgcacacacactctcatcctcttctgtcgtgaccaccaacacaagcatggtcctctgtagtagatcactgctctacctccgtagctcgtccagcttggttctctccagatcggccggttctcgccaaccgatccaaaggcttccttcattgttcaactcgatcagcctaagctcttcctcctcctcaccacgatctttactctcagcctcttcaacatcacttccgtcttctctctcccggccggccatcagatcgttctcgtcctctcttcccaaacagactccgaggccagggttgttgaagaagaaaaagttgggaaagtacccgtggagaaactttaaaaaggtaaagacccactcgggttgcaaagccaggttcaagtcctacaagaatggaaccgtacgtccaactttcttcatcttcgtttctttcttcttctgaatgctcctgacttgatcgtttctcaccctttgtcttttttgtttgtgtgtcttgattggttctttcttcctccagttcaagcatgtacgtccctcgtctgatctcttcatgtatcgtacattacattaccttaccttaccttcctctctctctctctctcttcctacagatcaaagcaggacaaaaccaaaagaacatcaaagacaacgccgccaagcgacatattggctccgtaaagatcctctgtggaccggtgagcgttttgcctctatccttttctctttctctcttctctttctctcttctctttcctaacgattgcattcacactgatcatcatgtctcttctctcctttcggacgtccctttccacccttccttgccttcctcgtcctccttgccctccctccctacctccctaaaacctctctccagatgcaaacgagaaagcttaagaagcttatgccgtactggaagaggacccgaagaggaggaggctggtagacttcccttgtctctactggacataggtgccaggtgtatgcgtgaatgagaagatggagagcttttttttttgaaacacgaaattaggaatggacattatttctctcgcatctcttccccctcttttgctcctctctttcttcttcggtgttcttataaaggcttcatgtccatcagcctctttctcgatctccctctcttcacacacaatctgaacttatattccgaccttggacccgacctctccagagttgaacatacctcgccagagagcaaacaacatgtccggcctttcttcctgcatctctccctgctcttcttctccctgcaactcggacaaagaaggtttcagagttcgggtctgatcaagagcgatcgctagccgagtagctagtaaatgcttgcactttttcccgtgtcagccggatcaaaccaaaaaaaaagaaaggcagggagaaaagaagagcaaaacgtcaattctcaatcctttattaaaaccaagtctcagatggaaagaacgaaagagctgaaagtgaaaccagaagaaactataaccggaagaacaggtcggacgtacccaacttccctgatattgatcctctccttctctttgcttctccgatgatagtgatgatgacgatgatgttcccgaggaaagaaacatggcatacccaaaagctggacaagaacaatacgctcgggtccttgcgcccgtgtctgtctgtgtgggcgagtgtgaacgtggggtcacgaaaggcttagagtatatataatatgaccgagaagaccctttgacctgttgtggatatcgcgtgtggtagcaagtacagatcagcctttctcgcatcctcaacagtctgggtgactggacgcctttgagggaaaggaggcgaaaggacacgcacagcgtagatcgttcgaccgtctctagccgagattgtttcaactgtatctccggtttccgccaaacagtcccttttcagaatcgttagtccttgaagcctggaaagaaagaacaaaaaagcaaaggaaggaggaaatcaccttgaccgaggtcgacgattttcaatgcctcgagcacggtctcgtccggtaggaagaatgccaatttaagaatctcgtcatctcgtactgtcctcgtacacacccaatcatgttttcccaggcgtaagatgtagattgacgtataagaaagtaacagagaaggaaagaaagataacttgttcggttagacgtaatgttctcgagaacagatgggaatactttaccgaatgtactgacgtttgggaggtcggatctctcgaatgatagactctaatatcgaacccgttgtatccatcctttcaacctttctcaccttttaatcgtcagaatatttatgcgcgtctgtacgttcacgggtttacatccgagtctcttccttcacagaaagatacgagccagatgagagcacagataggatgatgctgggtagaggcgcgccgaaggttgcaatcgagacggacgtcattcgcgggaaacacgaatagatttcgtttgggatcaatctcatcctccgatcgaacagcaacccgtcattctaccgagcgtgcatctctgtcctccgtcgttatcatccacatactcacatcacactcatatcataagctagaagcacgtaaatcatgtctgctcagccgatggcgtcgtcctcttcgtccggtttgatctcttgggtggtcaactggttcagaaacctgttcttttcgaaagagcttgaagtgtgcatcgttggtctccaggtcggtcctttccctcttctctctctatcctctttcatccctgtgtgcttccagcggaccggaaacaaagagagcgagagagaaatttgctgactcggtcatctgtttccaatcccgaacgaccaggcttccggcaagactagtctagtgaacgtattagcaaacgggcaatactctgaagaagtcgttcccactgtgagtcaattctggcttcctccggctcgctctatctctctatttcctgcttcgtcggagggctgatctgtactctcgatcgtgcttaatcaatttaaatctcaaggttgctttcaatgtttgtcatctgatctcaaacttcgactttcactgaggctgggttgctgatcctgaacaactatctttgaatcttgattctcaacccctgacacttaactatcgatatttgacctctgcctcttgatcctgttctatcaaacgatcacccgtagctacgaagagttaccaagggaaacgtgacactcaagatatgggcgagtcgaccttcttctctccctctatgagaggcctaaacctatgacttgactggctgacatgcttctctcatcaaaacaggatgtagccggtcaacccaagtttagaaacatgtacgtccgctatctctgctactattaatcgccccaaaccgggctgactagaattgtgtctacccttcttcggtcgctcaactctggggaaaaccaggtgggagagatatgcgcgaggtgttcaagccatcctgttggtccagaaactcttcttttttgagatctgtgatgggcctctctgggtttcttgtggctgacctacttgctctcatgcattcagatacgtcgtggactctgccgatgtatgtactctcctctcctttttgatctatacacacacacgcacacacatacctcttgagagataacatctaaccaatcgacccactgtactcttgggtatttaatcagcccgattcaattccatcctctactcatgagctccatgcgctcttgtcaatctcagagctgaaaggtatcccactactagtggtaagcctctcttcccacggcatacagagtaaaaaatcctacaatcgttcatcccttcgccttggcttcttctgtttcctctccctgtttcctctccggaattttattcacctggacgatagcttgggaacaagagtgatctaccaacgtcattgtcgatcgaagaactcatctctcagatgaaactcaacaagatctcgaatcgtcctgtctcagtgagtgttcattcttcaacggtccccatctactctgtcacagatataacataaagctgagacataggatatgcttatgtatactagtgctactcgacgtcgatgaagacctcacataacatcgatatcgtcctatcgtggctctcccaaagggcaaagtgatagtttcttccttccacctccttcacgtcgtgtgcctctccatatacttctcttgctctcccctcttccaactcctatattatttgtattcttttcgttcttgtgtattttgagatcgatgaccatgttcgatccatagataggagcacacagataaagttgatatacagacggtcatcgtgtttctccttctttgagtctcgcggtactcgaccggaccttgagtagcatccctctacgaggacgatgaaaaagaaaagaacaagagcggagatcttgagcgcctctccaaaggacccaaaagaaacagagattcaagacactatccagaaagtctgtaacgaaacctcgcctgaagtcggttggcccatatggagtcttctcccaggtcacgtggttttggagttctccaaacgcgtcagataaacacattgccaaacccgcacccatcgtctggttctcgagacactcgcccttccgttctcccttcccatcgatatctctcgactgaatacttccagaaggactgaggaccatcatggcttccaaacaaaacagacaggtcggtcgattgtttcagaggatgttcagcagactcggtctcttctgtcgcttgtcttagctaatcttgttcatctatccgatgtccgggcggggttggttacgtgtgcgttgctggaacgattggattatctcctggggaaacgtagaaagtcttgctgatgggaagatcaggtatgtccgctctatctcgaggacagacagatttacaacttgagatgatggccagtctagatgctgacgatggaaggtctatcgctacctttcttcttcctcctctacgcaagggagtggaaagacatctatgagacaagtcatcttgtgagttttacattgactttcgacaaaaagaacaacgcgtaaaaaagaaaagaaaatcctctcgtatggacgcgtaaaacatgaatgctgaggactccttctggtcgtcagctcggcggaatatcgaccggtagatacggggagattaggagcgacagtagatgtagagagcacgaatgtccgtctgtttaacaacttgcatctaaacgtctgggtatgttccttctcctcttcttgcttgtctctgtacaaaatcgcaggagtagtcgttcagagtcagcttatctttttgacgttttgtctcgatccggactcgttttctctttccaggattgcggaggtcaagattcttacatggacaactatttgttctcttcagcagccaacacatttacgaacgttgcgatctgtgtgtacgtgtttgacacgaaatccgaagaatgggacaaagacgtcgagtactttgagtctgtcctcgataatctccgtcaatacagcggaacctccaacgccgaatcagacgacgaagatgccgatggtgaagctgggacaaaaaaggttgatccagactcgttacctggggtgtgtatcttgatcaataaaatggatctagaggacccgagtgaacgagcgaggatcgagagagagaagagagatgatctaacaaagaaggttaaagctaggctaggtggaaaagtcatggcgttcggaacgagcatctgggatgaaagtctctacaaggtttgatttttccttcttccttccctttcccttccactcataaagaaatggcccaacaaggaccagaatacaagtcccgtatcatgctgacattagctctgttcaatacaggcctggtcagcgatcattcgaacgttgatccccaactctcaacgtctcgtcgctcatctctcccggttatgcgacaaagcccacggagcggaagccgttctatttgaacgacagacattccttgtcgtcgctcggtctcgaccgattccacccagagtaaagctcgacggtcaactcaagcgaccgaaaagaatccatgccgaggactggagcgtcgtaggtgaagaagaatcgagtaatccaatcgatggcactgtaggtgcctgggaggagagcgagacggatgtgggcgagaaaaagagatacgaaaagatcagtgagatgatccggagctttagacatatcctcaacaagtgcgcctatccttcttctttctttgctctgtatccttgcctcttccttactaaccacctaccaatgacttttacaggaggattgaatctcgatggacgagctggcaatccaactttgcaaactgttcagttgcaatcgatgagttcacatcatctacatattgtcttattctctccaatgataaacttgccagtaagtctatcatcgtttcgatcgtgcaagcttgcgcactgacaagctgttttacatttggcgcgttcttctgccccaccaaagaggcagacttcttgctaggaacgatgaaagctgctcaaccccactttgaagaactctcaaagggaacggtcctcctcaaatgcccgtacgtgttttcttacaaatacattcggcttataggtcgatgttggcggaaagttgtttactcaatcttctctctatctttgaaatatcacacttatcttcatgcagaatctgtcgaactgatagcggaatcgtctacctaggcgaatcgtcagatgattcacattcgaactcaaacggaacgggggcgctgggcctacaactcagtcatgccactattgaggactagtctctcctggcctccccttcccttaattttcctttgtgtcgctccactacactccgatcctctttctttctttcctctcttttacttcttctcaaaaaagggaaaagacaagtacatatgtgatgttgtatgagaaaggcctagacccaccctctgaggtcatgacccccacaccccttcaaacaaaatgaaccgatttatctgccgttcttcttaagaataccagtcctgacggcgtttcgcttgaggctagcgtacaaggcgagagcttctgcgaaggtagcattattgcacaggtcgaacgcgctcaacgtctatgtaacaaaggaggagaaaccgagagagaagagaataaacaaacgctcagaagtaagtacaagctaacaaaaaaaaagaaccggctgtgtgagatacgtacctcgagatgaagtaccagataacgtcggacattggcactatcgatcgtggaaaagtatcgagtgacaaaaccgatgatgtgtccgtgcgaattccatggttgaattcgaccgtacttcatttgtttcaggaaaaagaagaaaaaagataaacccagatcgcgagttagatccctttgtttgtatgtttagcatatggtctgcttagattggattacgtaccgagtctacccatctattccacaagcacatcatgaatttctggccatcgtgaatagcttccagatcaaagatcgcctgcgaaggaagaaaaatgatatggaaaatcagtcaatgacgtcctggtatatggcaccagatgtagcgaccaacagatacagagaaggagagagtggactgacttcttcgcgttcaaaaatctctggatctcgaattcctcgatccaaagcagtcaagttgttcgccaagcttcctttccaaatcctctggttaagaggcaaaggcgcccttggaggggacggcttgaacgtcggaccatcgggattgaaaaccatagtgaacggttgtgggactttaacgtagttctcatctgcatccgatgaggtccctcgttcatggtgggcttgccctccaccatcggatgaggtcccagtcgtcaacgatgcgccatcaatgaagtcagtgtccgactcagaatcatctttgatcacacggctcttgtttctcttgataggcgagtccgtcgccggttggacgattactccaggtaccgtagccttcggcgtatgccctctgacagatcgtgtcgcccaatagacaggggttgcctttgtcttggaggaagaagagttagaagtagaggatggcttgagagatttctgagcttgaacagtatcggtcgaattccaagaattggcacactctaacccccatgtcatcttcgggaggactactgatcctctgatcgtaagcggcaattgagtacctggcagatccagataatctctctccgctcctctgggtcgaacgagttcgatgagacatcccgggagttggatggtaggtttaccctggttgaatggcgctagttcgctcaagatccactcacatggctttcgatggttggcagtgaaagagagaaactggatttctaatcggagatgggtgtcttgacgaagcccctggtcaaacatgaaaggccaatcagatggaagaactctgaacgtttctggaggaagattaaactccagaggaggttcgaatgtggctgattttttgcgagggccttcaaatcgaagtcgggagtaatatgtagtttgtttaatagtctgggcatcttcataagatggagaattagcctgtaagaataacaatgggaaaagccagttataaagataaacaagaaacgcggttaattactagtctcagttcaacgctgtagatgaaagactaaccatctgtgccttcacggatatagcgcaaaattttggaagcttgaatttgtcatttctacccgatccaagagaacacgattgaatattgatcgtataagatgatctagaagacgtcattcgagatctgtaagcgttgaaaaagggaagaactccgtcatctcaacgaaccagagaagtggaacttccaattggcagtacttacaacttgttcgcttttacggaaaggctatctttgagaggcgcacgagacggagaaaccaatttagcggcctgtagtttggatccttgttcaacaagagaaggagaaggagcaaccaagggagggagaaggcaagagagtagtgggatctgtttctgaacttgaagtatttctgagttcggcgatggagggaaagagggagctggcgaaagcgcagaaggagcaggcacaatgatcggatcaggaggagcgcggttggatataggcagctgcttaactttctcgggaagaaccgaagggggttcaggaagaatttgaagagggagggctggagagttcgttctcaaccttcggtcgaaagcgtcgaggaaggctttccacatggcattctccagaaaagtgattgagtgatcctccatggcaactgacgaacgaaagaccatcgggcagttagttcaacttaatccagttcagtccgttcttgaaacaagctgatcgttgaaaaagtctgcttacaaatccaggacattcgacggtgggactgatcgaataacatatgcattagatcaaacggagagaggtctgatcagtttaaaagagctcaaaaaagtactaagaacgatgtgttacctcatcaaactcggcctcttgaagatcatctctcgaacacagaaagctatcatcactatcacagttcttgcagagcatgtagactgttttagtccgggaaagaaagagaaacgaagagaacgaacttgagaaaacaaacacaatggcagaataggttaaagtgaaaagagaaaccgcgcatagagagtgatacgtacacatgttcgaaattccaggctcattaaagatctgcacaatcgctaaagccggctctccctcttcactagtgctcaacattactaacgcctcaaacgacaaaggttgggttggaagtgatcctccgatagcccgaggcctgttgctatgtttgtgtgctgaagatgcagtctcgtttgagtctgaatcggaatcaaatatctcgattggcgaattaaactcagcaatcgactcgtctgaatcactcagcgtagtgtcaaagagtatgttttgttcgtggggtaagaacatctctgatagtgctgatctagaacgagaaccaggagatgggggagtgtgtcgagaagaagattctgagggaagtggcagaagtaaagatgtaggggttgatacagaagacgaacgactgagttcgagtttgggggtagaaatgggtgtcgagactggggttaaaaccgggataatcgattcgacaagtttgggttgaggttgaggttgattggcttccagctcagatgacaaggcgggagtgagggtaggcataagagcggatacagagataaatggaatgacaggagcaggaatggaagaaggcttttgtagaactggtttgtcgattgatatggattcagaactgctgtttgcaactagcttaggtctgaaagcgatgccaaagcaaacatagaaaccgttaaatgtgtcgtaaaggaatacaaaaaaggaagtaaatactaacaggttcgtttcctccttaaaaacaacttcctgctgatgcatctcttcttcgtctttcttcgtactattggcttcgcttgatgtgtccagtactcttgaaggtagttccatagatgctgataacgcagtttggacatccgaaggagtcgaaaccgaagcaacataaacagggagcgcgcttgccgagccagcagatgaggtcgaagacagggataaaatcgattctcgtgtcactcgagcagcagaggaagacgcctgaagtggtattgaaggcaagctcgaggaagatgcaggagcaggactggcagcgatttgttccaaaggcaggcttgaagggacctcaaaaggttgaacgacaagcaaaggaagcttcttcatagccgtggccatggtctcaccggcaatcgtagctgttaccgttgccgctggcttgagtttgaccgatggatcatcatttgacaaagtgagcggagagactgaggaaacctccttctttcttccttgactctttttcatctccctctggcctgtatctgaggtatctagtttttgttccttctccactacgttatcatccgggttgtcacaatccatgacggaggcttgatgaaccggcctttggtcgggaatggatgtcgagacagccgcacttggatttgttttcggactcgaatttgaagaaatactatagatagtgagagatgtctcaagacgcgtttcggaagatggtcgagactgagggacagacggccgaggagttgcagactgcgattgtggaggcgacgtttgaggtggagggggttcagaatttgaagagttggtccgattaggaactataggaacaccattcggtaagatctcgttatttggaaggtcgatcactacctgcgatgaccgaacctcctgttccaacgacttgggctccactgtcttcttcttcagcactatcttcttcccagtcccggttccagctccagtcttgttttcacccacaaccttgtttctaacctcagcctcaggcccaactttactctcccgattctttctcttatcttttttccgtttctttttttcagtgctcaatccttcaactgtccggtcttctttccttttttttcctggccgatcattctcagacttgtcgtccaatggacgcttgttgagattcaacagaggtctgttcgtttcaagctcagatgacgaaattggcgttgcggttggaattgggatcggaatcggaattggaatcggaaccggaactgacacagggatagggataggtatagggacaggagcgtctcttttttgggtcaaaggcagaggggcgcgaagctttatgggttttgaagaggatgcatgagatttgttggagactacgtaggatggtgatgctgataatgccattgatgatgaagaggaagaagagggagaagaaaaagaattggcttgggcggtgataagttgaagtcgtttctatggttcagattaagtgatcaccaagtgcgaggttagcagcgcaagatcgttttctcgtcaatggttcaactctatagacatattacagaattatgcaacgaaccctgcctttgtctggactattcgctgtccttgcgtcagacggcgttgtccgcttggtcttgtttgcgattgactctacgagtgaagctgaggatgaagttgaagcgagcgagatttgccttttcttatgattgactccttctcttttgtcctcgacgagtttcggtgcgcgcacagtgattcttttcggttgaacgtgcggcgtgcttaacgtaccctctggaggagagttggcaggggattgcttcgacgaaacacacatggagcaggaaggtgtagtagcacccgaagacatggcagtgatattggatcgattcggctgagacaaggagacgtctgaaagtttcaagagctttgtcgctggtgatgtaccagccgcctttggtcgaataagtgatatctgaactggcgaatttgcgcgagatacttgtctgctgggcggagacgatgacggcagagacctcgtggccaagttcgacctatttgtcgatgggaaagcatctaaaggatcacttgaaggttctgatcgagtcttttctgacgtatattcgtcctgaggaaaggagttggccgagattccaccggaagaaggccggctcggaggagggggcccccttgaggtggacgcgacggaagacaggataggcgaggagatcgatgacgcgtttatagcatgagacctagaagagacaagaggcgcagagggaggaggaagatacacggtgggagtggtgttgacgactgtcgttcgaagattgttgctacctgttgacagattcggagggcgcggatcggtcgaccgagcagggcgggtaggcttggaactcagcatcggtgagccgactgtggaatcaaaacgaaggaataagattcggaaacgaaagaccagcacaaaagatgcttcactatccaggagtgatacacataaagagacgagaggcaacgaacagacctaggtcggattgacaatggttgaccgagacgcgttgaatgagaggatcgcgattgagcatgaacttgtaggcgagacgtttacgccaaccagcgagactttctcacctccaattgagttctgtcgcctctgatgtatgaatatatatgcaaccgagtgtgaacacgaatacgagagtgtggatatatacgaatgagggtgagagtgagagcacaaaagaatctgatgatatgatgtaggagcgacagatatgaatgtatgccgttgggtacatgcgtcccaagtggagagaacaataaggaatagatgaaagcacttaatattcataaatcgctacgaaagctcgtccggctataacttctattctctcttgctcggctcacttctgttcgcatacactcccaccttcatcccatccatcgcattcaagagccatgcgccgtgttctattgaaacctcctctgctgcagaggtacatggccagagccgttaggacatcagtagctctggctcctctttcagttcatcgaccatatcgggcattctccagttcgcctcacacactcttcgctcgacctagcttccatccaaccgacctagataccgctgaaccgttgcctgcacagaaacccattgtcaattcgcctttgggcaaatacatctctctcgtggactctggattactcatcaatgatgatcatcagcgaaagatcgtgcgcaagctgcaaaatctacatgacaggctcgaatcgtactatccaaaggatattccagacaaggttcctcagccttcttcccggggcggaggctttctgagtagactcttctcgaattcttcccctccatcatccgaggacgtcgtcgatcacgagtcttctatgaccattcctgaagatgctccaaaaggaatctatctctatggaaccgttggaacggttcgtgtctacgctcccttcatcctttgttactcttctttcgtctatcaagaaatactcatttcggccttccccgctgtaattcgttttctcgtcttctcatctttcttttgactttagggcaaatccatgctcatggacctctttcactcgacccttccatcccagttccataatttccgtcgccgaatacacttccaccagttcatgctcgagtgtcacaagcgaaatcatgcctataagctccaatatggagaactcggagacaaactgggtgaggtcgccagggatcttgcaagagaggccagagtgctcagctttgatgaatttcaggtgtgtgtgtgcattcctttcccctgatcatatctcgatcatatcttgatcataatttgattttactcgaatctgacggaattttctcctttttatcactctgttcgcctgataggtcaccgacattactgacgcgatgatcctccggaaccttcttgaaagactgatgggatatggcgtagtctgtgtcatgacctccaagtatctatagcccctcatattgtctcgttcttctcgactgctaaccacaactgtatttctttcacacacacgatcctagtcgtcaccccgatgagctatacaagaatggacttcaacggcagagctttttaccttgtattcagcttatcaaggactgtttcgagatcgtagatctcaacgggaacggtttgttcttcttcatgcgctcgtgtcttcttctttttttcgcaggttattgtataggagctcaatttttccttgcgcgcgcgcgtgtctgatactttcatatagactaccggcgtgtccctggcgctctgaacaaggtctatttcgactcgagttctccctccgacacagcagagtttcgaaaaatgtttgaatctcaaacttcggaggatcttgtcatcccagacagaaagatcgatgtctggggtaggaaattggttgtgaaggagagttcggaaaaggtcgcttggttccggttcaaagatctttgtggaaagaacttgggagcggcagattatttggaggttaccaaacagttcgggaccatcttccttggaggagttgagtgagtctctgaagtccttcgtctgtctgaactcatcttatcacccaagaagcatccagagctactgtcgaactaagcaatccatgtttctcttcaaagaaaaatgaatttagacaccaaagataaagttcgactctcttcttttcccttctcagcaattcataaaattcttcaaaaagtactaacgacaagacattctactcatcttcatccttcttcgcactacaaaaaggcgcgaagattcatcactttcatcgatgcctgctacgaatcacgtgttggtatcatccttgcctatgggtctttcttctttacacttctcgccgtgttctagatactgatgttcgtgtctctcctctctcgaccagacgaaattatacatctcttcggaagcgcctatcatgcagatcttctcaagcgagtctgaatcggatagcttctatacagactatcaaaatggaggtatgtcttttctctccacacaacttctggtcatttacacaaatctcggtttgacgttttctttgtacacatcaaaaatcagtgatgaaccaacaagacgtctcaccagatgcaatcacctccccaatattcacaggagaagaagaagtctttgcgttcaaacgctgcgttagtaggttatcagagatgggaggtcaaagatgggctcatttctcagcacctgacgccaacggagacaaggccgaggtgtagtttatcctcagtcactctgttcctctcattgctcgctggttgttcttggttggaagagaacatggtcgttgggtctagagataaaaaagagataaaaaaaaagataaaaaaagatgaatagagataccactcgacttcccatcatgtcaagctggatgaagagaaccttggatcgccttttgatatctatacactttgtctatacataaatatataccccttggtcgaaacaagcgtcttaatccttacctcagaaaacaaaagtgaggacagccgtgaggtcacccatttacatcggatgacgccgtttcctcagcttgatttttccttgagcctttcattatttccctccaccttgatcttcctcacctgatcttgatcaaatctcttttcttcatacgacaaacggacgaccgacagatgacgaaccctctagactcccaggaagaaatcgaccccgtcctagcctctcagctacatatcacttcacacgagatctctaccatccttcaatacctatctctccctccgtcgaccattcttcctactcccgcccttcagtttctctctacccatctatcctccttacccccctcactagccgccctcttttcgaaagagaccactccgaaagccagagcttcgatagcaggcatcagaaatagaagatttaggtgggctaaccaggccagcactccaggagtgttgagagtagggagtgggagggagagacatccattattgttcgatcggattgttgggtcgggcatcgatctacattcagggtcatcctatgaagaatctgatacagcaagtagaggaggaaatgctgatgaagaagaggatgatgaagaggtgtggggtcagatgaagggggtgctgggtgggaaggctaaggtaggaaagttcggagcattgatgaaaggattcgaagaagaacgtgagggagagagacgccgagggcttcgaagagaggaaatcaaagctgaacgggagactggtgaagagtttgagagtgatagtgacgatgacgacgacgatgatggcgagaacggaggtgaggaacgaaagaggagagaggaggatacgttttggggtgagaaaggggaggataggattcaagtcttcgaacggatcctcaaagagaggtggatagacggactcgaggttcgtcctttctttcctccctcaatctgccttgtctctctctatgtgcgctcctctctatatatattctacaacttgtataccaacatcttcctttcctctcctttgtctcgcgacgaatctgcggacacgaatacaggatttggactacgatgccgttgactatgacgaaacatgggatgaatcatctacagagtctctctctcaagacgcttggttcgatgatgagcctgcaacaagttcactaggcggcgttctaactgagcggagttctcaggcctctggtctggctgaaggcgaatacgattattgatacaagatgtcgggttgacttttggaagtccatcctctctttctaatatctatgccaccaaaggactatgctccgctatcctcgcttactattttcctcaatccgattctacgtccggatgtcctgtcgaattaagtcctcctacccaaaactcgacctctgttccgccatggcccggcatatccaacaccttttccaaccaaatccccgcctctctggcgagtgtccataactccctttctgctcctgttggatcacgttctttgaacgctaagagcatcagcggcgatttctcagacggttgaatttcttgaggaggacgcaacaggttggagactgtatggaggagagcagggaagatcgacacgttgtatgtcctatgggccaagtggtcgaaccagttgaataaaaaaaagcttgtcttagaatttacatgctacatgcaaaggaaaggaaaagacttagagttgatagatgaaactacgtacacgtcagccatgataatcagatctagccctttgggttctccctctccagcgtcccatacccattcggggatactcttagatgtccagtcgagttcacgagcgacgatctgagctttggacgcatataggagtttgttggcaagtgtattgatgtcaatcaaggggagcgcggatgctatgattgttatagaaagagaaaaaggagaagaagaaaagaacgattggaccaagagtttagtaagaacacgctacagcggaaggaatagaactgaatttcaagcaacagatagaacccaccaagatcggtagccataatggtgtgtaattcgctctcacaaggggagatcaatgaagcgaggttgattgataccaaaccgctaccagttcctataattaaggagaaaaggaaagagaatggcgcgcacacgcgcctccgctgtcaacgtaggcagagtgccgagaactagctttctatcttcctcttctgaaggagaaggaagactaaccgagttccaaaattcgtagaggttgctcattcgctcgatccaacacattccacagctgtgctagataattagagctctgagggtattgagggtacgtcgttctttgagagggttcaggcagatattgcgtgaggaaggcggagcaagccaagcctgagtcccaaattttctacagcgaacgaaagaaattaccaaagcaaagcctatgagttcctgtttcagagagaagttaggcaagaaggcgaaggaggagtgaacgaactttatcaagatcaaaacttgtctgttcgaccatgcacattttgtaccctctccccagaccaaacactcttctgatccgatcctgcttatctaccgcaccagttcgttctttcatcccacttaaaacttccttccctctcccctttcctttttcgtttccgtgcccatttccgatcttcttcttcccaccaccggattcgggtgtggagataaaccggatgctttcgctcaacacagggaacggtacgaccgcttctccatcaagcgccgagcttagatccagttcccacaagctcctttcactgttcatccgagcgcctgagtcggtgatggagttgcaggcggaggaagaattggagttaccggagcaagggcgggcgaacagagacaaggtccacgattgaccggaccgaataccaagaggaggtgggatgctcagcggtttataaaccgacggagatcctaaccaggttgttaatgaatgaactggctgagccgtagttgaagaagagggaccttggatccattgatagaaaatctggagggtggattcgagtcttgtgtttgtagagcgagatcagaagaaaaaaaaagaaaattgatcagtaacagcaactaggaccgaggagaatacaaaataagaaaggcttatggcacctaccgagtactaacatttcggtccgtaggtcattagcgatctgaggagtgatcacaaatggggtaactgtgtctgttgtccgaggcggcggacggaggaaggaaagatagtagtacatgaatgaggtcgaggttgattgttcagaagcataatccagccgctttgaatttcccaactcgttatcagcccagactatcaatccaccatcggacatcaacgagccttaccatctccttagtatcatccatcaccagataaggcttgaagcatctgagcgcttgatctgaaaaatacctgaagctatccaaagagacaaagcaaggatgaactcgacgcccgcggaggattttttgttacttcttctctccgactcgaatctccctctcggtggatttcatttttcgtttgttcatctcgttcgtttcgttttgctagaatcgtgtcttatatctactaaattgaactatctatccttgagcacacagagctggcttagaatcaaccaccaaacatgggttcctccctcgtcagaccacgtcatttggtcgtacaccccttgaaccgttcattcgatcgtcccttcaagcgcatgctcgttcaacccttgccttcgtcggcacatcttatgaacgaactgcatcatatatcaatcacaaccctgattctggacgtccaaaaattccagcagaagacaggttaccgaatcccattcaacagtgtgaagatgaagaagatatggagagtgaagaacggacggtcaggggattagtagaggatgatgtgctatacgaagtgatgacgagcaatcaagtgactcgaaggggaagtaaaactcaagggattggaatgctaaccatctggcagaaagcgttccgtcagcctgcttatcttcctttggacgagttggctgatagaggttggaaggaatgcgcggtgaggaggttgatggaccgattgaagaaagaaattagggagggtcgaatgatgggacatcttcctgtttgctggggtgtgctatgtgcagtcctcggcctcacattaggtaggatggtatccagaacatgaggccactgccaaatgagctgactctctcctctcctttactctgctctagaacgaacgctgcatctgcatctctatcttcataccaggtccattctatcctcatccgttcgattgaaccagactgggccgtaccacgcccagacgattttgctgtacacgattcaaccattaatcgaagctgagcttgctctgtatagagcatcacctggcatgggaggagttcgatcttctgaagggatcccgaggactcaggaggaggccgaaaaagcagacgaacaagaatccgaggcagggccgatgaactgctggcctctgggtgagattcttcaaggaaggcacgacgtgatgcactctaggatgttcaacacctgagcatgatcacgactaggaagagacatagatcaaacaaatgttacacatatagggcatatgtcataggattagggtaaaacatatgagatagtatatcaatcgtgaagaaactatatagttgaacgagagaaaacacccaacacaagaaggaacgttcaggaacaaaaggctaaacataagaagagaagtgtaatgaacccacaaacatttattgtgcagatcctttcttcgcggcctcgttcttgaggttttccatcatgacttcggacgtcttcttgagcttgccaacaacaaactgccgaagaatccaagggccgtcgacttggtctacctttgtgacctcggatccagatccaggaacgtctttgacagaccacttggtggcagtcttaatcccggtgtctgatccgatcgataaaaattcgatgccgtcctgagtgattgtaaagacagatcgatatttggagaccatggtgccaagaccgacgggtgagggaaaggtggccgtgatatcgtaggcgttggtgtcagcagggtcaggggtaacctcatcaatgtgtgggttcaaggaaaggagcgttgggatagactgaatcagtgaaatcagtgttgctgcagtctcagtaaaggtctttacggtggaaactttagacattctgtgtatgtgtaggtatgatcacgcgaagatgagatgttgaaagtgatggtgaggagtgaaagcaaaggagaaggagaaggagaaaatgattgttttccctgttctttaactttttctgttcctgtccttgaatcgagtctcttgtatgtctcttgctttctgtgagtgacttcaacacgatgtacagaggaatatgcaacaacagcgagcaagggcatctcgaaagagatggaatgagataccgagaggaaccggagagtggcgttggtcacgtggtataatcttgcacaccctgatatgttctggttcgtgccccgcacagcccggatgatggttagctggaacctctaacaaattgatgcttcatcactctttatcaatcactcacagcatacatcctcgttctctgccttcttacatccttctctttctgtatatctagtcgctcatcacgcagttgaataacagccatgtctcaggaatcttctacaccaggcatcaccctcaatagttcgtgtcctcgtttccgtctctcttttctcttttctatcttgtgcctttccgtgcaacccttccagaaggttcctttcgcctcaactccgtactcacctttttctttctctctccttatagtcaagggcccatctgagctcaagctctccatctcgatatctcctgaagctagttcgtgtttctcttcctttgtctgagattctcgcttcgtactttatcgactcagcatctttttctttttccttcccgtccctacagcggtggccgatctcaagtcagagattgctcaaaagtctgaggtcgaagcgaacagacaacgcttgatttactctgggaaagtccttaaggatgaagaaaccctagcaacatacaagctcgccaccggtcacaccgtccacatggtcaaaggtgccccccgagctggagacgccggagcatcatccggtggggcttctgccgctgccacatcaaccactcccacaggagcaagcgcgtttggtttgccggcatcaggggcgggtacgggaggacagcagaggctgccgactatggccgctgggcagcaggttgtaggaaatccactggcagcgctcgagggagtacaaggtcatggatttggagggtaagcttcatgaatctcgtttaggccatctctcacacgcaagacgagcaaaagagctgaggaattctcactcgatcgttgacacgaccttacaaacagtgggattttcaatccatttgaaggcatgggcaatttgaacgatccaaatgcaatggcaaacatggcccggagccctgccatgatggaacaaatcacgcacatgttggaaaacccagaattcgttgatcaggtcagttcttccacaaggaccgatttgtggttcaaactccatcttctaatgttcggctttgtctctggtttagatcatcaactctgatcctcgactttcagcgatgggccctcagatgaggcagatgcttcagagcccgatgtttagacaaatgctgtatgtattcttattgacaatgtcttcaagaatgctctgagactcttcgatcttccttactcaccgtttgtctctccctcctcttctcagatcaaacccggatatgatgaggcaaatgatgcagatgcaacaaagtgagtgagctaatctctcttcttttatttagatttttttgctcattaccttttgtcgtcgacgacttgagtgatgggaggaggggccggtggtggattcggaggtttgggtggtgcgggtgccggtactgccttccctcctgtacgttacgcgtctttttatctctcttcctactttctacgccgctctgttggatgatactttgattgaaacggtttctcttatagcccggagctttcggtcaacctccatcgacggagtctgactcgactgctacttctaacctcttcggcggcgcagccccgggagcaggcaccggtgctggaactgctgggggcaatatgtttggaggtcttccaatgccgacgccggaacagatgcaaaacatgatgggcatgttgggcggtggcgccggtggtgccggaccaggtgtcggcttgtttggacagggctttgggacgagcgcgccgcaggatacgagacccgctcacgagcggttcgcggtaagtttctgtttccccattgttcaaaacacctaaacaatgagaggtgtatgtgctgaatgttcgatctatataatgattatctggctataggatcaattggtacagttgcaacacatgggtttctacgatggccagaagaacatcgaggctctttctgctacgggcggaaacgtgtacgtttttatctacttgctatctgtctatctatcgttaccgtctgcccttgttcttcaccagcagacattgaaagctgacgtgtgctgtgtggacgtgttaaaacaaaatataattacaaaaaaaaaccaggtcggctgctgtggaatacctgtttagtaacccttaggtttcatttctctttcaatttgtgtatgtgtcttgtgcccagtactatattgtaaatcgatgcagaatgtggatttcttctctttattcgttaaacggataaatcctaccggcaccgagtaattctctatttttagtcttccggagttaccatctgcagtcgacgtcatcggtcttggctgccaacctagtcaaacagctgaattatctttcggtctttgccgaaaacggacgggaccaagtgttcgatgtgtatgtctatcgtgtacgtgtgcagcatcagcatgtattaaccagtggccgtctccaaaactcttctcggaccggcagggtgagagagagagagggggaaaagaggcaaaggatgacgtttgaagctcatcggatggaggatgtatacacttgcttttttctctttgttatcgctcgtctcacccgcttaactttaacttctggccgaccgggtttcggaccgatcacttttggtcttccgtccttttactccaagcggctgaacctgtttggatcttgacatacaaaggcactcaagtttgttcctttatcgcgctcaaactcttcctctttctttgcctctcctccctttcttgtcctctgcttgttccatctgagttatcttctcgattcactctttgatctttaacgacatcattcttctctaccctcaactgtcaataaatcatgtcgtttgatcccccagaggcgaaaaagccaggaataccagtagtctctcacaacctcacccctgatacagcttctgacgctctttccaccagtgcaactcagctcggaggagaattcatcgatgaccgaggttagtccttttcttcttccttttgttatgggataatctcgtctgagatcgagaactgaagtataattcatcttcctttatcaaggtcgaagagtgtataggtcggtttatagcatctcctctctttggtttcctgcgaatgacgtatctggcctatgagtagcagaaacgtccgatgaacggactgaatacttaccacttgaagatttcttcggaaattcatccaggaccactacggttgcacccacggagccttcgtggtcaaaatatattcctggagggtacaacagaaaatggcagattcctttgaagggtaaagcaatgatgtggggtattcagggaatttccggactggccattctgttttgtaagcctcgtcctcttcccatgtgattgaataactttgtcgctgaattatcaatttttttctcttgtttctcaacaactaactccttcgttcaatagatggttacgaccaagtatgtatattcctcgagctaatgtccttcatacacagctgttcaggcgactgacctcgccttgcagggagtcatgagtggtgtcaacaattccacatcctacaaagttctcatgggaacggcgagtgatccggagacccaaagagattctgccgccatcggtgggatcgttgctatctactatctcggtacactcttcggtggtcttatgggtggaatcttgggcgattcgatcggcagaatcaagaccatcgagattgcctgtgtgtttgcaatcatcggcgcctccttgcaggcttctactcaaaacataacttgtgagttctggacctcacaaaattcactgaacgtgagccgccgagaaagctgatgtctggaagagttgatcggccaactggtccgcaacaaagggatgatatttgctcgaattattaccggccttggaactggttcgcttaacgctgtcgtgcctgtgttgtcgtccgagttgtccactcatgatgctcgaggtgctgtccttgggttcgagttcttcctcaatatcagtatgtcctttttgttatcaagaacaaaccctcaatcgagatatccaactcaatcgacggaatttgctcttcatagtgggtctggcggtagcctattggttggaatttgggctcaaatgggctagtaatcgatcagagcagttctcctggagattccgtatgttcttcttacctgtatctgtcttgtatcttgcgcttgtgttgatcttgaacttgttctctctgttatcgacagctctcgctttccaactcgtttttctgctcatcatcctgtttaccatttctctattccgtaagtcactctgtttcttttctcctaaagatcgttacattcgatttacgtctcgaaattgatttcttacgcctcatagctgagagtcccagatggctcgcaaagatgggacgtgaggaggaagctcgacatatcctcgccgtttgccgaacgcccgatgcagatgaagacgatttgaaagtctcggctgagctttacgaagtatgtttggccttacttccattgactctctgtcatgatccgcagatctggccgacatatatctgactactacgaatcgctgtttgaattatggaacagatcatggaggttgtcgaggtcgaaagacagagtacacatctgaacagctactgggccatgttctttggctcggacagctaccacctcaagagagtgagaccttgtatatgctctctctgcgtctcttttgggttcatcaactcatgtttttggtctccgctcttttgaggatcggtagagaacttggttaatcatctggttgcagatcatgcaggaacttgttggaattggtgtgatcactgtctgtaagttattttcccctcgagttcctcttcattcttaatgtatgcagtatttaacaattcaagcgtcttctcttccgttccagacgcccctacggtgttccaacaggcaggttattccgaatacaagtccgatttgctcagtggatgcaacgacatagcatacatgttgtctgtgcttatcgctgtcttcacgcttgatcgaattggtcgtcgagtgacgtgagtcctggatctttaatcgtttgactttgttgtgcagaatgatagactgacaggtgggaatcttacactcggatcagactctactggggtgctatcgtcatgggcatctctcttattttggccggagtagcagctaaatatgtcaccaaaaccgacggctcccagcaggccgcttatgggtaagtccatcttctgtcttactcttcttcttcctttgtttgaggtttcaacgatacctgaactgatgattttctcctttgggatgcgttattcttcttcagagctgttgtggccacgttcgtgtttgtttacacaagcacgtttggcgcgacctggttgactgtcccttggtaggtctatctcttgatcgtaatctggctgaagaagaagaaaatgtaaactgatcgaacattggttgaaggctttacccaacggaaatcactccaaacttcattcgagccaaaggaggagctgttagtgtgtttgggtggtcgatcggaaacggaatcgttaccgagattacacctttcttattcaagtcagtacctccttgatcccttctcttcgtgtactagccaatgcatcgtgtttactcaaacggaactgttatcgcaatcggaacggaaacagcgccatcgggttttggacatttattctattcgccgtccttaacttctgcacacttccatttatctattactggtacgcttaaaccctctaggatgtgcttcgtatacttttcagctgatgattttgtctggtcttacaggtatcctgaaactgctggacggttcgtgctctcttcactggcatctcaagggatatgagttaggagagttactgaccgataatgtgaacattgtccttcaataggagtcttgaggaaatggacatcctgttctctgccgattcaattctcgttcataaacaagagaaagatctcaaacggattgcagagaccgatccagagttataccacgccatggctctaggagacaaaaaggcgatccaacgaaagcagtcgtacaaaaaccctggcgccgttgagaacacccgattcacggaacacgcaggaaatgttaagccatctgcctagatgtttctttccctaccccttcccatgaagtcttaaactttttcgagtagaagttataaggccaacctgtgtatagatatctcttgtatcccgttttttccttgctatcaggtagaattcagcgtttctccgtcttgttctctttgcgcctatttatccattcacattctcaatcgataattatttaatatctgtcttctcgaacttgtctgttctcatctttcttctgtcactctgtcgaataattcttcttccgatccaatagagagaacagtatgttttgtatggacgagatgaggtttctttgacaatgtttgccaactgcgagtctcttatgtgttccctttgtattccagtgattgcttctcttctgatttccgttccgatcttgcgatccaaagcaggaatgcatagtagaggatacatatatcgcatacggaacataacttagattttccccagttcattcatcaccgcctagaataacgactcccttctccttcaatgtgtcgaccgctttcttctgaccttccttacctcctacagcttttgagccggctaaaactaagtctacttcgaacccaaatttcctggcgtcgagacatgtccagagtacacagtagtccaacgcgaggccgacgatggttaattttgttatttcagaggtgaaaagcgtccgggaaagtgaggtgaattgggcatatgcattatcggcgaaagcagaataggcatcaacatgtagatctgtgccctgttttaattcatgtgtttcgttctttgtgaaatcagaatatacgatacaccaatcaagagaggagagtggaacggaacggacctttcgaacgtatctcacaggagaagttgtacgatcaagtctttcctgaacaccttgttcgagttcccatccctgattcgatggataaataaaaaaacaaagaagagagaagaaggttcattatttttgaaaacaggtaagagagaggagaatacattcaagaacctttgtatcgacgatacaatgttcaggcctgcagaacaaggagagaggaacagagcaagcagacaagaagagggaattgtcaacacatgcagccgaacagaagcataggcaagttaaaaccaatattatcaacaaagacagtgagagaacagaccacaacgtctgggagattgtcttgtcatccgaacttcccggtagaggaacatcgatcacttcaaacatcttgtgtcccgggtgacttgtatcgaacgagacgtggccttctggatgggctgtttaaacaataagaaggatcggggtaagtatggtgcactcttgtctgatatcaaaagaaaacgaggatcacgaacagtcctggcaaggtatatatacaagagggttgaagttcagaaaaccaggtgggaagatctccggattagaagtctgcacttgcttaccagactaacagcgatgacggcccagtcgtgattctcgatcaaatcatacactactggaaggatttctcgaccatcttcgacttgaagagctcctgttggaggaagaaagtcattctgtatgtctgttcgatgaaaggttaatcaagcggttctcgacctaagaatcaatcactcaaggaaaggagaagagctggtcagacgatctaaaggccagacataccgacaagaataagggcggaatttgaattcgaatctttttgtctgtctacgctggacatatcagtgagaaattcgatggatcagatcaactaccggttgctgatgagagaatgagtgcgttccagtggatgaggtcatttaggaaagtcgtagggaatctctgcacgtgactgcactgcatcgaatgcatctttccatccacgtctcgactccttactgtctgcttcgagatatcagcggctgccttctctctatcaatcgcttgtagaatgcgttccgttgtgttgtcgttccgtcgtccttcttgtttctcttctcatctggacttgttatgttctggatagtcttcaaaagattagagatgatcaaccgcgcagtcgaacgcgtgccaggcagttggtcgcacgcgctgttattttatgaaacattcttgttgttgagtaaacttctacttcattcttccttcgcctctgtttctccttcttgttccaactttctttcttctttctctttttggccttcttctttgcagtctcgtcctctttccctcttcggctcttatgacgatctattcacgcgatgttgctaaacacagtgcacttaatagcacaagcacttttattgacacacatactgacacgctcttgtatttcggccaaggctaatcaggactctggctgggaacatctctctcctctctccttccggctcgtcctgctgttcttcttgggcgttcgaaacgtgtctggtctttcctttttcctcaacgaagctgccaagtcttaacttttatcgtgaaaccctcttgctttctatattgacccatttcttcgactctcttctccctccatcctttgctccctcttgactttgcttgggccggtggcctctctcacattcgtttaaacctacattcctaacaaatctctttcaaaccagctctctttatctctcttctttcttccatctcgtcctcgtttgacagcccaacaccttcctatcagtcgacgtaattaagcatggtcccttcagctcgcttccttggagcaataaccctcctaacactctcttcaacgctcgctcgagcggcagagctcaagctagccaagaactacgtcggtaaagattttgagaacgacttcagtgagtctctcctcatcaaacattttttgtttctagcaaaccaaacactcaattcttctattgttacaaactgttgccagcgttctacaccgaagacgacccgacaggagggtacgttaactatgtcactaaagcgatcgccaaggcgcaaggaatgatcactacttcggcatcctacttcaagatgggcgtcgacacctcgacctctggtttgacgtctagaggacgaaattcggttcgaatcgtcagcaaggacgactttgcggatggagtttacattttagatatcgatcatatgcccgtcggctgtggaacggtcagtccttgctctccccactgatgactggaagattttgctgacctggtggctcgcttctttctccactctcattcttcctcttctcttcgcacatctatcatatagtggccggcatggtggacgacgacccgagatgactggcctattggaggagagattgatatcatcgaaggagcaaacgcctggccggcaacaggctcggttgcatacacctctacctttgattccgctggtgccaaccttaccggagtcagccaaacatcatccgatttagcctctttacatacaatctcaacctgttcgattgaagataaaggactttccaccggggtttgggaatcgacagtgtgcgatgccacccagaacgataatcagggatgtggagtctcgcttggaaacggtacctggggttcgcaatgggtgagtgctttggtctctccacatttcctgcgctcgaccgagcgatgggtctgatctttcctgaatatttaaatcaacagaactcaaacgctggtggttactatgtcatgcgccgggatttccagaagtaccttcattccattcggttgacgttcccttgttttcgcgctgacctcgtgtatccacttttctgatgtatcttcagctccggattgatttacatctggtcgttcccccggaactctgccgatacccctgctgacatcattgactctaccgctaccacaatctctccgtccgagtggactgtccagccaagtgccaacttcacgatccctcaatgcaagaagaatacgttcggtacgcacgccattgtcctcaacatcgctctttgtggaagttgggctggtgggacgttcaccggaaacggttgccccggaacgtgttcagatttcgtcaagaacacacccggggcattcgctgatgcgtactttggaatcaggagcatgaggattttcactgaaagtggtcaccctgtcggcgtctcgtatgtggttcctcccgcttttcgcatttgttgttgatcattgtgattgaattcttctttctcttgcgtgttgtgatgaaatagatcaatgagaacctgggttcttgtcgttatcattctcggttctctccttggcgccggactcatcagcgctcttcttgtccttctttgccttcggcagcgacgatcgtatgtttagcttccgtccttttttcaattcttttcttctctttcaatttcgtctcgattaacatcgtctttttctattcccctatcagtcgaaacaagaattctactgcaacactacactctgagacttcaactgcatctctcaacacccgtcaccctgctacttcctaccctctcaatgaaagtttgagtgttcctcaccctcgatcacctctaaaatacttccgtgccacccatcctgcagccgtcgccgctgcgacctctggaggagccgagaccacggaggttagaaaacctggtgggttaatgcctggtgagactccagcagtcccaagtatgttagcttacaatgcggtgggagggcacacgacttatggaacaggcgtggatgaagcaattgattcaaagacccgtagaaattcattagaattctagcctgcttcccttctttcttggtccttctctctttttcttttaattctggtttctctctcatagagttttgtaattcgatacaacccctttaaataaatctacgttcccattcgaaaccttttaatctacctatgatatctatagaaacgataatttaacattgagtgtatgtttttcctcagcctttgacacacggttatcgtataaaaaggccaccggttcacaacttgaatgatagagtaaatcacatatacatatttggtgaggaccggaatacaaataattgatgaagaaaacaaatggatacagcgatatttcaatgggaagccttcgaccactcttcaccgatcatcgtcgcgcatttttcagccacgacgacaactggtgcttgagtatgcaccgcaagtatcgtaggaaacacactcgcatccgctactcgcaaacccttgcagccttttactcgaagacaaccatccaccacgccgtcgttttcttgaccgctcatccttaaagtagaagacatgtggtctaggatagaagaaaacgacgatagaggcattagatcaatagatgataggtcaaggttctacgttgtaaaaatactcacaagcagggacagcccacttcttcacataggccttcaactcatcatcggagcattctttaccgaacgcgaacggattattcttctctattggcttgacatcatacccaccagcgatcatcccatctacaaccttcgccgctagacgtaagccctgaatgagcacaggaagatcggctggatcggtcactgttacaagtagtacatagcgcgattagaattcaaacgtctcttagttttaatccttagactgtttcaagttctcatactcacagaatccaggatcacaagctgggatttctcggggatctttcgacttaagcttgattgtaccagtcgacttcggtcgaacaaggattgagattggctttgtttaagaagcccgagttggtcaaattgggtgagctagccgaaccgcgagtgaggttaggtctgaaaattggcaagagatgtaggcgtactgagagatacccaactgatttgttatattttcctttccgaagatctggtgtttttccatctggttttccgtcctacacagaaaacgacagcgtatagcatcaacttgttatgtcagttattctcgtccaacaaaaaaaaactacttgtcacggaagagcgaaagaccgagggacatacatccatactggaatgaaacctgaagggcaaaggcaggatttcaagatttggcacctcttcttcggccaatgagctcgtccaaagagggcgctccttcgagtatggtgagtgttcagagaggatttcgggaatatgggtggaagagatcatgatagccgtttgtgatccttggctacgtgaggaacgagaaaccaaagtcagaagtttaaagcaaaaccttacaagggttatcaagcttacaaggtgaaatcaccagtgcggaagagtgcaaaggaagctatctgcttgatcgcgtgcaagggtgaattttctaatcgatctaacgaatccgttattctagaaaaccacatatcgatcaagtcatacgtcagttgtgttggaaagaaacaagatatagtgctggctactacttacggaacggtgtacgggagatagacgctgagatggtctgctaatcctcggccaacatcgggtaggtcgaccaagcaagtaatatgaagctcttccaattcggctttcggccctattcctgagagaaggagaagctgagtggaaaaaacagttccgctagttaagatagtctcttgacagcatgatgcatgcagaagagtgctctcagctaaataaataaaatagagattttgacgatcagagatttgttccaaccaagtaacctgtgaacataacagaattcaacgtacgtttaccgtcttccgagaaccacactcctttgcaggttccatcatgatcgaggtccagtttgtgcactaaagctcccaagccaatttttaggccctctccaaatccggcccctttggtgccaatggttcgaggaaagaaataactctccatcgtgcttgttcttcttccatactccccagtgatttcatgcacagctaccgccgtggccgacacatctggatcattgaaggaaggaacaaccggaattcccagcgactgacttgcgacgacgaaatgttttgaggaaggataagtaaacactgagggattagtcgtagcccacgggccatccgcgcctgtgtatgcagaggcagtgttgctagggggcaagagatcggcgataggcgaagagttgggtcgatgattctgagaagagataaagtatggcagaagtttagagaaggaccagcttggaaggtcgaactgagatgcccagatgttgaactcggacggaagacctctggtgtagagggacgaattgaatgtgctgtaaaggagtaatttagataaagctgatcaagtatcaagtgaactgacgacactaataagagatcatcatacctcgctccaccaagaattttgcctccaagcatatcgcacactctgccatccagtccttgttgaggtacggtaggtattgacgaacatttttctgaaagaaatataaaaaacaacatcaggtactaaacatttatgatgaatctagtgtagaaacatacatactttcatccatctgccacgatgttgacatgagcggcgtcgatgacatccatcctctgtctgaacctcctcgctctagtagcagtacagttggacttcctggaagcaacgaaagcctagaggcaaggacgcaacctgctgtacctccgccgaccttgagaggcgaaagatctttagtttgaagaggcacgatgatgccacacaggcaaaggatagtggtaccacttacaatgatgaagtcgtatttgaattggcctttccctggtcctccaagctgagacaaaggaagtgtagggagactaggagtcatatgtgccaaacgaagctgaacagaagtaaggtgggccgatgattgataggaggaacatttgagttgggttttggtaactggatatttgttcaacgtcggcgggcgatcagctggcatcagcctgttctgatgggagagaagacaacaacatccaattgaacacatatgtaaagtcataaacattgattggtgataaactaaaaatgagctacaaaacaacatgactgggtcgtgcagagaatatttatatatgtgcgtgcgcgtgagaaagaatgtgtatatatgtaggtgtgagatgtgggtgcgtatgtaaatgtatcaatgaagcaagagaatactaagaagcagattcgtaaagatgttaaggtatgcgactggagacggctagtggggagagcacataagagagttctaaaatgcaaagataatgctataatcccagtacagaatcaaggattgatcttggatcgcggtaggaataagaatatcctctacaaaaatcgaagaaatgaacgggttagctgggcagcgcgcatatgtcgagattcataagaacgagaacaagaacgagaacaaaaacatacttcttcctaacttcgggcccttcagtagcatcgacgctagcaagcccaccttcgccctcgtcgaaggagcccccgctggaaagtcccatccggccagaagcgaggactttttgtctttccgctcggtcgtcatcccaagcctcttcgaaatcctccgcggtcatgattcggttgcaaatccggcgaccgacgttaccctcgggaagagcaagtgaaggtgtaaccgttaggatcccttctaaagcttcttgtgtaaaagtgtttggtggagtttgtggcatgaacgaagacgacgatgacgctgaaggcgatgctggttcggaattgaaaaaagctggaattgatgatttaatagagggtgtagaggaaagattggcacgatggaggtgaagatgggtagtgatgaagtttcgaacacaagccttcaaagaaaaggcgaaaacataacgcattgtggtagtaagaaaatgttgaaaacggttgtacaaagagctaagacttacttgaactgcttgatctactatttcactgactccaggttcaacctctgtgaggccacactctgtagacagccgttgtatgcgctctttaagttgttggtgatccggaagcattcgcatctcaagagccgtcggcagtggcggcaaatttgtcgatgatagggaagcttttgtttcagagggaggaatctcagcacacgttttctttgcgcaaacacaggagagtttaactagattgtagaatgacactgaccagactcactcgtcggtccagacccagattcaccagaagcctgattgacgtcgatcccattagtaggcccaagaattgctctctctcgactaagctcggagactccgacccatccggttccatcccttcgcctttgttctcgagcatgaggataagcatcttgtcctgtgatagtatcgatcatatgtttggccttgatgcgctcacgctcgccctttggcatgcctaaaacgtagttgaccacccgtcgcttggcaccatattctgtcggatcatccggcctggatcttttgagcacgttggtttctgtcgctggggtgatagttgaattggcagcattggagagaatagccatcaagaattggttatgcaatggaactgtcggcagaaagggagatggacaagacgttagtagcccgagtcatggttaccatggttactgtcttttaaatgacccttgcatcagaccctccttcccctgccgtacaacctacccttcctccgagcatagctcggacgggatccatccacaaatgaacgttggctatgtatggtctggataatgatggattcgatccaatagatgtccatccatcctcctacaaaaaatgaggagatttgaaagagaactcacttatgcgcttgtccccgactccccattcagttaccaagtcatcgagctcgtctcggctgagtcgaccagtgatgaaatcttgaagtgtcttccaataggccaatccattggatccaagagcgtcgtgcaaatgttgcttctggatgatcgatccgtcccgtttgaatgaaatccgactcaccatcgacgtcagccacaatcaagatcaaatcagaagaaaaagaagaaatctacttgcgatttttaatgtatcgatccgaacatacggagcaagtggtctcgaagggacaaccatcggacctttcagggatgtcggtgaggatggatggatgctggccattatgccggtctcgatgcgttggagctttgaaggttaacagtccgccctcctgaatgccatgaagaaaatccaaagcgatagacctttcgagctctgcttatgggttaattgatatgtgaattgtcacaaagctgtgacactgtacgtgcacccaaccgttaagcgagacagacgcgccacagcacgtgagtgatcatctacttcatgacgacaactctcacagatcaatcaagtagtatacatgaaaacctcgagtggaacttgataaggaaagaaaaagaggtaaagaaagagtggaaaggacatagcttgaggagaaaagacaaggtcacaaacagatggtatccagagttcgtaagtagagtaaagagagtgaaagggaaaagatggacagttggcgaagagcctgacatataaaaatgcgaaatgccaagatgcagatgtacgatgaagagtagtaaaaagctagaaagaatttcagtagcgtgggtagtccatatgataatgatacgcaaaggagagattgagaagtcatgaagcgaaaatagaggccagtatgggggtcatatgagaggctagaggaaatgtaatagaaaagttgatatgatctaagttgtatactagacagaaacgatcaagacaaccaggcctacatctgtccttgaaggatcttatcgatgcaggtgttgatccaaggaacctttccagataggtccgctttggggaatcgagcaaagactgcagctcttgaggttcttgaaaaatagcaagtaaaacaagacaagaggtattaaacacaataataacacaagatatagagaagacgaaagaaaacttacttcttggttacagccatcagatcctatcaagtacaatacatgatcatcattggttttgtcagcgcatcttgaactggttcatagatgaaaacgagaaggaacactcacttgagtggaaaggtagtgcctcaactcagccaaaatttcttcatcgctgggatccgtgcaatcgctaggagccgatgcagcaaacggattggccgttgtcgcgagtgaaaaggtagacatccgaggattacccattccaggctggcccccacccatgaaaccacccatagtcgatggtggtcctccttgacttccgctgaacgacatcatcgtactacggggtcctagaccagggaactgaggagggtagagtggggctgagaactcggaaggtgcatgtgttggaagacccatcgggtgactcatgaagggggtactggcaccgtacaaagagttttgggaaggattataaccggtgttgtacatggttggaggggccaacgagggcgcgcgactgttacgcaggttgggattcgagttgtggtgcttgagaggagaagcatctcggctggtagccacacacatccaatataacaacattcagaaatcagattagatgcataaaggaaaaacaacggttcaggtcttactagtaatctcctccagtctgagaaccagcgtagctctgcggctgttgaggttgcatgcgaggcccagggctactgttgtattggctcctcttgtcgtcgtgcgggtatccataattgcttcctggacccgacaccgagcctggcctagatggttgatcccatgcttccgcctcgtattctagaggtgtgacagcaacacaccagagaagagaagtagcgatgttgagggaaagcataacaaaaacggatgcagcaagataaggtatactcaccactaaacttcttcaaagggaccatcgagtcatcaaagagctcggactcggtagtcataacagtcttatccttgccttcaccaacgactactcgggtgttaccccaactgaagtcatccatgtaccagaatgagtagatcgggaggaagaatgagtagaccggataactaaatgaaaaagatacagaactaatcagcacctttgcttcacagtgcgcatcggtggtattaacttacgcaagaatatagatcaccatccatccaacgagcataaattctcgcttgatcaagaagattacggccttttcatacaaacaacgcaaggtgttagagaaaccgtgtttagtaatgatgtcgatgatggatacagattaaatgagatacgtacttgcaaaccgtaggttattccaatcaagatgagtgcaagagtgggaataggagacgacccgattgcaacaacaatgatgagatagaacaactgaaaagaaaacagcagtgtgtcaggattcagatactgcaggattaagaggagattgaagacacctacgtatacacaggtagcaggcaaaatctgttcgcatcacagaacgatatgaaaaaaattcagtttgagaggatatgagatgacctgggcagtaggtacatacaatcgttccgacaagatctaagtagacaataaatctcatggagaagagacagaaaccacacatctctggaagagtcgttaattcagccagattatgaatggtagagttgatccatcgtcgacgctgggagagaagaacctcccatctatcaggggcaaccgtgtacgctatggcgtcagaggtaaatttcatcttgaaggaggggaaatacttcatcatgagcgtcgtaaggtatctatcttcaccaagagaaaacaaattctttttgtgcaaggtgtcgacgttgggctctgaataatcgtcaatgacacgctgagagatgatgatgggtcgtcccttgtcggctgttcggagtcggtacaaactgaaacagcccgggagacaggtgactgaaccgaaaagggattcgaaagccttagctaagtgatgagacatgaaatattcgtaaacctgtttacaaaacaaatcagaagtgagtcgaagacggggcagtgtatgaggatgtttccgatttgtgctcaattacttacctgaatcatggttgtgatggattgcatctcattttgaagcttggtctctccacagacacctatgatggtagaatcatcaacagaaaccgcaaccatacggttgagagactctggagacacggtctagttaattttacaaaagcaaggcatgaagtactatcagacgagaccgcggaacataattgattagagaaaagcgaggtgagaggtcaagaacgaaccgtgtcggcatctacttggaagaggtactcgtagaaagctggatcaattccaatgatatttcgcatctgatggtacatctcaagctcgaatggcgacatgggggcatcgaaatgcacccggttaaggtatcgaagtaggagtatctgagagtctcgttttcctctgtttccaggcttggatcgctcgctgggcttcccaaccttgacagtcaccatgtaactacgaacagaaaagtgatacaatgcacattccgtaagcaagtgagttgtagaaaacaaatctggagtagatagagaacgcaaataacgcacggaacgacatgaccctcaaactcgtacagaccggaataaacttttccatagttgagttgcttggatccttctcccaccgacttgaatagaagtgcctcaggatccaacttttcatccactccaaggatgtcgagcacaatccgaggagtcgacttgtcgtttccactaccaatgatatttccatcgcagataatgaagattagcttccgtttgtcatcgtatttgagtgcagcaatggaatcgatcgttcgtcgaagagactcctctccctcggtataacacgggatttgacaaatgacaaatttgtcttgcatctcagggttccgttttcctgtaagctgaagagcagatagaactagacaaaatcgtgatcattggacactgattaatacaaccaaagaggtattggagatgcaaagatgacgagaacgtacacttcatgaagatagtaaccatgatcagaattgagaacgagagtaggatatagttgttgacagtgcatcgaggagtctctcggatgtctgcctctccgacgtagaacgcattgcgaaggcaggcatactgcatcgacgcgtacgacccgttcattgtttcaaagaccgcgttgagctttttagtaatatctaatccaggttggtctgagaagattgaggtgaccgagtcattcaggaaggagtatttgctcgaatcggtatccgattcatggtaggtgatagttgtaaggtagtccgagaggtcataaaccccattatcgtagattgcccaggttctaattcacgacaaagttaatcaaagagtaagcaatgtgatccccgaagaaagaatcgataagaaaaagctgaggcactcacttgctgcctgaatcggcgttagatgtgatctcttttctggagtagacaaaggtgcctttatagtattccttcataaaaggcaaaaaccgatcgggtaaccaatcggaattgttgagtttggctgatccatatgtctgaagagtgccactccagtgaacggcataatcggccacggcagtaaagttacgctggagagcaagggattcatcggtgactagaccagcgcaggcaaccgggaagacaactgggaaatagtacgtgagatcttgtccggcgagttcaagcatgatttcagaagtgaccgggtaggcggatacgtcggaatgttgtcctttccagaaagaggttatgtcatatactttgcctgaagtatgacagacaggaagaacaaaaaagtcaataccctttttctttccttctcagaatgacgataaaaattgaataatttgagaggggaacgaaccataagcagcgacccagaagtcattggactgagcatgttcgcccaactcggaagtgttccacacaagtttgtagtctgggcagagaagcaaaccgaagacgacgacataaaagatgacgattccacataagaggaaaatcaacacgcagattgcgaccttttctctccatgccattcggacgtccggtctagtcatctttccgaccttggtgatcatgaactccgggatccaccatgtgaggagccagacaaaccgaacccaccatcgcctcgctctacttgtctccacgatctcaagtgtcttgtcacccgttttctcgttcacgatcatcccacccaattcatcttcgcctgacctatgaccttcgggatgcatcgcatcaggaagtgtcgtgacgctttgtgcgggtttggagtcccattgatcagggtcaatccaactaggtgcgtacccagccttgtttcccccggcattgtcatagggctcataagtatgccccggagcgggatcaagataagccgagccagtggtgtttgttcggcggagaagtaaatcgtcagaactctccgtcgggccattgttatctgcgactccccagtgagacacactcgatggaagcatagactggtcatctgtttcgctaggggtaatgaacccactagctgccttcttttcttcatctcgtaactcgtcatcgacctctctccatgcgtcgtaactcaaccaaatgctgtgctctccgatggtgtagtctaatccatccgtccagcttctctcggtaacaaacttccgaacggaaacgtcgattgagtcgctagcttggccattcgggacattgtacctggatatgaagtccggaagctcataaaaagtcgtatactcaacctgccgacgaacgacaagatctggaagaagaaacgagcggatttgtgatttcactcgacgcttatcgaacgaattagcgagcgagttatcattcggtcggatgcagatcacatcccaggttcggcccttctcaattgttgtcaaaagctcggccagagtcgcgttcagttgagttgtgacaggatagacggcgccttgctcgatcagcggcgaagggagctgtgtatcagagaagggtgattgggtattaagagtcgggtgacgaagaggagtcaccgacacttgggcttgaacgacggtttcaggatcatgaggatggaactctgacgcaatcccagggccagacacaagtttggcgatgaaagagtcagccgagccccgaaggagctgaacgagagaggaatccaagatgtcggcatctctctcaacaaagccacgagcgtcgtatgagcagcttccggtatagtggttgataccgaaaagtgtcttgtcccctgccggacccatgccgactccaggactagtcacgaacgatggatgggaaccaaacttatggatcatatcctccaacacttccacgtccttatcccactccgacgtcttgccttgactaaacttggtacacgccctggcgagcgagcctagcactcctcctggcttacgatctgcccggctcgacaaagggccacctcgaagaagctcgacacaggctgcattatccatggtaagtacggaggagatcgagattcggtctgcagacatcagggcattgtatccgattgaatcatcgaacgcgcggcggatgaaagacgagtgaagagtttctgctgagaagttaaagcaaaactcttcgaacgagttttgcccgttagcggccactaacggcgccttatcggtgacgttggaagaacgactttgaaatccgggttggtcgaagatagtaatagatgtcttgaaaggttctcccagatcatcgagtttgtgattgatggtttctacaacgaaggcaaagagaagggcgtagagatcacggacaagagcgtctcgctgaagaccggcgtccccggacataaggaatttagaggtcaggtcatttcgaacgtacgtcgtcttgttggtcaaggcttgttgaagttcttcagagctgacttgaagaagattggagacttcgtaaagaacggtgatgttggcgaccgtggccgattcgtacgtgagctcccggtctccgttgtcgataaattcgagattaccgagcaagaggatggcggtgagcagagtaaatatggaagagacgtgcttaggcttgaagccgagaagcgcgagcgctgctcgtagttcacccatctgtgcatgatcatcactaagaggtccgcctgggagaaggtagcaaccggaggaggcgagcaaagcatagctagatggctcgtccagattgagggcttctctctcatccggagaagcgccagcgaggagctggtagaagatattgaatgatcgctcattctgtgacaaccggtttactcgagacttgtccaaaccaaaggcaagaaccttggcgccggagattcgacctgtttccgaaaagtgaagttcgaggaacttaccgtaccttgaggcagagggattagcggccgttttggaatttccgaatgaatcaagcaccgtaaagattgccttgatttggttggagatccgttgctctttctttgtatgagcagaaagtcgaagaacctgggagataaatagttcggaagaaaaggactttccagaaccagtgataccacttcaatcgatagattaaaattggaagactgcctgtcagcatgcgtgcagatcgatggaaaaagatttctctagttctttcagaacttacctaaaagatactgcttggttctccttcttcctgctcatcagcaagtagaccttggcggccaggtcatatagatgaggttgcataggacctccagggcgttcatctccactagtgtctgaatactcggcctccacataatcttttgcgctcgcctcattcaaatgagcgagggccttcaaaggattgacgacaagaagggtggaaggggaaagccgggtgtaaggaagatctgaacggaatcgggcgtggagaagggcaagaaggtggtcatccgaagggtaaatggtggccccccctgcagattggatgagttgggagacatcatgggtgatggctgcctctttgacggatatggtggccatatcgagatcaggagggagagaaagagggctgatggtagacctggttcagccttgaagtggcaagagagaagtcagatagggtctgaagtaagcaaaagacttgacctgtttaagcatgcaaagacagtcaacaaaggtgcattcaatgtctccgcatgagcctcgtccgattatacattacaaccaacacaaacgcaacgaaagatctcacctaatcgacagacttgacgctagcggtgatagagagaaatttcgatagctaaataaacaggacgactggacaaaccgcgaaggagcgagacaattgctgatgtgactgtataaagtccaagggcctgatttggaacaaggaatgtggattaagaaattagcacgaacaaaaggccaagcacagacaggtgcaagggatatctatatgaatcggtaaacatagaaactaaatttagaagaaaaaaatagaaggagaaatacacaacatacagagagcaccagatcaggacaagtacgatcccgaagaggaggaaagaaaagaacgagaaagggagagcgaaaagaagaggaagaggcgagtgggtggtcgatctgtgtgttggatgtatgtgtgaaggtctagtctggtcagtcactggataaggaaaagaaatcaatgtgatcattcctgtaaccaggggctttctctgcgtttcaaactgtgagcgatcgctatcgcgtcacccttgacgcgtcgcgtgccagactgaataactgactgactgtatgcacacgcgtcagtgccagaaagaattattacctattgaccgtttgaagttgctcgctctggctcattcatcctccaggcagagaaatccaattcatttatcctcttacctcttttctcctcttagaagccgtactcgatagaccaccaaagtatctaatcacttcaggtgccatcctatcagtacccttcatattgggacactctagatatcgaccttcttttgatcactttcttcctctcggtctcacggatctgagacctattttcttcctcgtaaacaaaaccgacatggctacgatcacaatgggaacccctgaagctcactatgccattccctctgctcactcttccaacccggcttggcttggagtcaattcgtctgatcctccgattgacccaggctcatcttcgggtgattcgattgtgttgaccaggttgattttgcggaaggtggttgaacgaaaggaagagtatggcggagatgatgggttaggagaggaacttccggatgaccgtgatctcgaggggaacgagactgatgaggacgccgatatgactatccagcctgaagatgatgatgaacaagaaggagaggatgaagacgacgaagaagaagatgaggaagtcagttctgtttaactctcaatcttaacgcttacagaatggctcggtctcactttatatttcttctccttataaatcttctgacagatggaagaccatcttgctcatcgttcatcagaagaacgagccatcttggtcaatgagatgagagagttagaagatactgtagccgggttggacgaagactaccagctagtggatcgtcttggggagggtatgtcatatagttctcgacttacgatatgcatatagcctcttatgctcgtttagcttaccgaacaaccgtcttgtcgttcttcccttattactttcttccttcaggaacgttctcttccgtgtataaagccattgatctgcaccatgttcactatgataacacactgtggttaccggccgaggcatcttctgaagaaacgaccactcgagcatctaacaagaagacccggaaagtttatgtcgctcttaaacgaatatatgttacgagtagtccagctcgtattgagaatgaaatctctatcctggaagacctaaagcaagttcaaatatccttcactttttctcgtctatatgcatgtgtacgtgggctaatcatacatgcgcgcaatattttcggctgatgaatattcttagaggttgctccaacatctctcaactcattactgccttccgatttgaagatcagataattgttgtcatgccgtttcactgtaacgatgattttcgggtaggtctcgatttccttccttcataagaatctattgacaaaaacttgtatctgacagatcattctgacgtcgatatgacagaattattatcgctatatgaacatcgacctccttcaacgttacttccgagacctttttcgagctttacgcgcgactcacgctagaggaatcatccatcgagacgtcaagccagccaattttctgtatgacgtccgaacgggaactggagtcttggtagattatggtcttgcacaggtacgtcctcttttcatctgacgccccggctgggtcgatgcgcatgaaattgaagtagaattttgtttttggaattacgtctttctggacggctgatatagagatatcaaggagagctaagacaaacaccgaaatgccaacatagcgccgctagcttcgaatatccacatggtaagcgtatacgaacggattcgaccaaggtcgtcgagcaggctatttatgaagtgagaaagagagcaaaactaccggcggaccgaattggatttccagctgaagacagacggtcagttcatgcaagaccctttctaaaaaaaaattaaaaaagctctctgtagtggtgatagtcaaaccaagctaaagatctgaaaacttcctgtcatccgcagaccaagtgcgaaagccaatcgtgctggtacaagagggttccgagcaccagaagtgttatttaaatgccctgatcaaagtgttggtaagtcagatctagtatctttctctgaccttgtcggcgtctatcgttaaatatgaacgtactcgctcttcctgaacattctcttcaatgtcctctcaagctatcgacatttggtcggcaggaatcatactactctctttcctcacccgaaagtttcctatcttcaactcatctgacgacacggaagctcttatggagatcagcgccatttttggaaaattaaaaatggacaaatgcggagctctacacagtacgtctaatcgttgattatctgtacataccaaagaaaaagaggtcgatatttgctgacatcagaccaactttcccattctttttcttgaatccccctctccgcctgcgtgctttttcttactcaagaccgaacattcatcagtaaccttccttctatagatcaccctggtcatcctctcgaaagtatcattcttgctgccaatccagacttttataattctgacgagcccaactatcgagccgatatcatgctcgcgcttgatcttcttaaacgatgcctggctttggatccctgcaaacggataacggcgaacgaggcattgtaccatccgttcttggcccagaatgatgtggatgaagacgaggacgcgcctagaaaccctctgaaaggtatatgtagacgtagtcacatatacgacgatgagaaaggtcaacgtgagtaccagtaacgagctttggaaaacacaatcgatggctgacctcttcttcttcgtcggtaatgtacccatcatgttttagaccacgtcatcgttaaaggcgctattcatgaagtcggctatggcgagggcatcgcttttggatcgaaacgtcagtgttcctgaacttcccttttcctttgatgtttacgcttgatctattcataacccagccaactgactatgtatgatttctttgcgcgcgtcaacaaatgcagcgtgtcctatccatgcaatccacggatacttgacttgaaagaatcattatcagaacatccaatttaccaaccatcctcttcttactattaacccccctccctcttgcattgcattacacgttgcatttttctgttgtagaatacccaatttatatgacattcaatgtcttcatcatcccacgagaatccgtcacatttcactgaaattcacatggtcatgaagagcgaaatccagagagcgacctatagaagatgtttcgatgacagcacgttttttatcccttagtgcttcttttgagatggaaaagaaggcgtctctgttggatgagaagaagtgttatatgaattgaaagaagtttcaaaagatggtccttcgccttcctcagcaaatcattctttgcttacgacatatttttcatgattattcaaaatatcagcagcggagtttcagatacaaagagaacgagcaatatgtgaaccaagtactcttgacataattcagatcaaccaaggtgaaagacaatgtttcaaatctttccttcggcataagtcatcggtttcctggttctggtagaagtttcgtctctgtcgtgagaggcttgctctggcaagatcgtcgaatcaagaagaattttagccaatgaggccaacatggacacaagagacaattttcggtaatcacatcacaaatatggcgcgaaacgcaaggagaagggttggatgtgtgtcctgactgtaacgaacgcatcttttcctcgagcggacccctcttagactttacgagttcaagtgaagctgatgcaataagattctcgtcgttaggtcttgtcttttgagtttcgagaaacctttggtgatgagttttgaaggcgagacctacatctgatctgagcaggataacgaaacatccaaaacagagatagacactgatttagatgaggatgattttaattatggtgttgacctctgagtgcactaacaagtaagaagaaaacgcaagcgccgaggaagtctatcaacgacctcgattcaaggttgatgagaagccctatcttaaccaactgagtttcgacgcgtccggttcttgcacgcgtgctatttcttcctacaggtttacttctactgtgctgttaattagcgtaaatagtacatatcaggaatcaaggcctattgaaaaaggaggatgctcggttctagtaagcatcatgttctaatcagcaggcaatttcaggttttgaggagtgatcgagagagcatgtactcagtctgtatctcttgtcctcgtttgctaacttctttcaaagcggcacacaaggcgccaccttccttgagtggttcttgtccgcaatattctcattcgttctcgtataagcactctcgctaatatgtctccatcatctatgggctttctattccggccttgagaccagcacttcaactcggtattgtacgtgggattattggagaggtcgtcttacacgtgaccatcacagctattaatatcacgtgaataactacaataaagcgattaaaaaattgaaatagaaggatatgtcaaaaaccggccctggcgaagtttttctgtttccttcgtgagctgttgcgtttccccacttgtcagaaaaattctccgtctttccgcccttcctcaagaaagtgagtctgtctataattttcttctcttgaatctttgcatttgttcgtctccctcggctacttttcttctcagtgtgcgttgtacatcagcaaggtagatttggagaggtatctttgtttggagaaaggagagcgagaagtttttttctcctgttggtcccgcggcatggaaagacagcttcctcttcagcgaaacggacgacaaccaaaacaggaggggaaagaagctttggagagaagggagaagaacgaaaaactggctggttggggtgaaaggaagagcaggaggcattgggaatgaaggatgaagcagtagtatgcgagtcccgtgagagccaatggagatacacaacagtacgacctctcgaaaggatggtttctagacacatcaaccacgaacgacttcatccttgacaatctttcataccattcgacctaaacttccaccctgttgtccatccaccaaaaagacctcgagtaattgttataactgaaagaagaataagcttgctgacttggaacctgtcttcctttccttttttttccttcggccttagttcgccatgtcttcctctaccggcaaagttcgagctcacgagctcatctccaagaacaaggctgatctcaccaagcagttggttgagttgaagcaggagcttttgactctccgagttcagaaggttgccggaggatccgccgccaagttgaccaagatgttcgtcctagccatctgatttttttctcttagtctgctgattgaaattccgttcctgacaatgtcaaaaactttcatattgcacctttttctccaccccgatttttgtctactcacctttatcttgaactctggctcggtcaaacacaacccttccaaatatcccacaactgcttcttttttgttaatcctcgccgtttcccaaaatctatagcaacaccgtccgaaagtccatcgctcgggttcttactgtcatcaacaagaagcagcgagacaacctccgagagttctacaaggactccaagtaccttcccctcgaccttcgatacaagaagacccgagctatccgaaggcgattgaccaagggtgagaaggccaaggtcaccgagaggcagcacaagaagaacgttcacttccccctccgaagtgagtgtcgggcttcttatcatcttattctatacccttcacgagaattgatgctgatgactttctgccttgtaaactgtttcccttctttctttcctgttcgtagagttcgctgtcaaggcttaatttcccttcatgatccacgattattcttgatgcggttatggctggttggatgtgacaaactttagtgggcaacaacgaaacaagaaagaatcatcttgacaaacagcgagagaaggaagctatctaggccagcatctagttcttgaacaattcatctgcacatgtctcaaatttgaccatttgactcaaccaggatcaatcaactaattgttcttatacagcgaactggctggttgactgacttgactagactgacttgtttatcgtagtgtcgtaaatttgcaacaattcacattgaaacttcatcgactagcacatagctttgctggtaacaggctcaccagatcgtagatacgacatgaaataaaaaggcacaagtgaagggtgatattacatgcggaaaagatggtatgatatgacaggagatggagagacaagtacaaataaaagcatgtgttttctctttgttttcttcagatgttgggaaagaagataaaggtggagaagactaaagagatggcaaggtacgatgtcgtataagacgagataggcagatacaaatttaaccaaaagaaaaagggagggctcttttcactgttgggcaaatccttcagtctccgaaattctttagttccgagagagtgtaaatcagagtagaatagataatcaggaagaacggccaaaaaggagtgtgaaaagaaagatgggaagaaggtcccaagaaagaagagacagaaggcagaaggacgtacgcgaacccaagagcccgttccatatcttcccacgtcatgtaaggaggcagctccagctcgttgaaacacgtgtgcgcacttggaagtcgatttgacccgggtctagagtcaagcacgatagtaaatcgtttgagatctgagcccgttgctttgaggtatgcaaaccctcctggaggaaggcgggttgaggatgtaacgaattgtagaagagccatctaagaatattaaagggaaagagcagaaggggaatattaggatgttgagtgaatctgacaagacaaggaaagaaaaggatgaaagacaaagacaaactttttgatcagagctcaacgtccggacaaaagcccagaagagctggatcgatggatgctcgaagtagtatccggaccgctagatacaacgatacattgtagtttggaaaaacgaatcatgagaaggaaatttaactccatgagtaggggatcttgagagaaacggaagccgacacatacataatccgtatgagcttgccaatcgtcgacgtcgatctcagaaatcccgcaaatcaagagctgttatcaaagaatcgattcatcagtcctattcaaatcagttaatatgcacatatcagaggcggaagacaataccaacctctaattctgctggctccaaagtactcaggaatctcctttcgactacttcatcgagccctctaagcatcgcctcggtctgctctcgcacgctctcgaccaagacaaacctggagacctcgctaacgtattcttccttgttatcctccgttacgtcgatttccgctccattaggtctgagaggcacctcgatctgggcgccgaatgcatcaagcgggtgagtaaacgatcgatacaagaccgaaggatcattgtttctaagaacataagcaggtaaagatatgaccacaagaataagatggtaggaaggataatacacaaattaagacatataagtactagttaatagactcgaaagatattcgcacaggagaaactacttactgaacccattccaaactcttctccaactcatcatctactcccttcaaatcttctcttccaatccctcctcttcttctctttcttctttgcctacagtcatcacgcccatcgtttacgtcctccgtctcgttccttcgtcgtcgtctcgttgttgtactcctttcttccgcttggtttattccaacttctatacctccaaccaacaatttccagacaactccagcgaacccaacgctcactttctctccattcaagagtgccaaaccgatgaggcgaccaacgacacggaagtagtccaaatgagcagggttgatggctgaatttgggtttatcgatagcaaatttgggtgaaccgtcgagggcgcatggaagagtccataagaaggatcggcgatgtgcattgataggagttgaaaaaattcacgagtgaggccgccagcgtctatgccttcctcctgatcaaagtggacgtagaacttgcgtttaaggtcttcggagctctgtggagaggaggaagagcaattcataatgaaaattatcaagtcagaattgaggtatctctccctgcgcctcggctttttgcgtttatcaatttaagaggaaaaccaacgaaccttttgagcgagtgcatcgaacgcagtctcaaacagatcctccctacgaacgatcacgatacaagctctctctcgcatacctacacttgctcgtagatcctctcttcctcgaacctttgataaaatttgttcacggacatacttgacttttcgtcgaagtgtctgtttacgcggcttgtatctgttatcacccggttacataattcagaaggaaatcagcctacctccgagatacaaacaacaggcagaacacgtaaaatgaaagagcaatacgcacagttcccaagttgtaatctttagatggtgatccacgtaaaacggccttccgtcatcggcaaaccttctttcgaacctcctcggatgattttctcctatccgtccatcttcatcctcatcttcatctccatcagcacctatgtcatcttgttcataagtctccagcctatcatcatatatactaggctctgtcgttctagatcccgatgggaacgtacgcgcagatgatcggaagttattagggtagaggttgattgtccgtgctggccccgagggatagaagtcaacctcgtttgagggtgttcggggccgggaaagggagaaagaagaggaagatgatgaccgagaagattcagaaagagagggcgtgtacattgaagaagaagccgatgagatagaagagccgagagacggttcagatgaagaggaatcaggcagagaggttggaaggagaggggatctaga

SEQ ID NO: 1198 - DNA, 22179 bp, Xanthophyllomyces dendrorhous
tcagcactggatgaaaacggcaagacacaaattcactatcaattaaacacatacgacggagtccaggccctagaaaggatacctgttctgaagaagttcatgttctcaaaaagagaatttgaagcgagcaggcaagagacgggcagggtgtgtatgtatgtagactgttgtatattctaaccgtccgttctgatagttgagattcgagaggctggttggtggtactgcttttgacgtcacgtgagctactttggtgtcgtaccaacccattttctctccagtatttgatactcatgcgattccgttgcagaaggagtcacacattcatcatttctataaagatatcgacattcttcctatcgcttcaacgttctctgcttcgccgcgtcctctacaatctttttctcaacaaacattccttttctagttcggactccgtcgacataaaccttggcgatattcgctcgctcggccagagtacccaggtcttcaagttcttcctctaagaaagattggaagattgcgcaaccatgtaagaaggcggaaaagatgaattaaatatcacgcattaaggttgaacaaagccatgaaaaaattcaattgagggcgaagactaaccggtggtgggaacccaataagggtcttggtcgatcatttggtatctaaggtttttcaagcgcaaaggatgagtacataatgaagcgagagtagaaggttgtgctggtgcttacccgctgaacaccaactgagggctagcagctccagacgatcgttttcttatttctaccataccataaagaagcagatgagacttttgagttgagctgttatcttcaaccgttaccaaagaagggaaagaagatggttgaaacgcaccatctgcaaaaccaaaactctcgatgacaggcaagagtgctcggactgtgaagaaagaagtaccctctttcatctcctccgcaacgattttccctcgtcttcgagcaacgactccgtataccttacccaagacctcggctaagcaaagcaaacagagtaatcggtaagaaatatgacgaaacttgatactgagaaacagactaccggatagagaagaatcgggttgacttactagaagtttgaatatcacaggtgtacatggcaagcaaaactcgaggggaccagtctagtagacccgctcggcaggcgtccttgatggaggagatcaatgatccggtcgcctgagccaatttggatcgaactgcttataacaaatttcctcaggcaggcgtcaacattgaactctcaaaccggaaagaagagagattttggaccgaagaagacaagagaaaaacaaactgttttcatcgtcctctgagacctcgacatcgagcttctccacaaggtacgccataccgaccaccggttcggcgcatagagggccctggaaggtggctaactggaaaccggtctcgatactgtcgtcgaagtctcgcatcattcgagcctcctcagaaagagaggatgatccaagttcctcggcaaggtcgacaataggtccatcaactactgaatccgtaataggcgttgatggattctctagtgaggcctcgtatcgttgccgaagactaattagtaaggcacgcaaacaatgtagaacaatcaatcattggggaaacgttgatgggcaggaagatgtatgaggaaaagaggagaaaaagataggcgagttactcacggctttacccttccatctggtctgtcgatcaaaaggtttgggcccaccctctttggtccaaatgcccaaatgcgatcgacaactccgacccaatccctcccacactgatccgagacttctcgtaacttgctccagaactcttccggcttaacttctctggcaccttcttcgtctcctccaccttcggtagtaagttgcttagatgtcacttggtccgagtcgtcctcacccgaggtccgtccagcccttcggtcgggttggatacgtcgcatcacactcgtgttggcttgaaggaaggatgtaatcttcaaaggaagaggtactgctcggatagtgtagttgacgagcgagttagagatcgaaccctcgatcgttccacggggagcatctttcgtcttgggtggggccatgtctagaaagtttggaagaaatggggaaggggaatggagggaacaaaacacaagttgatgcgcgtaaaaaattaaaataaaataaaataaaaaagcaggctcgtagctttcggcatatggttggattatctagacgaagaaagcttgatcagacttaccgacacctttgacagcggtttctcggaagggtacaataggtttggaagcttggatttcgatttttgcgaatctctctcgaagatctttcaaacatcgctgatgattcaaaagagcaagagcaagttgtcattcgcatgatagcaggaatgatacaaaatacacagacaaagttggatcagacatacctctaggtgcaactcaccagcggtcaagataacatgctctcccgtttcctgaacgagtgtttcgacgcaaggatctgcctgattgagcaaccgaagaccttcgactaactttggaagatcggctatgaggaagaagaggatagatttgagaatatgtcaactgatggttttgaaagtatataggtcgatcgaactgaaggacaaacctggtgactttggctcaagagccactcgcacaattggcggagactaccggggtagtaaaccgatcaataaaggcagttccggagtccggtaagcacttggcgagcacgaaggaggaagaggatgataaggtgagctagcagactgaccgtcataattactcccgctaagttgatcaatccagccttcaacttctcctcgtcctcaccctcaaccgcgcctgtttgatccaatgagcaaagcgtcgcgtttctaagaactttgccttctaagccaccaacggcaaacacgttacccgctggtacttcgtcgacagcaacgagatctctacccatcatcatgtataacttcgacacagtgaccttgttgatgaactttacattcgacgggtgggaaggagccagctcagtgttgtattttgggagtagacaatgaaggctcgttcctgccttaagtgttccagagtaaagtcgagcgaacccgatgagcgcctcggttgatgtcgaagcaggatctatattttcctcttttactggcggagcaggagcaggagtgggagcgggattctgctcggcatttcggttgagttctgtcgttcgaagtggaatgccttcaggtgttaacgttgctaccgaagactttgatacaccatccgctccgagtccgatgagagtttctctgtcgagagcaagctctctttctctctccgccgctcgtcgttgtcgttccaaccgactgcgctctctcatctcgtcagctgtgatctcaacgactttgttctctggtagttgatcttttgagacggcgaacatcttgctaacgtaggcgacgatacctgcttccggactaggatcacatgagtacaagtctttctcaagcttgtttgttggaaggacggcagccgcggtagtgtatgcatctgggtgaagcatttttgggactcggatggactgagcgatctgaggaggaggaatgatctcgaccacggtttggaacgtcgtggttgatagagggagccattgagacatgatcaacgataaaagtgtcttgtgctctttcgtcctaagatcccgaggatggagcttaacattgagggaggcaacgatcttgtcaatcttgtccgagttactgataaattggcgcaaatagagaagcaagccggtcagccgactcactttctttctctcttttcatatgaagaagaagggtaggagaaacactaactggtcaagaacaacactttcgtacactctccaaatattttccagcacaaactgaacaaacatcggtttcaaacttcttcctgcgagtttcttatgactgacgacccgttttgtctttgggtcaaggtagtaatctccccagagaacttttcgaagtttgctctcctcgatcttcaatttttgagcgtacagctgagcaaactttccgactcggaacgcccatccgtcgattgcgctggcaaagataacgtttcctctctccggggcgaagtaaatatcctcgtcgtctttctcttcaaattcgtttccttcctcgtcttcaccgtcctctggggtggcgcttccactttcctcgaccctaccagcctcagcttcccgtcgagcggccatgcgtctctctcgctcttctctccatctaagatcatcctccattcggtcggatgcataaaagcttcccattatagcgttcacaccttcgatcaattgagatagatgatgatagccttcagagggagataacctaagctcggtgatcaacctgtctaacttattgatcaccaagatgggtcgaagcttatcgagccaagcttgtcgaagtacagtgatggtcttgggtgtttgtttgtttgttcgtttgtttttaatgaatcaagatagccacaggatgagcctgaggctttcttgaacagagagaaatggtcgacgattgacgttacctgagtgcaaactccttcaactgcatcgacgagaacgagcgctccgtcacagagtcgagaagccgtagagacctcacttgaaaagtcaacgtgtcctggtgtgtcaatcaactataggagaaggacgaataacatatgttcaggttctattccttctctttcgaaggcctattgaacggcatgtggcacgtgtatgtatataagagagagtggtaaaccagtcttacgttgatcatgaaatcttgtggaacaacctctttggactctgtgatatgaaattatcacatgatgtttcattcgtcagccatatgttccgcctgtcaagaattctatcataagaggctagtccaaaggatcgaaagtagaaagaaaaagcgaaaagaaggaagaggacagacgaaccgttattctttcgtctcaacatcttgaaaccaagactgactgccgagctctccatagtaattcctctctctacctcatcctctctgctatctaggtatctcagactacccgccagacgggaagagatgatgttgttcgccgagagtagggaatcacagtaggacgtcttcccatgatcgacatgggcgattacacagatcgaccgaacgttgctttgagattgaaacgcctttttggacatttcttctgattctatcctctgtatgtatgtatgtgtcaagaagaacagggatagataaatcctttttgagaggagagaagtgaaggatgtgaagagggtagcttgaaaagctgatccttccttaactttggaatgtagacggttcgctgacgtagaataaatcacttcttccaaaaaaaactgcgcttctctgatttcctctagtgcttccgacgacgtctccctctctccttcgcttacaggcgggacacagtcatcactctgtcttcaagtgagtcacagtcatgattctcctcttttgagcgagctgacggctccttgaggaagtgaacggaaagcgagaacaggatgactccactttctttatctatcttcagttcttatttctattcttgtccttttccttctcttcttcttttgccacaaaaagccactactcaacccgatttgctctgataacttaaggccaaagagaaagaatgtaaacataatcagagttaccaacaataccctcccgcacactcaaccttccttcatcccgtctccttataaaaacacagtgatatttctcacttccttcgttctctctttcgttttctagttttggagaaggttgattcgaccggcaagttcgacctgagatcgaacgagcgaagagaggtacgacaccatgagagcgtcctgttgaaaattgacgcgccaagaatagacacacatgaaaatgtttgaagaaccagctgtcagaattggaggagccagaattgtgatgatcagaaggaagagaagggaaaggaagatgagaccatacctggagctgtccagaaatcttcttttcccactcatctcctccaccgacctttccgcacacatccatcaacgctcttccaatatcggcattaccctctacctttccctcaaccacatcgttgacgtacgccctcaccctgacgagatcttccctcgcaatcttcagcgaggcctcgagctcggccagaggagtcgtcgcggtggcggtggaggggatgatgttattcaacgaggacgtctgggagagagtaagaggaagatcggtgaacgaagttgaggtctcttccgttggctcggccggggcgggtgcactttgttttcggatttttcaggttatagtaaagagaacgtcgatggatgagatgactgatttgcgaagagaggggcggaggaagaaccaagatggtagaaagagaaagaaagactaacctgatccaacctcgggctccaagctcctcggtgttctcagccttgacatcgaccgtgacgtggatggcagggtacggggcggtctcggcagcaaaaaagtcgtgaaccagggatgagaaaccatcaggtgatgatccggtagagtacctgtggattcaacaagagtgtagaggcagcaagagagataggtagagcagagagaaagaagatcacagagaacagagacagagatatcaatacaatgaagagggttgaacacaaagagagaaggaacacgatacataccacccaacaagagtctccttgtcaccagacgccttcctgaagatatcgagcatcgcccggtgctcctgctcggcaaagtacgttcggctttcatcatggggtacggcaaaagagttggtgatcacgacctcacccgcgtccgttcgcttaccaaggagggcaccgatgaccctagtctgagaagcatccggtcgtcgagtatagtggttgagcacggaaagcaaaggaagtggctggagagtcagactggccggggctcggctgtttcaagaaggcgagaggaagggttacagaaacaatatggatcattttatttttttgcggtcaagcgaaggaagccatcgtcagcttctagaaattcttctttcttgttccagtcaagcacagatacttagaaaggggaacgaattatatactcacgcgctgtgaacagaagcggaagccatatcgaacgaaaagaaggatgaacgaaaggaggatggggagagagaagagagggagagagaccttgtcaagagcaaaggaaaacggcttgaacaatcggatggatcaaaaaaggagagggtttgtctttggtaacttacctaagcaatattgttagggttacatggttcaggctatatatctacattttttttgattatgctacacacatatataaccctaattacttgttgtgcgtccaccttttgctcaagattctcctgtccactcatcaagagcatttaaacccgaacgcaagacagcgaattcaaacagaacagtgttgatagaggagagccaagagagaaaaaaaaagaccctcggtggctgataccacacgaggaagggagggagaattccagaagtagtctgtatgaatgtcaatgtaattatatctgatacagcaggaagaaaagaaagcaagtaagagtcggtgtaggataggaagaagaagatgccgacaggtcagatcgttccgcaggggggacgatgtctcttcttcatttcacttgggcaaggggaatagaaagaatgagttgtttttgcatataaatcagaagactgcacgagggcccgtatgactcggcgttctttttccattctctttttccacactcttctgatctagaagatgtcatgatgtttatgataaaacctgaatccggaaagcggacagggtgatttcttggcgttcggtatgtcagtagggaaagaatgggaaaaggaaatccatctgagaagaaattatgtgcatcgggacggagactaatttgatttgcgcgagaaaagcacgagctcacttcgttcatttcattttatacatattcctttgtctgttcttttccctgtctttctattctagtctgttcgatttgctttctttttttttttaaaaaaaagaagagaaaaaggaaaagaaaagagaaaaagaaagaaagagacggatgacgtgagaagagacggagcaaggaaacgggcaatagagaagaaaaagaaaagaaaaagagtaagaacctaaaggaaaggtctattgtgtgttgtctagaagagacaagagaggtgtattcgtcacgtccgagtaccgatagagcacatgggtgtttttcgagtgagggtcgatcagtcagtgtttacaaaatccaaaagaggagggggaaattgagcatgtttaagaaggctaggcccaaacggtggacaggctgtaaccgaaagatcatggggaaggggagagaacggaatgtccggggcgcggcccggcttatttgcttgttgttgatctcgttttgcatgatcagcactatcgcgcagcagtcttgaagccaagaccccacgcgagactgttttcagcctttctcgatatagctttgtgcctgagaacgctctgcacgacgtaccttgctgtgctcaaccagttcttgtgtgtattttgccccttacttattttaatatatatttttacaacttttcccctctgtcttcccgccgattctttgccacgcgagagagaacgcgcgcgtgcgtagatcgaaccaagaaaacacccggacggcacgacccgggcaggaaggcaggcaggcggattgtcgatcaaaagttcaacggcaaaagaccagtcaaaggaagagagaagaacagtaaccagagctaacaagcctagcctctttttgggttcttgctcatcgacaagtctctcttacctcctaactctttctctttccttctctcgttctctcttctttcgttcatccgtccgtcattgtcttttcttcttgcacttagttctctttacacttaggtttccgttcgttcatcctttccttctcttttcaaccttcctcttctccctttccttttccttcggtcaaaaacagaggctccacctttctttgcttggtcccttcggtctccttctccttccataggtcttgttcgtccaaacttttcaacaaccaaccgttccatccatccttggttccaagccgatctctcccgctcatccattctctcgagttctgctttcgcctgctcccttccttttcaatctctcaggacttcctactattgctgctgctgccactacagtatatcggcaggacgctcactctatggccgcccgctgcggctttacagaacctaacagaagaggttcaatcaggtcagtcatttggtcccctagtggttctctctctactgttgttctgacctctttcatgcttgttatcgcccttctatctatgtgtactttccatctgtttgtgaacacataacatgtcatcaaatctcctctcttccgctcacctcatatccttcctcttccctcggacgatcttcttcacgttcctgtcccgaccctgctgtggaaactcgctctggcacatctctcttctcgtatatgctcccctgttgccctattcctctctttctctcgtcagaactggcatccttacggtcgaaccaatttcaatctcacctcaacccatctcaatccatccgtcccatcgactgccgattgaatcaggagacgactcggacgactctgctcgtacgcctcctcttaagttctacagtctggcaaacaaacaaggctctcacgggtcgatccaacaaccgtctctattcctccccccgatggacaacatacacgtagaccatcgagtcagctctcaacctgtccagaacggacggagagaaagcctccagttgattggtagatccagtggagatattccctggtgtcagaggtacgtgcctgtctactcttcgggacatcccgaagttcggagttccacagcttgaactaatttcgagctttctatttcctctttctgatcgtctctatcacctgtcttcagcccatcctcaccggtcgaacacagacgaacatccatcgcgtcctcctcttctccacagaatgcgttctctcagaggtcacacaaccctcgtcggagaccttcttcgtcttcgtctgcaatatccataagcactctccgaccacactccccgtctactttcacagcatctggctttagtaatggcctcaagctccctcccagacaatcgtcactgtcccctcttcatccggctccaatcgttacccctggatttactcctggtcaagcccttccgacatcgccaacaacctcgtcgcattcgattgacccgttgactgttcttcctatcccgccgtcgtcgtcattgtcgtcgtccgacattcaagattttaggttcggatctgcacccgcgtccacccatctgacaaaccggttcccccgaaagcttagtcaagacgaacggtcgctggagagcccgacgggtgaagacgaagagatgaatgatcgggcgagagagaagttcagacagcagctcctcaacgccgggctgtcctcgatctcaatctcactgccgacagtgcctctcggaagcaacgtcaggtcacaccagaccccacccgggttcccacctctccaaacacccctatctccttctttctttgagccgacgacatccccgttcaccacatcctacgcaccttctccatccattccactttcctccctatcaccctcagcctactcctccgtcactgtctcccctaaggctgagactgccaacggccgtagacaatctgcgtcgtattttggctcggcctcgtacaacagaaactccccccgtcctccttcggactcccttcctaagtttgccagcccgaacgacgatagcggccacagcggcgatgacgaggcggaagaggaccgttcgatatctcctcttcggacaaggaattcaccccgaatgctggatgtcaaaagattaactagagataagaggattcttcagccggaagacggtgatggaagtgggatcgaggacgaatcggatagcgatgggagtaggcacgaggctgaaggcctacatggttccaatcggtcttcttccatatccagacggacagatgctctcaaaccctcattcgacttagataatgctcccggcccaccgccgtttgagacgtttacttttgaatccagatcggaatcacaaccgagatccagatcctttcctcatgatagagatttttcttcttcaattcctcctttgcccttacattcaccaaagaacctgactccactatctccacttgagtcgcgtcctcaacatctgcaattgtctgctccacatgatttgactaacgacgcctcccatccagagattatgatcctgccaaacacgccaagactgaattcatcatatacctcgcccgaacgtacacctatcaacaacactctccgccgaccgtctctctcaccctcgatccgttctccatcgtataccctcaaggaaggtcatctcgacttttcttcgaacatcttaaatccaaacactcagagatcatccagtcctcctcctcctcgatctctttcggactcggctgttcctcgtcggccatcgctcgcagcagaggttggagtggttttacctccggtactggctcgtgcatcggtcggcgcgctctcggatgaggtcgaatgggacatgaactttattcttggcgatgcttcgctctccggtatcgggaacgatctgataggcggcccgtccaggaaaggttcactctccgggacgagagctttaaattccatgatcaccccgttcggaagtccaccagaaattgattgtaagtagagtgctttctgttatctctctttctttctgggacaatttcagagtctgactgatttcacctaaatctcgctatcttgcgtttctgttagctttcgctgagtttgttcaaggtcacgatccgctttttaacaagacaagactcgcctggacactcagccgagtaccgtcgacgcccaccggctggtcgttccctgctaccggtggctacaccataattgatttccctgccgacccgaccgcttcctccactggctcttattctattagtagtagctcgaccacttcgtttcctttcgctcaacaaccgcataaattccaaaatcaattagtcgattcgatcatccgagggaatcgaccgccttcgccttcctggggactcagacgaaaaggcaaaggatgggggatcattcctttccaagactcaaagacagagatcaagtttggaccgaaaggaaagtggagagcggaaggtggcagaccgaggcccccaagtagaggcactgacaattacggcctacccaagacgacagaagacgtccgaaaaagacaaggactacctagaacgtcgatggcgactgacagcacaatggatagtaggctgaacagtcggtcccagtcatgggccgaggagaaggatgaagattttacccgaaccggaccgatcccttcagacggtgccagagtgacgttcgaggatgactatttgagtcttgctgggatgaaagattctatggtatgtattctctaccgtcttatctctattctgtctcttttccttgttctccgtattcctttctacagagatgagctcatatctgatcgttatttttttaaaaaaactttgatttgcaaaacagctatccggccctccgtcatcctcttcatcatcgaccaagcctcgatcgataaagtcacccggtcaaggagaccattccaaaccaattccgatccaatccgatccttacgactatgcctcgtcctccatctccgggggtcaatatgcgtcgacacctcgggcaaccgagatcgtgtctcctcccgctagatcatttgaaaagaccaggccgacggagaagtcgaaaaagacagcaaagtggctgttgacgttgaagcaggccggtgcggctctcggttcatcctcatcctcgtctacttatgccggaggaggaggagggaagaagcagtcacgggaaccagaccaaccgacgggtaactacatccctccttggatgtcagctggaacgacgggaaggaaggaagaaatcggattggcctcaaagtttaaattcaagcgacgaagtatatccgatggcagacgaaactcaagagaaaaagccagctttagcggaggcgaggattcgagtggagttagcttacggagcagacgtggctttgagacagatgacgagacggacgatggagaggcgagggaaggaaaagcttgggaggatgtaccgacggaggcattggcgatggttatccctcttgcagcaatttcctcgtcgacgacggcagacccggttcgatctgctggttcagcagcagatgcaatctccagtcgctcgaccgattcgtcttcctcagaattcgtaaaccatacgtccagatggagtcgttcgccctcaccaggcttctcttttaatggaatctcaccgctcgtagagactgatagtggtggcggaacgcccgatctcgattcattcgtgaagtccaaaggcaagacgacgactacggcatcggcgacaacgtcaacagcaggaggtctgaaggttgctcctccgccaccagaaaactcgttgctcgtgtatttcgttcctttcggggatggtcacctcttgccttcattttctgagagtccatccaatacattttccggaccctcgaagctatttagtcatatgcgattgaaaagaaatccgtctcagatgtttcatcgatcgatgccatcgtccggattgaaaccttcttcgcaagagtcgacccgttatcagcaatcatcatatccttctcctcaacagccatcttcatcctttcagtctcaagatgcaaggtcgcctacgtctcttcaacctccgtctccattttcggctgcctacctacagtctttcagccttccatctggtcttttcattcatcctggtggtctacctataacagatcctcgaccaggctcggtggtgcctcctttggcaaactctacgccttcattctcctcgttccggatcgtggcacgtgtggtcgatccttcggacctgacgttcatcccttcctggccttcatgggaatcccaacagaacccgtccctccatgctacgccggaggtgaagctctccgaaccgggaacaaacccggagacatcagccaaggatagtcggacaggtcggaatgatccaacggttgttggtgtctgccatggctatgaccacggggttgaatttgttcgtgaaggttgggaacgactcggtttcgtcccagcttcgatgaatgaggaaaaggcagagaccgatcggatagacctggatgagaatttggagggcagactgttgggcatcttgggatgtctgtcaacagcctgcgtggcgatcatgagctctacagctagctaggtttcagtccgttcaggttcattctctttcgtccagtatttttgcttttcttgtccctccaaactctttggtttcttttgcttttccaacacggtgtctgttcttctctcgcaatctttgtttttgtttttgtttttgtttttgtttttccaagttttctatctttgctttgcttataagttgcccctctatccatctcctttctctcacactccatacctacagtgttctctttttgttctacatattaattcatattcatctacactacacttagctctctgccaatccccttggtattcatacctttttgctgccccttctcgtcctttgctccattctcctccgtatgggtctctatagggtatacgcgattcatgatatatgagcttccaatctagaatcttactgaatggctaaacttctttgctcgtcgtcattgtttgaaccgattaacagacagaagaatgtgatcgcgcctcaaagataataagatatttgccgcaatcacaatgatcaccatcttgaattaccatcccatcaacgctcgaccgtttcttggtgattcagacaagaaagaagagagagatggatacattcaaagccgatctgttcacttccttaccaccgtacggttcatcgtcgttgtcatcttatgaccgagtacttcgaacgatcatcaacactccacccacagtcattcagccaactcaaagaaagatcttcctaaatgagattctgagaagattagaagatcgaacgttcgactcgaactgtgagtttcataaggagggaggaggagaggagctcgagatgtatccattgatcttggaggaagagacggctgacatgatgtttctcttgggcacgcctgggtacatatgtgggcatggttgtgttggtgtacagcgacattgctcgctcttcaggctgttaagacgctcggtaggaaccctacagggagcgagctcttggcagataagtcggttcgtgtgtctttgccattactttccggttctctgttcaataagctttgtgctttgtgcctcacacatctgtttgaaacccaccggccgtctatgaaactcgtcttaggttcttgggacggtcctcagttatacagccctacctctaaacacgtttacctccgtgtcgcaaccgacagaccaaacccaagagaaagctcctatgtcgagtccctcggatggatttggaaacccgacatcgacagaggcgctcagaatactagcgaacgggctgctgttacacgaatcagctagggatgcgcttagttcgctgggaggaggacacgtaggaccctctttggtcactgtccttggttggggttcggaagatactagatctcttccaacaaactcaaaggttagttgctcagatgtttgttaggattgagacgtacacgattttaattgtcgacaatgctttgtcctcctcttctctcctctaactttcggtactacacagaaactatcctcactccctacaccagataccattttcatcatcacacggatcctttttctgctgacggtcaaacagtcttccttgatcaccactctcgttactgagcttgaactacctcatatattggcccacgtacgtcgtcgtatgttcgatttgccacgttccatgacaaaatatcgatttagcgcactaaccagagatgcttctttccaatttggttctcatcatgagcagcgcatccgaatcacgcctccagcatcttcatcacctcttgatcctttgcctgaacttctgaaattgacgttcaacattttgatgcactaccctcgttcaagtgtctcggctatcagtatggatgacgatggagggttcatttcagaggtggtcgatgaatctgcacagattcgggcaggagctattggacatttgtgggataccgctttggattggtgagtacgcctctttcttatatctccagatgagtctgtctgccaagacatgcctgattttccccttcgatatctttttttttcttgcgaggatacagtttggccgagcctttgatcaatctcttgttgtctttaccccttccctcccaagcgtctccaatccctcctccttcatctgtatcacagactttaaactgccttctcacacttcccacaacccctctttcctccacctggctactctcctcgtccgagctcggtgttcgaggagataatcggccaggttcttcatctgtggccggaacaaaccaggtagataccgcccgtgcactgctcggattggcagaacggatgacagctccatggaatgatacaacggaaagaacgtggccttcagttcagattgtggaagcaacgttgtctgtgctgttcctcttgatggctagactatgcgctggattggaggtagtccgattgcatactgaacaatacctgttcccgttagatctgtatgttctcttgcccttctatcttctcttattgtgtttcgtgcttcgaatagagtatcagaatggtctaaccattatcacgaactccttctcttccctaacatcgaaaatagagatcgagcagaaaactctacactccttcaagagcggagtacactgctaggaagactactccgactgatgactagtccaaaatattctcaaaccaaaattgctatcggcgagatcttctttgctgtttcgaataagaaccgttcgtcaccctacttttctgttgcaggaaggacaagacttcgactccttccacaagtttttgagtattttgtctgaccctcgggtccttcccgcccccccttcttcgtatcttctaaatccatgattacgctcgtgccctttttaaaaaaccaaaaaaaactagccgacacgatgtctgcactgataggttatgggaatgccgctggctttcttctttccaaaggtttcactgccaacgcacccgtatcttcatcaaaatctaactccttggataacgcacctcgatcaaatagccgtttgaatccggtaacaggactcgctccgacaggtgggccgacgtttgacacttcgatgactgaggaagagaaagagagagaggcagagagattgtttgtattgtttgagaggatcaagaagaacccggctgtctcaatgggagttcctaatggagaagacaaggaggaaggagagaaaggaaggaggaaaacggttgatccggtgagacaagcggtggagagcggtcgatggcaagagatggacgagagtgtaagccccgttctcttcttatttccggtttggtcaagcgaggagcataagataagaatatcaatcatttaaccgttattctaactgaattctgcgttcaaaacggatgattcagacggaggaggccatccgacggttggacctcgaagaccagagagacgaacaggaagccgagaaagaactggcgactctcaaagctcgacggaatttctgatagtctccaaatgagcattcttgacatcatcctttctgacatgtttgaagattcttgagaatattcacgcagtgagcgcattacacaaaaaattgaagaagtgaaaccccgtgaaaagatgtgaagagggatggaagcgcgaaacaacgggatagactgggtaagaaggagatttgaacagatcgatggcgagggaaaaagcacagacgggagagaaatgttctaagatatatgggatttgtaacaagacaaagatgggaggaaagcgagtggagggcaaggggagtggaagacacgaaaaagatgaacccgaacacgaagaaaaggaaaaagaaagaaaacagaagatgaaggcaaaggagagagagaacaagaggaaagaaagctactttctcctgactgaatttggattctttcttccatgtccaatcttgggcaagaacccaccgtcccttccacctccgttctcgctccttcttcctttcccactcattccgacagagtacatctctggcatccaatcagcatccaaccagcttccacttccacctgctccgttgccaccagactccaaactcttctttaccaacctgtcagcctttgccttcctaccctgttccattcgaactcctctctgccattctgcctgatcctcacgaaggacgagacctgagccaccatgtttctgacctttggaagagccagctttaggaagagggatagagtaccgagtacctcgggtgtgatattgaaagttctttttcaagtgaaccgtggtggtttgctcggaagagccatcggtcggggcagaagtagtgatggatgttcggattaatgtgggtccaccacaagacgggcagaactttttggacgggtccttgcagagtctgtagagagcacaaaggaagaaggcatgctcagtaacagaaaggagaaaagtggcgatgataaggattgggggaacctacttgaagcatgcatgacatctaaggacccaactcttgacgctcctgatcctccttccttcacctccgaccaagttgagtcccatctgaagcagaacgttctggaccgcaaaatcgctcgtcatgcacgcgctcttcaagatggcagacttccgagctttcccgccggtttggttcgcctcaggcaaagcgagtcctagatctttagctttgtgtgtagagacattggaaggcgtgatccatgctcctccttcctcctcatcatcctcagagttggaatcatcggaatcagactcggcttcggcgtcagcggcctgtgccgtcgacgggagtgatggaggaacaacagcggtagtagtggcaacagaggacgatgaggaagcagaaggctgcggatccgctactggagcgggtgaggcctccagtgtagctcgatctagtcgttgagaaattgattcgacaatgtgatcgtcggctggaacatccttctcagcctggttgtcagtaacttcgccgttggcatctttctgatcttctggtgcgttggatgcgggagctgagacagaagtaggggcagagacagaagctggattagatgctgggcgctttccccatgaggaagtggaagggaggatagaagaaccaggggtagatgatgagccagacgtagtgatgctggcagtggtagtagcgggttgatgtttcgaaggagaggaagcgggtgccgaagagttgtttgacttggaaggagaagtgggtgcaggagcagtagtggaagcgttggcagaagcagaagcagaagcagggacaggtcgaccggccgggggctggatcggaaaaagaactgatattaaccccgtattctcaaagggtttcggtacgaggcaagagttaaaagtgtacggaccttgccgagttcgtctcggactctccagtgaccattctcctcgacttcgaccgcgtacgtcagagcaagaacacacagatcagtatgcgaaagcacggcataatctccggtttgcttagcgaatgcggtgactacgttcataaagaaaagacagaaggagaaaagggaggtcaatcaagtgagattaagagtgagcgagcctaggaatagcgatctgtatctatctaacgttcgaaagggagaacgaacccttagccaagcttacgaggtcgacgtctctgacctcgatctcgacaccctcaagaagacctaacctctcaaagtgctctctagcgcgcttgtctctgatttcggcaagcacctgaggggcaatgatgtactttgaggcaagacctctaagagggaactgtgtaagcaaaggggcagcatcgaggataaggttcttgataggcggctggggttgagaggaggacgcggagggagcagaagtggtagaggatgaggcgaccggaggaacggaggacgacgaaggaaccggagcggtcgttgaggagatggggtccatggtatgggtaagatatgtagggatggcgtatcctgatgagttctttttgattctctagaaagaactgtctttccccttctatctctctctttgtgcttgcgagagaactaagaacacgagagtagctttcttgtgggtgttggttccataatccaaaaagtttgagaagggaggaatggccggattaggtaagccaatgaagatcacgtggtttacgtaatgcgccctctctgtcgtaaccgctgccgctgggctacggtcgtggttacccccaacagcctactccacccagtaaggcccatctctgccgggtacgtgcgtttcctggtctttcttgttctttcactcccgacaaagaaaaaagacttttggttcttccttctagacaacaatcatcgtccccatcatcaccgtctgttctccttcttctccttaatagaatcggtttagtcatgacccacgctaccgcctctgagctttctggacacgtcggtcacttgtgcgtacttgccgttgttatattgatggttgcattgatgatccagatggagatcttgacgtccaactttccttcgatgtttgcgtgactgacgttcctgtctcttctatattgtatccaccttttttttgtttttttttttgtttggacactcctttctgtgtgcatgtatctctgtctggttatctgttggaatcgatcgaacgacaaatgtttgtgatgatactgcgaccaacacaataacaacgatcaatcggttaccttgaatccaacaggtctcccgagcaggagactgcccttatccagttccgatcgaacctcatcgctgccggtctttgcccggttgatccgttcgcaccggaagttgtcgccaacggccctgggtataaccgatacgacgacgccaccctcctccggttccttcgggcacgaaagtttgatctcgtcaaggcccaggagatgtggaaggctaacgaagaatggcgaaagagttacggaaccgaccagctctggaagtgagtctggacgagaaagtacaaggaatgatgagagatctttcggatacgtttggacagggattaacttggcttgttgctcatcaggacctttgattaccctaccggagaagagaaggcaaccatcgaaaagtattaccctcagtactgtacgtcagagtctttttcttgctaatgctctgacttgatgccatgcctcctgctgatttctctttcgtttcatcaacttgtgcaactctccctccggtgtaatctcgtctttttctgaaaacaatagaccacaaggtgagccttcactgctcttctcacgacatgagtcaagcgtttagtgatttaacctgacaaaatcctttcgacctctgatagatggacaaggatggccgaccggtgtacgtcgaggtgcttgggcagcttgacatgaacaagctctttgctgcgacgacgcaggagcgaatgattaagtgtttggtatacgagtacgagaagctgttcagagagcgacttcccgcttgccaggctgtcgttggacacaccgtcgagacgtcttgcactatccttgacctgaacaacgtcggattgagcaacttttacaaggtcaagaactatgtcggagaggccagtactatcggacagaattactgtaagcgtcgggattcacttgccatcttaccatggtatcaaagacgggtgagctgattgactctgtatgtgtgtgtgtgtgtg

SEQ ID NO: 1199 - DNA, 1515 bp, Xanthophyllomyces dendrorhous
  misc_feature (1105)..(1114): n is a, c, g, or t
tgtgtgtgtgtgtgtgtgtgtgtgtttggtgcagaccctgagaccatgggcaagttcttcatcgtgagtttctttgtttgttatcgctttcggtgtcgatcgttggatttgaaaagtctgacatttcttggggggatttacttttctgcagatcaactcgccttatctgttctccggtgtctggtcgctcgtcaagccttggttagatgaggtgactgttcgaaagatctcgatccctggtcgggattggaagacccagctgttggctcaggttccggcggagaacttggaggttaagtttggaggaaagagcacggagccagcatcgagcgacgccgggccttggaacacggaatccggcagacaaggtgcgctcttgactcggggattttctttttcttttcgtgttggctttttgtttgttttcttgttttccaggctcagtttgctcatcggttcaccttgttcttttctgttgacagctgtcgccgccgctcacggcccttacagttcaacccactagattatgagacgactgcgttattgtttctcttttctttctgttctcttactcttttgtccctttgtcgtttgaccttgtgttttcttgtctctctccctctctctctctctctcacatgttgtctttcaacctcctctctttcttcttcaccttagcaccccctacgttctttaatgagatcaatcatccaagcattttgtttgtttccctcgttcttttcttttcttttcttttcttttttcttcgttctgttctctggagtgggatcctttgttggatgggaaaagtctaggatacaacccagacagagggagagaaacgattaaaccccaaggggaggaagaaaagaaggagaggaaggaggagaaaaagaagatctattgaaacactctccgtcgatcgggaaaaaagaaagatactgttgtgttctctccttgttcttttctttgtcttcttttctttttctttcgatatctttctcctttttcttgttgttcaacacatacacattcatgatgtccgttcaaaagaagaagaagaggaagaggaaaagatgagaaggaaaaaaaaaaaaagagatgnnnnnnnnnngaaagctggatcgtctcggtttgattaattgttcttttgcatcctttccacaacaaaggggaggagaaggagaaggaggatgacgaggtcacgtcgaggtctttctgtttgtttcgccttcattcttttctgacacgtcgatcctcgtccttctgtatccgaccctctttttttctttttctcttgtccttggtcgtcttctccttcttcagtggtttcaatcattcattcattcattcattcgttcgttcgtgctgtatcctacatcctgcgttctccccaaaagaaaaatcaagcccggatctattccgtcctatcagaccgcactacaaccaagtcaagcgaacgccgtccgagagtaacgagagcagaattccgggaagaaagagatgggggggggg

SEQ ID NO: 1200 - DNA, 1199 bp, Xanthophyllomyces dendrorhous
  misc_feature (1026)..(1035): n is a, c, g, or t
ggggggggggcaagacatagagagagagaaaaaaaagagggaggagacgtttagtgggggatcttgatgtcggccttctcggcgtcggcgatgaactttcggatgctgttggccctttgatcgtggtatcgacgtgtatcgagggggataggaaggagaaagagggacagggacagggaaagaacgaaagaaacgataagcgatcatcatcgggataaagggactgtaggcaggagcggtgattccaaactgtttgaaagaggcagagggaacgaaaggaaacgagacactgacaaatcctcctcctcgctagagatgatgatgatggacggggggaaaggagatcgttggtcagatgtgtcaaagagggatgggtaggggagaagagaagagaagaaaaaaaggacacgggcggtcggtcggtcatcacatacctggatccggcaatgttcttgacggtctctaacacggtgggcttggggacggcgggcttgttggtggcaaggtaggtactatcgggcgtgcagatcgagagattggttcagttggtttgaacgtgtgtgtgttttcaaagaaaggcaacacggggtgagggatggaaagtgatgtatcaagcttacccggctccgatggtaaagtaggtagcaagagcactgtttaggagaggggatgaagagggaggagggggggggaggggaaaaaaggatggatgatgagtgagatgacctcgtttcttgattggttggttttgctttggattatcgtagggatatgactgacatgtattcctatgaatgggcaaggtgtagtgcgttagtagattttcatttggacacgaaagaagaaaaaaaaaaaaaaggttttcgaccgtagatccaaacgacactcacgttcttgatgaacttgcccaagatcgtgcttgattcgtgggtgaaggatgaccgggagagaaagagatacgacgaaaacagataggcagggagagaagagaagagggggagagatagagagagagagagaaaagannnnnnnnnnaagaaaaaaaagaaaggaaaaagagagatgtaaagaggttggtacttttctgggcgtacttgggagatgtgtgtttgcgggaaccagacttactatcctccaggtcctcctcctccggccatgttagctgattgataaaagaaaggggggtgtgggtgtgggtg

SEQ ID NO: 1201 - DNA, 375 bp, Xanthophyllomyces dendrorhous
ccagggagtgtgaccagggatcgtaaccaggaggaatctgaaagaaacgggcgtgggggaagagcgagggatggagagcgtaagggagagagagagagagaagattacgtaattttaaatattcaagtcacgtgtctatcggcccacaatcctttctctctctctctcttgctagatcgaccatcgagaatcgaacgatccgcagcagcgcggggcaaaaggaaggtgtgtgtgctgcgctgtctgttctgttgcctttgtctgtctgcgtagccacgccttgtcgctgtcgctgtctctgcctggtcactttgccttgcccctgcccttccctgggcctcatcctgtgccttccctgtgccttccctgtgcctt

SEQ ID NO: 1202 - DNA, 491 bp, Xanthophyllomyces dendrorhous
ttgctttctcccccttctccctctccatctacatctctacctgtatcaattctctcctctctctctcggaaactaacctcgcccatgccattcaccttctatccagcgagagatgcccggacttatgtacctcagggaaaaggtacagtcttgactttctttgcctccgaatcgtccactcaaagacgccagctcatcttttttttttcttgctttttcttgctttttcttgctttttcttgctttttcttctttgtccttctttgtccttcttcatcccctcccctcccttctacctaccctcaatacccatcgcatacactgcgcttccaaacacagttcggcaagtctcagcctcttaagggagcccgaattgccggatgtctccacatgaccatccagacgtaagtcttcaatctaacgcacacgtttctcgaaacgcaagatttctttcatcccatacttatccctttttttcttccttttttttt

SEQ ID NO: 1203 - DNA, 3559 bp, Xanthophyllomyces dendrorhous
ctcatcgagaccttgactgctatcggtgcccaggtcgcctggtcttcgtgcaacatcttctccacccaggtcggtcaactttcttatctcgcatcttttcacagatcttttcactgacattcattcattcatcccatcctatcttatccttcatctcgcaccttggcctccgtccacaggaccacgccgccgccgccatcgccgctaccggtgtccccgtctttgcctggaagggagagaccgaggaggagtacgagtggtgcatcgagcagtccctcaccgccttccccgacggcaagcccctcaacatgatcctcgacgacggaggagatcttaccaccatggttcacaacaagttcccccagtacctccccgagatccgaggtgtctctgaggagaccaccaccggtgttcaccacctttacaagtctctccgagacggtaagctcaagatccccgccatcaacgtcaacgactctgtcaccaagtccaagttcgacaactacgtgagtctgtcccttttggttctttcctcgttgtcaagacttcttttgagctaaccatgcccatcattttttctttcccccccccctctcaaaaaaaaaagtacggttgccgagagtctctcgtcgatggtatcaagcgagctaccgacatcatgttggccggaaagatcgccgtcgtcgccggtttcggtgacgtcggaaagggttgcgccgagtccctccgatcgtacggagcccgagtcgtcatcaccgagattgatcccatcaacgccctccaggccgccatggccggttacgaagtcaccaccatggaggagatcgcccccaagatgaacatcgtcgtcaccaccaccggttgccgagacatcgtccgagccgagcacatggaggccatgcccgaggatgccatcatctgcaacatcggtcactttgacatcgagatcgacgtcgcatggctcaaggccaacgccgtcgagtgcgtcaacatcaagccccaggtcgaccgatacaccatgaagtccggacgacacctcatgctcctcgccgacggacgactcgtcaacttgggttgcgccaacggtcacccctcgttcgtcatgtccttctcgttcgccaaccaggtcttggcccagatcgccctctggaccaccaacgactacgacgtcggagtccacatcatgcccaaggccctcgacgaggaggtcgcccgagcccatctcgatcacgtcggtgtcaagcttaccaagatgaccaaggtccaggccgagtacctcgatctccccatggacggaccctacaagcccttccactaccgatactaagcgcgccccggtggctttggtatccgtttacctgcattcttttacctcaactgtaacattaccctgtcacacatagattttcacccacaggcttcaaccgccatctttcattaagagaaaaaaagacaacaaatatatatgattttgatccatcaattctttttcttcttctttttttttcccccttttctttctcttttttcttgtttccaaactcgccaagtgaataaggaaactgagtctcgatcaagttggatggacatcggctacaatggacaagttatgaaacagcagtacgatcttctagcaagagcttacttaacaacaacaaaacaaaacaaaacaaaacagcacagcgcgacctcccccctcacggcgatcgatccgttcagagcatggcacataagtgcatcgaccttagctcctttgttcagcctggcattctcagccaagctcgtccttcctcgtttttgtttattccttgtttttttttttttccttctctccttttcagacaccatgagctgacatgctggttcaaaaatatggaatgctgtgcaaccaccgccacacgacgcccttgtcgaatcccaaacctttaccctttacgtttcattagccatcactttgccatcatctcactctgctctcactcgaccaacgctagactctcaagggctcctgcatacacatacatacacacgcgcatctcacccgtaacctcatcccctctctcttccctccgcttaggactcgaacgatcatccaaaaccgctatgaacaacgctccttcggtatacgaaaactcgacaaagaagcatacgatctttgtatcaggtctgccggatggtgtgaacgagcaacagctgctcgacgtgtttgtctctttcggtacgcgtctctgagacctcttttcttatcaggctgtccctttgttgttctcggaggaagaaggaagaggagaaagacatcggatgatcggtcaagctgatagaaacattctgaaccgacccggggttgcttgggttccggacgttccttcacaggtgatatcatcgaagttcaactgcccaaagagccgtccaaggagggtcaacgtgagtatacccatgctctgttctgttctgttctatcagacctggtcctaacagcacggctttcctttcgtccatcttttgctcgccgtcctctccagctaccagacatcgaggtttcgcctttttgacattcacgtccggtcttgacgcagatgacgcagtatgtacacgcactcacgcacgcacacacactctctctctctcgctcacaacgcataccatgactatgagcgaccacgatcccaaagactgaccgtctcttctttcaacgtggggctttctttttttttttcctccttgggcatactactttatcttcggtctcagatcgcaaattatgatcttaattattggccgggaacgaacggcggacgagtcctcaaagtgaacctcgctagaaatacaaagacaagtcaggctccaggagcacgaggtgatcgagccggtacgttctttgcgatttcctatatatacatttctttcttctctttctctctttctcttcacgactcgacgtgtggacgcgctgtattgactgatcgtctggctgtttgaactcgtcgcaacgcctgtctctcttttcgtatctcctctctctcgtttcatgttgtttgttctcttcttcttctttttttcccttcctctctccattggcacagtttggtcctcggaacaatggctgaaggagcacgctctaccgatatcacaatccggtggcttgggtgatgcacgactggaggatgtgtcaaaaccggtagaagaagaagtcgagctggagcagtgatagttttctcttctttccttctctctctcttccttttactacccccacgagtcgatatcgttaagcgtgcatgtgtgccaattacaacaatctacacgtcccttgtccttttcaatgtatagataacatgttccctctctccccctcccccacctcgccgagtagagaacttggttctgtttagaaatgaatgagaggaaaagccgagagaaatgatcgggtcgctaagggggagggcacgtgacctggacgaatcccggttactcctgagggcgatagtaccttgggaccgtttgtccgaccacctcgaaacaccttccccccaaaaaacatctctctctctctctctct

SEQ ID NO: 1204 - DNA, 35838 bp, Xanthophyllomyces dendrorhous
  misc_feature (10292)..(10301): n is a, c, g, or t
cttgtgtatcttcttgagcaggcgaggaaccttcaggacggtaaggcgcgccagagacttgtcttgagacgttttcttcggcttcttgtttcttctatgctctttttttaaaaaaaaattcctccctcccccgggtctcttgttcgccgtcatgagtcgcggtttcttcttccctttttttgtttcgttttgtttttttgtttcgttcttcttttgttctttgtgtgtgtatttcttctttgggagtctatacagtcagacagacatagcgctcaggttggaatcttcaacgctaggcagtcggcaggatagacaacgattcgtcaggggcacagtgtgtgtacggcttcttcttttgtatattaaacgggtcttgattcttagtcttgggcttgatggcgcttgaaaattgatacacagcaggagaggggatggggtcgggaatacttgaaggaggaacaaaagaaaaaggagagtgaatgtcgctgaaacacaaatcaccatcggacggcaagtccagcgttctcggctggcgcgttatcataatccttgggtgcgatcgcgtgagcaggagatcgcgagtaggatcgtcgagctcgagggggaggactatcggaagagacaatcaaatagagattcagaaatgcaaaactacggtgacaatcggaatagaaaacatagacttacgatggagagtaccgcctttctcttcgaggagagtatctatccctggaggatcgtccgtaatcactgttgatcaagagaggatctcaaaggtcagacaggcagaattagcacaggatatatcataaggcaactgactctcggtcatagtcccgatctctatctcggtctcggccaaagtcatcccttcgtcgatcgtcatacctggaagggcgtcggtcgttgtatcgatcgtacgatcctccaccaccaccataagatccacctcggtcgtatcgatcgtgtcgatcgtatcggtctcgtcctccaccacctccgcctccacttcgatacgcccgaggatcatctcgtcgcttggcgcccactacacgagacaaagataagcatgatggacaaagagaaggagttgtcgatggtacatgtagcgttcaaggcggtgaaacagaatggtatgattagcgaatccgtttggtgtcaccttttggaaccatgcgtcatacgaaagcgaggtactgactgtattctcctggtgtagggttatgaggccgagctgtcacagagaaatccactcggatgcgcctgccattaagatcgagaccgttcaagttttggatgcatcgctcagcgtcttcgaccgagcccattttgatgaatccgaatcctcgagatcgatccgtctggaaaggggcggaacgagatcaccaagtgaggccaagatcagtatcggcgctgtttagaagccaagtgagagaagcgacaaaccctttggtcgtagacgatggttacgttgacgaccttgccgaatctggagaactcctcgccaagcgcgtcctcagtggttcgaatagaaagaccgaacacaccaagcgtctcggattttggaggattctgaataagacaacaagaggaacaaaacggggtaagaatgcagagctcgcgcctgtttcatccgagtcagagagagaaaagcacaactgacagtaggcgcgtattccggtcgggagggaggggcagcgctagaggttgtatgacaggttgaacaaacacacacacaagacagaaagagacacaacagaccatcagagcgaagatctctcgacaccgaggcgggaacatagataaacaacgagagcaggtctcacggctcccttcgaacgtattctctctctcttgacctagatctagacctggatctagacctggatctgtctctggttcggtcctgatccctgtcatcatcatagttgattctcggtggctctgatcctcgtggtgggacagagtccgctctggacaagggagccggcggaaggggagagagcctgctggattcgtgactgtctgcgtgagagctcatgttggatatagatcaagatgggctggaacaagatatgtgagatggaacgatgtggaggtttaggtcgaaacgttcagcaaagatggcaagatgatgagcaggcaggatcagaagtgtaaccaacggcctgtaaccggtggcctgtaacggtgtgtgctagccggcagatcagaagatagcgcgcaaacacacgtccacgcccacattcacaagcgtgcctatacacacatgcataaacgccataaaggatgcgctaggtagatgtactaagagactacgattctaatcatatatcgtacggtaccttgtgaataccattggtagagaagggcgagatgactacgacggctgcgatggcttacacctcgtccgaacgactagaccgcgagtagaaagcaaactacaaagcagactacaaaacagaccagccagactagaaacgctcgggcaatgttgagtgatcgcttcgccagacgcgtcaagatggctacgcgttgggcataaccatctgacttttgcgtgccttaaataagtcagaacggtctgtaaccaaactctgcgatccgtaaccataaccctaacagacgcggctggttctgaggcgaactctgacctcgttttttccctgacttggctcttttccagtttgagtaggcaaccaccaaggcatcaacatggtcagtctccacgccctctggtcttttttctttctttccacacagggtagcagagtggtcgacgtcttggagagcatacagtacagtatatgggaattcgtgtatttcacgtatttttatccggcccaacaactggatccctcatttctccgtcacaattatgcccaaacgctccaatatgggtctcaaaaatttcaacaccaaaacacgtctccaatatttcatctttcgatcggccatcgtcgcgaagaagaagaaacaaaaaggagagacagatcgtttttttccatctctgggtagactgagggcaggatttcactgaagagagtgaagaacgctcaaaattggtcggcgggcaggatttcggcggtgaggaaagagaacggagaatggaagataggccaaaacgaagaactctggggaacgaacagtctcgaccaaacagcacacggtcatcctcagtacacgatcatcatttctcttgggcctcacaaccagccctctcgacaaaccacgtcaagtacctcccaccaccgatagcgcctctcgactcgaacccatatactgtgctctagcgatcttgacccctgtgtggaaagcttggctgttaaatgcccacaagatacttactagatcatgttctgctttaccctttcttttttgtcctcgtaatggaatgaattgctacaacagggaatcgacatccagcacaagcacgtcaagaagggtgccaggaccgcccccaagtcggaggatccctaccttctcttgcttgtgaaggtacgcttctttctcttatatttgttcactgaaaccaaatcggagttaacgatttcttgttctcttttcaatccgcccatacttcattgtttatcgctcttctcgatctttgttaaatctctattttcttcactcgtttcaacctccctcagctttaccgcttccttgctcgacgaactgagtccaagttcaacaaggttgtcctcaagcgactctttcactccaagaccaaccgacctcccctttcgatctcgcgaattgtgaagcacactcacaacgccaaccctgagggaaacaagaccatcgtccttgtcggaaccgtcactgatgatgagcgattcctcaccgtccccaagctcaccatcgctgccttgaggttcacccgatccgctcgggagaggatcatcgccgccggaggagagggttagtctttttcttgcccttctcttgtcttgctttctttacacacgctcatttaaaaaacgattctatatctactccacagctcttactcttgatcagctcgctctccgatcccccaccggatccaacactgttcttgttcgaggaaagaggacctcccgagaggcctaccgacacttcggaatgggaccccgttcgttctttcattcttttttttctatcctataacgggcatattcactgatatctcttttttgaacatacccttatagacaagaacaaggccccccacgtcatctccaagggacgaaagttcgagaagggacgaggtcgacgagcttcccgaggattcaaggtttaaatatccctttgtttccctccttgtccggctttcatttccacccccaattcctccccctctttttcttttggtttggaacgtttctttggtcaaagttttcggagaatcggggaaggaagacaaagaagagactcgactggcgctttgttgcgaacggtttctcttgccttttttttctcctttattttccattgttttgccttgcgattccatgcaatcttccgctcctgtcgttcttacccgctgtctagcttgtttggtcgctgcgtactgaaaacccaatgagagagttcatcacataaccatcaagacctacaaaagaaagaaggcaaacaactacttttgtgacaaagatgctgataacgacaggaactagattcaacagaggtgagggcaacagggagcttgtctgtatggttccaaagtttcattcatatcccttgcttttggtgtggatgtgctgtgcgggtgtggacgtgtgcgtgcttcttttgcctacatctcctctctctcacaaaccaagtttcttatctcgatagcggagtctgtctgggatcagagctctttaaaaaagtctatggatgtagtcttatgggtttgtttcggacccgttaactcgattcacgtccgaatatgaacaggattacaaacaccgattacggctggggatgcggatgtagcagatatgaaaggtaagcgatgaacaaaggacaagtggcaagtgatcgagtgataagtatacatgaaatcaccagccctctggaccttctatgttccttcccctccttctctcccatgctcgttcttttccttattcttgcaagggaaagattgagagacagaacgcggaacatgaagtgtaggatatggcgggagaaccagacttcagatctagatctattcttgatcgacgtgcatctttccgttctctggtccttcttcttcttcttcttcctcttcttcacgccccggttctggtactaatcctgtttccacgtgagatccgcttgagagtgcgggtactggcggttgtaacgacgcagaggaattcaagggggtagatgtagatacagatggcgatggaggcgagggggatagaggtccgttcggctgattaccactcaatggttcgggcacagccacaggtgcgctggcatcagcgtcagtggtggtggccgtatcgtcgttgtcatgttttaaattggcatcgacggtggaagcagagacagcagacgctggttcttccaatttagataccgactcttgtccgagttctccacctatcgacccatccgtcaggtccttcgcctttgcctgcgctgtcggagaaagaagtgaagaaagaggatgaggcggagcgtccgactgggacgcatgtgccagaagagagggagaaggagcggggggcaagaagtgggattcgtaagatggcaaagacggatctgtaggagccggaggttcgatcggtacggatagtcgttcgtatataatcctgttatcccgagttgcgacgtttcatttcccacccggattatgtccaaacgcatgcatacgcacagaagaattagaacaaaaaatgaaatagaaatgagccggaaacaaagaaagagatataagagatcggagagaaagaaggagaggaagagagagagagagagagaacgaaggagaacgaacgctcgttcgagtcgagctcgctgaatatctttcttcgccttaagaatcttcaacagcagcttgtcattatcctttgtcgaaaagttcgttggaacaacaagaaagaaagtcaagaaccaaagcatcgtcaggttgtaagttcagatacggatacgaacgaggacggaagtcatcagtcctatctctacgcggacctcgcaacatatccaaggagaagaggaaggaaggagagataccttctcgatctgcttgactttcagctttaagtctttatatttcgctttatattttcttccaaccccgccgagaagagcattgagaagcgttcaagtcagctcttcttcctcaaaagccagaagctagaagccagcagctcgattgaaaagaaagaggaagagagacacactgaatatctccatcccgagacaactgagcaccataagccctcgactttgtttttggtaacggacctctgtgatgtgtgtattccgctcctgtcgtcgttgtcgtcgttgctgctactgctccgactgctgctcccgtaggagtaggagctggagctagaacgcccgtttcctcgacagtagacgtaggaacgccagctgattctgtggatggcatgccaagatgtacagtttgagaagatgccattcctaaatgtacttcttttccaaaatgaacgaggggatgaggacggtggcgggagatgtatgtcgatggtaggttgcgcttttttccctccaggattgacgcgtgatagggaaaacaccgaacgagagagaagacaagttgactttctcgtgtttactcctcatcaccttccttccttccctagccttgggtatcaccgtttcaaatatcctttcaagtcttcatacacttgttctaaataagtgtttcccacgcgcatatattcacaggcatacatatgcaggtacatataaacagacgaaccctcccattccataagattaaagaaagcaaggtaagatagacagacgacaaaatgtcaagataaatccgatgagatttttgtataggcacatatatgaataaagttattctgtttctattcaagaaggaaagaaagaaagaaacgaacgaacgaacatccccagtttagggataaaatgatgagaagctcgcctgacgcgacaagatgagaacaagataggaatgaaaccagaccagataggatataggagacagatatagatacagatggataccaaacaaaggacccatgaggaaaggatcatgaacatgagaatacgaaagtgggaaggtaaaaggatggcatgtcatgaaagaaataagagggcatgtgtacaagaagaaagcaagccaagggagaaacaactctcagagggcttcaccccaagcgacggtactctgtaccgggctggctgttcccagatcaatcatcggcctcttagtcgtttcgggttcggagtctgagtccgaacgcactggtgtagcatccgcgctgggtggaggacccgaccaccacgtcggcgctctcaccatagtcttgctcgttctccagaactctgtctggagggcatctgtggcgatgtgtgcactatgtgtcgcctcgagctcggtctggtctacgttgactcgaaggtaggatccatctaggtggtagaagagaggagcggtggtggctatggggaaggaaggtgtagctggttcagacgacctagcggatgagaccgacgaggcaaacgaggcgaatgactgggtagacagtgttgactgtctgtcccggtgagtaataagtctagatgattggctgggagaaagtagagatgggacgtggtgggacgattgaagcgaggcctcgagaggcgggacgagatgagagaggttgacggtcaagtcgtcgtcttcgtcttgatcattagcatcgtcgatcaagtacgcgagcccgaaaggctcactctcagcatcctctgccggaagtctgactctgagcccttcctgtggggtgacagtcggtgcagaagggactggaggcagcgcagacgaaggcgcagacgaagatggcggcggcggtggcggtcgattgggcttgtgtataaattcggcgacagcagtagatggcttgatgggcagggtgacgtctttcatgaaatttttccacacatgcgctagctccgtctcgttctctttctcgatctctcttaccggtgcagacgggaacgggaaacttgaaatgtcgcctgatcgcgcgggatgagccggacaacaggccgaaggccgcagggtctcttctccttcatccgaatcgttctgaggatcagtgacacggccggttggatgacctaaaggagacggatggggcggctggtacgttccgtgagtggcggacgcgatcgaggccgatctcgtcctcgtagccagtccaccagcgagaaaggtagatgagccatagaaggtggaatccgcaccggagccagtggaatgggagtgtatgctggaggctgtcgtccgattagaagctgtagaatttgctctgcttctgttggctgttgtaggaagggaaggaggcccggcgcgtgctcgagaagaagccgggtggaccgggaaagacaggtgaccaagctgagattgatcgagagatatgcggtgactgttgccatcattttcaccatcgacatcgtccgtatttgtagccatggaaggagggggaaggctatcgatcgaaagatggagagcggccggtactggatacggcctgcaaccgaatgggttgtattctgctacatctgagggaagggaggcgtgaagatttgaccggttgattgtaaaatccgtttgttggacctgaccagaggctggaaggaacgggtggggatgatggaacgaggactgggacttgttggatgggtagaaggacgactgagacccgttgggccgatggaaggaggacgacgacgactgggatgtttccggtcgatcgagccgttctctactctgagcggccgacgaggcagaaggcagatgatacattgacgatgcagctgacgactgaggatatactgacggggtgtttgatggcgcagctgacgagactgggtagatgacatttggctcgagatcccaactgtcttcgtgttggttaccgtggcaggaccatgaggagccagaggaagagtgtgagtctgtcgagacggtcgagggtgtacgagagagatcaaggtttcggccgaagctgtctacatgctgtggcttgttttgtttcttcctgttcccaaacggcaggaccgatcggacggtgtgacctgtgagtttcccggatgggctcgccggttgatctgccttggcggctttggacttgagcttgaaaaagttcatcctatgagaggagaaggagagaaagaaagaaagagccgaagatgtcaacagagggagaaagggaggagaagtagaaggagagaaaaaggaaaacaggaaagaggggaaaagaatcaagtggactgacctggttgatgtgagatgtgattgactgacctggccgtgttgctctatgacgagaaaccgagaaaggaagccagccagaaaggatgggaaaagaagaacgagaaaaaagagagcacagtccgtatatctacgagaaaccaaatgtgaaggagagcgaaatccaagtaggaaggagaacgaagaatagaaacgggtagatgaaagagaaaaggagagaggatgagaagaagaaaacaaacgggagtgaaagatggaaaaaaagggatgccagtcggatgttgagtgggcgcgagtgggcggcgtgctatcacagtgaaaggtgagtgtgattgtgaatgtagagggtagatcaggcacacgcaacaggcacactagggcaaaaacaggaccaaaacaagggcacgctaagaaaatcagagcaccacgcggcacattatatgataccaatcaaggcatatatacataaatcagggcccacatacataaaatatatcaagcgcacgtcaacccaaaacagactaactcaaataaacaccggatcttacagttctagacctccttctccctttcgttctctctgtcctgtcggaaatcacacccgcatgtcgctttccttcttggccctctttgaatttctatagtcgatcgttttttctttttctttttttaatatttcctctctactgtgttcgttagtccatctagtccgttcattgattcaacactcaatctatcggtccatccttatctcttcttttctttccgtcttactcacacacatacaatattcactctaggctcattatcttcaagaggatgtgtcttgtttttgtttctgtttctgttnnnnnnnnnntctttctccctagtttgctttcttgcatcttctcttactcgattcatagacagtaatctatctattgtttacgtgctccttaatatacattttttccctccccgctcacgactgcaagcgcgcaatatcaatcggctccagctcgaccactcgatcctcacccagactggctaactgagctctcacttcggctaactcgtcaatccacgtcacacgctggtcctccagccgtttcaaatattcttcctccgttagcgtcgtcacgcttggcaacgactcggacataaaccgtcggaacgaccaccatggcagcttttcttctttcctctgacccatcgatccggcctgttcgcttacctccggactacctccagacaggttgtcgacagggatcgaggccgtctgtttgaaagcctcctgttgggcgacagttaacgtatccatcaaggcttttcgttgatcacgtctgaccgcatgaatatcaacttcagggataggtccgacagcgtcgtaagcgccgtacatctttgcctggtgaatccttagctcgttcgatacccattgaactaggccggatgtcgcgctcgcaaacgctgtcgttatcgtcaccattcctaccgttggtgccaccactttgaaccctccgtaccccaatatctttccttttattttgttttgtcgcgcaaattcgtaatgatttttcctctatcgaatcagccagagtacatacacacccatatacactcagaacgaagaaagaaagacttacgatacaaagcaggaccgagcgtggcagtaaacccaccggcgagtgcactatccatcactcgtctttgtcggatgtccccccacgtctctggacccagactcgatagctctcctcctatctttgtattcgatcttgcctttccattggcccgttcaatcgctagtttcatctgacgacggtggtccgatgtgagaccggctttgagcaagagtggtgaaaatacgagctctctcattccttttcaagccagtcgcaaagcgcgtgcgtgagtgtacataggcttaattaaaagggaaaacatcagttaagaggacaagaaagagagaagaacgtaccgaaaaagacacaccccatacaggcactgttgaatgcggtcgtcagcgcaaacgtacccactcctgtatcccccatcacacctaacactgtaccgactactcctcctccagccgctaatcatgtgtgtattcggaagagagaaagagagaagaatagagaaaagatagaaatatgacgcgtgagaaaagatctctgagtataactcctctacaccatcgcctaaaatgatacagaagaatacgcacaccatagaccgattccccgaccggacaccttccacgcgtcagcacctatcggccattccggttgcttctccttactcaacctctcggctctttccaagtgagagaagtctggtgtagctgagcatcttaatagtatcggtgatgagttcgacatgggtttctagtcgtacactctctatatgtatatatgtgtgtgtgtgttgtacaaatggagagtgtttgaacctaacgggcgagaatgggagaagaaagcacaccgaacaatgcagttagggttggatgagatggtcgtcagggtgactaacctataaatatcatccgcagtctagccccttttttggttccttatgcctgggccctcccgagtgcgcactctgcccttgctgcggatggactagctgaccgtcttcaccatttcttttgacagccagcgacagaaatcaattccagcatacactcacatccgacaccgaccgctcaccttcttgccttgccttcattcttgcctggagcaagagaacagtaaagggtctagttttcaaatccagtgtacacatatacacaatctctcgaaaccagtctttctttttgtttgatttagaatccgtatcggagagatctcattccttaccttaaatcctcccaccactaagtttgtgaaagaaggagacctctataatgtctgccacaggcatcttgcaagtcctttctctctctctatctctcactctcttggtcagagagaaaagcaatctggaactgacttctggtctctatctctctgtctgaaccctatcgattggaaacctgatattcagaacgtccgctctgtacgtcattcttttcttccctttgtcctcgtctttatgaattcctcagccgtagctcacgcgagttcggatggacgagctgatcatgtgtgtatctgcgcgcttaccatttctcgcttccctctctctttcttctatccccctttctctacagggtgagctctgggaataaatacacacaaggtaagtttttgttaccgatatatatcttatccgatcagattaggtgctgacccgtccccatcaatagtctcggtcaaagcggtcatctcccagatcgccctgatgagcggaatttctctggcgacacttgttgcgttctcattcttcagaccgagagagagaaaggtgtacgctcctaaagtaaagtaccgttcgacggacgaggacgagttgccgccgcctgctgtaagtcctgcagacggttctgacttttggtgtatagagttctagatagagatcattcgtgctcatagatcgcctcgttgccctctcccgatggtagctcgattctgggtttttctcttggctcaagccgctcatcaccaaggacgatctagatttagtggacactatcggtgagcgcccctccgctctttacactgaccagccacctggtttctgcccgttcttttaaagcaactcactccccctcgtttcacttgcttgaactcgatcaaacacaaaaaggagtcgacgcggtcgcatttctgcagttcctctcgttgctccgttggttctttctcagcgtgtctatcttggtctgcgccgttttgttgcctatcaactgtacgtccttcatcctcttcttcttcccactccctactcctcacgcctcccgagtctctttctttatcttcaagatgacccattccgtctctgcaacctttcgtttctatctatatacaccgtctgttcttgtacagatatgtactcgccaagtaacctggccactatcagccgattgaccatcagcggcctagggtcagtccacacctctaccccgcatagttattctcccagtatcgcatctaatccttgatcgatcgggccggaaaactttctttttaaatagcacgcaaacggacaatccaagatataactcttacatcctcttcgttcatgtcggcgcgacatatctgattagtgagtgctcaaaatggtatgcgcgccgggcaatatataccaatgctcacacgtcgccttcctcccttccgatatttgatagctttcttgatgctcttcttttgctggttctactggaaaaagatgatgagcgtccgacaggcttggttcatgagtaagaaattccaaaggagtatccaatctcgaagtctgatgatcgtcaatatcaagaaagagtaccaatcagatgaaggtctaaaggcgctcataatgcagcttagagggggaaacgagaagcttgcttcaaacattcagtctgctatgatcggtcggaatctcaaggtttgcggttttgttttgctttgttcgtttgtgtagtgatcggatgagatactcatcagagtttttgactggctaatcaggagtacccagaaatgatcgtacgtcatcttgagcgttactttccctccttctaaaatctacgcctctccaagctaactgtttcaatcgtaccctattctttctctgtaggaggactacaacgatactgtccgagatttcgaagaggttcttgtcaagtacctaaaaggtggccaagaaggtaaacgaagacctaccatcaaacgaggtggtttcttaggtatcggcgctgaaaaagtggttcgtctcttgacttctgtttttactcacctcggcactgggtctcgcgtggtctgacgtcttgatcttcattccggaattataggatgccattgagttctatgggtacgccatgatttactctttttttcttcgctgatgactgcttcatctcgctctacatcgagctaagtcttcgtgtccaccccatcccatcccatctacgacagaaacaaactcggtcgacttcgagaagttcttgacgcaaagagagaagacattgagattctcaagccaaagtacaagaagaacaaaaaaccgggaacccatcctcatcagaaccaggacggttcaaatttgacacagaaggagattgcaaagagggcgagaaacataaagattccggcggagaactacgggtttgtcagcatgatggatgccgctcaaggtgccttccttctttggtgtggaccttttgaccgctcaatacacttgactgaacggatgcccggttctcttcttccttttggcggaatcagctcatgcaattgcaaagggccatcaaggctctcagagatcgcttcgtggcgcggagctgactcttgcgcccgctcctggagatatccgtccgtgcagttctttccatccttgtatttcatccgggtagaacgataagctgagatcgtttctgaaacgtctcttccttgtttttctttgtcgaggttagtctggcacaatgcgaatgttacaccgggggaaagattcaactcaaaaattgtcggatttgccttgttatcgctcggtgtgtatcttttctttctcttttcatttgcttgttgaaagaccaatcgcatcgatcaattatcttacttgttctcggttcgcctccctttaaatccccaaagtctgctttttcaatactgtcccgcttgctattgtggccgccgctgccaacttggttactgtgcgtgtgattttcaagtcgtctctcatctatccctgctcatgtctctcaatttcatggttccatttttctccattttctctcctggtttcgcgcagctcgcagcctatgtgccctttttgaacaaatggcaacaggcaggcacgttgggtgactggacattctccatcgtggcaggagtgttacctcccacgatctcggccggttttcagttgctcttgccttactttatccgaaaattgacaaagtaccaaggagccgttagttttacctttttttcttcttctttgttcttctcttcggttcgcaatagaaaagggattttttggcatgaatcataagctgacgatttcctgcttgttgactcaattttccatatgaacctagacgtctcgatcacaagtcgaccggattgtcctcactcgatactatgcattccttgtcatttcccagttcttcgtcttctccctcttgaccgtgtttgtcaaccttggaatcggaatcgccaaagaggtcgaggagaagaaaagctttaaagatatctgggatagttacatctccagtgagctttctctctctatacgtcacttttctgtccatctctcgaatccttcttggagttgtttcgttaaatatttctcgatatcttccatgcgcgtatagttttgccctctgagatccagtccacctatgttcttcagagcacatattggttgacgttcttcccgtgagtccatcctttctttacttacgaatacgatcttctccgttttcctggtatctgacgttttatgcactctttatccgttccagccttcgaggcttcttggtcttctttgagttggctcagttgatcaagttggcccttctctcgataaagaccttgcaagtccccctctacctatctgtcatttttgttttcttcttcaaaagggagtctctgtctttgctaatctagacactctcggggcgattgggttgcgcttgtagcttgtttgctaggactccaagagatatccaagaatggacccgaccaccttatttccagtactcgatcgtgtacgcaaacttgttgtttctctgtaccgtcggtttggtatatgctcgtaagtccaggcgtagttgttgatcgtctctgccctgcagggaagtaattgactcaagctggagttgtctctgtcggctcattgtcaccgcgtagccctggcgccgttggtggtggcttctgcagtgagtttctatggtcttgtctcgttgtttctcatgttctcgttgttctaaccctcgagtctgttatcttacatgaaaattagaccatcgtgttttggctcagtcattacatctacaagtatcaactactctatgtgtactcttcgagaacagagagcggaggacggatgtggaacgtggctatcaacaggttgttggttgctttgatgttcatgcaggctttaataatcctgagtcggtgtcctctttctatttcccgttctcaaggtcgtccgtgtagactaaaccagggcgagttatatctggtttcttgacaaaaatatatagctatcagcctccagacgaaatcgtgggatgcgtttgcagcagctccccctttcatcatcaccgtcctgttcaaggtatttgttctccgaccttatggaaaccaattccattactttgttcccactttggaggcctcacacgggcttttagaagaggccagacattcctataaacaacgggtacgcgcatagattttcggcaggttctttttcgagacacgttggttctgattgctctggtggacgtccttctccttctccttcttggtgttggtttcttgcagtttattcatccggctttgaaggatgatgtcttgttcaccgtcacggttcacaaggagcagcaggttcgtgatgagccttctcttttcatcttttatttgttcccctcatcgacactcatacgtttgattggatatcatttgtttcacaggatcttgtccaacagattctcgcgccttactcttccaagcttcagagagaggtggcaggtgtcagagaggcatgtctcttcatttatgattatcttcttatctaaccttgggcttgatctgacttgaccttttcattcgtacaattagaccgatcttactgagtacaacgccacgctcgatacggagaaacaagtcgagctcgatgaaggtggacatacagctgaacacgacggaaactctactttccgaaactccttcgttggtagacctaacggactggaaagatctctcacagaggacagtgcctttggtggaaccggctatagccagtttgcgaccaacgatggatcgacggtcgagctcattcattcggctgcccctatggcggatgccgggggttggtacggccgacatcaatctcttcccgtatgtcctcttctgaatcgtgccttcaagtcatagacatggagtctcattgctaacccggtccttttcttctttatcgcggggcggcctaaaagaacgacgaaccggactatgaaaatccttacagccatccatctgcccgtcaccaaccaacaggatcgacactcgccacacttccactcctcgatcggtctgatcatacacccgctttagaatcccctcaagaggagtatcaaatggcagagttcaactttcactcccatcccgactccaacaactacagaggtgatcatactccacccccagtcaggagtccgagcgggtatgggtttgtacctacggacaatcaggatgaggatgacgtaggcgagagttatcacccacctggctatgagatcaactaccggtaaaccgggcgttggatcttaagcacattttcttcttcttctttctttctttctcgtaaaacttatgccccctctattcatattgtcatcactttttctccacctctgtcgtttttctgtgtctctcgttatcagtctgagctctttgttagagtcccacggtcattatttatctatccatcttctgtttttatttgctcttcctcttcacgttcgttttcgatcttgttttcaatttctgcttgaacagtatttcgttcttccctctgatcttctctcgctcatctatcttttcatttctcgttccttcttctccttctccatggcattctcaccgctatatgatttcattccgatccatctcactcttttaatgtccaattgaaaaatgaacaaccatttctttctgcgtatacgatgaatctttctcttctttctttcatttcagcttggcacaaaccaagccttcttctcaaaatcgagatatagatcataagaaagatagggatgtgaaccggaagacaagagttgtaaaaaaaaagccaatgtaggaaagaagaagtaggaaacgatgaaaagagggatggatccatatgtaaaggaaaagggaaagagaaagaagaggaaaagagagttctactggtctaggtcagagtttagaagaaccaagggggagagggaatacccgaaatcttggtcaacactcatgctggaagaaatcgaagaggaagcgacctaaaggaaaagatggacactcactgggttttattcagtcttttgcacctcctgctcctcctccgtctcctcatccgaaccaccgacgatcaactccttcactccatcgaccaacttctcgacctggtctatcgggttacccgaattttcatcgacatccccgttctctacctgaacactatcctctcctagctctggtgcatccaccatctcttcgtcaccatcttcgtcttcgtcgtcatgaccgtggctgtgtccgtcaattccatttccgtgactgatggtaccttcagcggcatttgattctaaccgtaaggcctctgaccaatcctcttcaaacagatcggcagactcggcaggatctgcaatcgtctttgcgaccttgcccttaccagtactcgccaaatgagccttccacttgctgaccacctcggatgcctgactaggtgcgtacgtcctggcaaggaaggcagcttccggaactcgatcggtcttcaccagcaaatcgatacacggcttgacgtctcctagttggaggaaagcggtaaaggcgatgttgtgaaggcccttgtcaagagcggctttagccaaccattcgatcccagctcggtcacccaacgaggtgtaaatcaagaggagcgccggcaaatctaacgcgttcttgaagcactcctctgccagatcgattcgccaagcagccaacgctttgtcaccgacagttttccatttcgactgggaaccttgctcggggctcgctcgtgtgagttcaagtgcggcgtcaaggtcgtccagctgaatggcgagctcgaacttgtgatccggatcgttagacacctccatagcgagttctcggagttctaccaaaaggcgaatgaaacggtagtgatcacaagacccagaaaatgcctgtcagtcaatcagagaaaacaataagttctttattggagcagaggtaatcaacacccaccttgagtctccaggaatcgtgccacccggttaagctggtcagcagggacagaaggcaagatgctggctgcggtctccatatctcctcggaggatagccgactggtagtcaatgaccgtgacagaaagattgtaactaaagacattgacatccttgtccgcaaggtagacacggttctgagagggcaaatatccgagcaagtacataggactacaacaccacgtcgagatgataactatttagttttatctctacgaagaggaacgggagagagaaaagcggaacgagaaacgtacgtatcgaaatggttgatagcatgagattggtcgcccaccaagtagctgagcttattgttggaagtggtgtagatgaaacagtctccaacccatttggaagtagaaacactgttttcgaaacaattaaaaaggcgagatccaggatcagccttgtctctcaattatcttctacttttctggccgcacgaacatatccgcgagaacgtacttttcagaaacttcggccacaagctcaaacgcttcctcgacaccctcatccgaaatcggctgttcagactccaaagccgagttgtaggcgtcccggtcgaacttaaggaggtagaacgagtcctctccagtgatggcgaccaacgaaccgttcgacgaccaagagatctgttgattagaggtagaagaggcgcgagtttcagtaaaagtgcgcatcactagagtagaactacaagtacttacgctggtagcatcaacttcgatccgacggacgatcgctccagtctcccaatcccagaaaatcacaaatccgtttcctctagctcccagaagaactccaccgtgaagtccctcgactgcccagccgcttccggacttgaccaacccggtgcgctccttgaaatttttgtatactcggacccgggactttccctcgagtacggcgtatgtgtttgagtcaagagcccaagcaaacgaggttcccgtaccaaacgccttgtttcgccaggcgagcgaggtgtagacaatatactctccatctccgcacacagttacgaacctattctcagtacacaatgcgaagtcttgagtaactgggcgacggaaactcattcaggccagacagaagatcaacacataccggccgttgggactgtgctgcagacttgtcggataaacttcagtgtttccgagctctttcatcgatagcggcaacttctgtccatcctcagggttttcaatcgtttgtaaggatgccgttaagacttcagtgttgcgagcgtagacaatctttcctgaggtatccatcgagatggaaggctcctcgcgtccaagctattcaatgaacatacattggaacatcaaagggatacgtttagtctaccatttagctctatagacaaaagagaaatgcgcgagatagtcataccttgataacgacagctccctcgtcgtatccgaatgcgacctcgttcccgaccttcttgtaagcggtacaccacgccctctcgagtccatagctcagcgtgttttccagacggtacgtagatgaattccaaagcttgatcgttccatcctcggatccagagataattatcgggagcgaagggtggaagatggcaaatgaaacgttggcagaatgcgactcgagtgtttgaatgcaagattttgagtggtagtcccagattttgatgagtctgattgattgagaaaaaccaggacgagggaatcagtgttcagattatcttgagtgacgaaacaaaagggaagggtaccaaccgatcgtcaccacaagtaatcagatagggcttgtctcctccatggtagtactcaacgtaattcactcccttctcgtgcgcctcaagcgagaaattcgctgtcgggttaccgagagaccaaaccttgacggtgtgatccaaacaagcagaggcgaaagtattagaatccttagggttgacggcaagagccatgatgtagtgggtgtggccttcaaaaacctatgaagatggaaggcaagaagaaaagaaaggacatgagtatcgagaagattcagctctcactgtgtcatgacccggatggcagcatgaagcaacactgacttggacacatttccatcccttctcccagtcccaacacttgatagtcatatcatcacttccagttagaactaagctgagcgttgggtgaacgacaaggcatcggatgtagtccggatgggcctcgaatgccgcgatcttctcatacgtgttgtagttgaagattcgaagttggaaatcgtccgatcctatatttcatcaacgaatttgaacatatgcatttcgttcggtcagttgacttgtaatgctactctagacgagacttagcctgcggcttgaccagcccgacagacagaggcttcaccatctctgtagatggaaaacatgatgtagatatgaaacgtaccggcaacgaaccagttcttcctggcaatgtacctgacacatcgaacagggacgtcggtaacctcgaatgttttaactaatgcaccggtcacgtagttccagatgttgaccgatccgttgtagagtccactgtaggccaaagacaaagtgacccgagagaaatgtaatgtcaacaactcatacgcggatggcactggaagccagatgtttcggatagttcacaacagtttggaccgccattgagaagacagctagtcacttcttctcaacgggtacgccgagacatgctaatggattttctgggcttgaacgaaagaggaaaggtccaagagaaactcacgcgatgacatgaggctccgtcggatgaaagtctactgatttcactcggtccgaacgggcataatgaatccgctatatacagcatgcgaaagatgaaaagttcggatttaatacacccagacagacaggtataagagcagaagattagatatgagcccaagacgaaggacaaacaaccaaggtggaacaaggtttgtgattatatgactttagacgaagcacagacttacgttaacatctaacaacatgggctaatcaacaccaaaagaacgagatagcgttagttgacaaactttgccataccagagacccagacttgaagcttaccatgcttttgtagacagaattcgaaagagagagaagagaaagagaaagaaaaagcgaggataggtgaggtgagagcagagcgaaacaacgagatggaacatggaaggcgtaaaacccgacggtgggagatcttggttacggcgcgtgatgttggctacgcgaaaatgtaaccaaaggcgcttggccaactagaaatttctctaatatatttcactctgttttctagttaagaacaatagtttttcattatttgaaatccatccaatccgctccggaggaaaaggagggactccatctctgataccttctcaatccatcccatcccatccatctatctgttgctgtttctttctctccattaaaccgagaaagctcactaaacagtacgtacacatgcattcatcgtgtaacataggagcaacatgctcagatcacccacttgctccggtttcaacacctgttcatccttacccaaatagtgtcgggctcttccgctacccccatcaagtaccgacagtacgtctttgttttcttgccttttcctttcatgcctcggccgtcagttatgacccaaccctaggctggccgtagctgatatgtatcgcctgattacgttcttccgacatgcttagggatatgcccccgcctgaagggttcgggtccatcaaatacaaacgatctctaccttacaagggccccagtggaatcgccatcttcggaggcctcggcctgctcatgggtgttggatggtaccgactcatcggtggattgagggagcgcaagtcagtgttctctcttggcctttctttccttgtttcctcttcatgtgtctatcgctgcctatcgatcggtattgaagatagaaatagcatgttgatcgtgtctttgtatctcctcttcatcgcctcattctatcttgaccacctcgatccgaacgtgaattccatattgcctgtgtattactacgaatgacgtccgacagagagctgcatcgagaaaacatgcagtctagaatcaacttgcttcccttccttttagccgagatggatcgagacatgtatcgacgacagcaagcctctctggcgagagagagaattatcatgaaggacgtcaaaggatgggaggtcagtctcatttcttttccttcataaccaccttctatccctattgttctgatccattttcttgtttgtctggttttggcctgttctgtctacttcgataggtgggtaagtcgccgtaccacaccacccgatacgttcctcccaaggttttgatctaaaaggatcaaggcaaagtgtaaacgtcggacaacccgatctgtacttgaattgtatcacccttctatcttgttttagttctagttctctttagttgttgccatttcctctcttgcctccttatatcagtcttcgaccattttgttctataaacaaaagggtgaattggtatcgatagatccatttatggaccgagctgatgtatgcaaagcgagaaaaagaaaaaaaaaagaactgagagcagatgagaacaagctacgacacgaataagcgtcatttgaacagaagaaagtaatcgtaaagcagggctaagcttggcctatcaaggaccgcttaacgcatccagtgagagagaaaggagaagaaacgacacaagggaatggagaagggaacaaaacacgccgtctaattggaaagaagatcttgaagctccctctgcattcgctgcatctcagcctctgcttcgtcgtcttctttctcggctgccaccttgttggtctgtttgacgcagaggtgcaattgaatatgcaattatgagacagcaagaagcaatcagtcaatctcatcgcttgaaaacccatattgggactctcatctccgaatgaaaaaggcataccggtagacctgtgccgacctgcttcccagcaagcgtatccaatccggtcagatcgtacaacaccttgtcgacttcagcatctgcctcttcatccagctcttcttggtcctcatccaaagactccagcgtatcgtccatcatttcttccatgatacccgcctggtcacatgtattatgtatccaaccattcacaaagaaatgcaaagacataaggtcaatcagatgttcgtgatgatttcaagcaagaacagagtagtggcggaacgaaacagaaaaacgaaccttggtcatctccatactcatctggcgcattgctgcactgagctccggcagtttcaccaactgattcgtgagcttcataatctctgtcgacttctggagcgagccagtgactttcagcatcgctgcatgcacacacatatggccagatcgaggataatccaatttcaatcatcagctttactcgggatagttagtatatgtttccttccagatcttaatgcatatatacggaccagattgatgagtcaactgcatcccaacactttttagcctcgccttggatgtatgtagtctatcgacctgcttattgctacggacgacttccctggcgagaacccgagcattctttaggtctcccttggtagccaatcgtttgacatcggcccgcactttctgctggccaactgttagctagagatcccgaatccaatgttgaattcgcagccatatcatccgattgaaccgtgagcccatcagggttagaagaaagacgacatgataagatcagctctaaacatctacccatgcatggaaggtgtaacgatgaaaaacccacctctctaatctctttatcaagctgtctttgctctctcgcaacctttcgctgccactcttggagttgctcagcagggggtttaccgtataggaagtcgcgaaccgatttcctgtatattgaaacacgggatataggaacagtagaaacacgatcagccaaattcagaccacatcctgatacggttgtctctctttctctcaagagaaaaagaagaaagagctcagatgaagctcacatttgtcatggaaggcttgccaacagtgattaacgtagatgcacagtatcgaccagaggtacgagtggatggaagggatggaaagtgatagctgaatctcagtggaaggctgatgggggttgctcgaaagctcggtcaactgcgctcacgtgaattgaaccggacggaaccagaccggttccctcgccggttcgacggtcgacgcgcacgcatccgcccggcgcttcacgaactcaacgttcacactcatcgaacaatacctagacacccactcatccacccaccatcgacacctcgctaacatcgtctgtgtatactggtagacagacaaaaaactgcctgcatcagaaagatgacttccaagccttctctttcctcaaccactccggcgatcggatcccaggcaatttactatcctcccccaccatcaaaccttccggtgaccccttccacatgcttagatatctctctcttcaaacgtgagtccatctacaatctagtctgatagtatagtgaattagaaatcgaacagatgattgcattttggtctttattttcgactgggggttttctcagaggttataaaggagtggaggaaagcagacgattcgatcatcagtaggtctcgtgcgcgtttaaatcaggcaagggtgatgtataacacctactgacttcgcttcatgttgcacctttatgtttaccagtcagactaaaccgatcatcagcccgatccagggatgagtcaagatcctcctcctcatcttcgggtttatctagcgatgctggatgcgctgctgcttttgcagacatggtctgtaagtgtgccggtgtacgacaagtcgattcgctatacgctgatcgatcgttcgatcgcttgaacctttgtatataaggaccatgcggtactgaccaaactcatttaatttccttatagccacctggtccaaccgagccactatcttagactactgtacttcagtagtcgacaagttggcttcatctccggcctctgctacaacgacaattcctatctctcctccttcaggtagctctccagtctttatctcagaaggacatccagcagatgcaagtagctggagatgggccgaagcgggtgttgggcgaagtcctggaaccagggatgttggaaggtcggatggggaagttctggttagttcattcttgcgccctttgtgtagggaacatattgtctatttctaatgctgttgttcttcattctgttcggatatcttaaaaaacaataattgtcatggcggcagcaacgacgatatgcgaccgagaggtctgttgaggctatcgtccgagaacgatctctgaatggtaagtgtttacttctatctaaacttgcttcttacagacttcagattatgactgggaaaatggacccttggattcttctctaaatagcttttaaatctcgctgtccattctttgagccaccggcgagcgagctgaggaaggtgtacggttaatgatgtccttgcagtgtcttcatacaatctagttattgttctggccaaggttcgatgctttgatgaataaatagcaacatcgaaatgaatagatctcggctgtgaatgttttagaattaaaacttcgacgttcagatgatatcttgatggttgctgtgttgagatgtgccatgtgccatatgccgaacgcgtcataccgggtatccgacggcggccaaggctgtacacggccttggcaggcggtgcccgtgagttaaagaaaagccgtcgttcaccatcttagtcgtttgagcaaaccatcattccacccgactcactcttgtccatctattctcgtggatctatcatgtcatacaactacaataataaccagcagcaatcacagtatcccccctatcaaggtgctcctcctcagccttatgggcaacctcccaacgcgtacggacaacctcctaacgcgtatggacaatctggctttaacaaccaatccacctacgatcagaaaccatcttataatcaaccgcccccacccggtgctccagtgaactaccctactcctcagcagaatcagtacaaccaatatggatctggtggagggtacaacaaccctcctccgcaacacagctacgggggattcaattcggctccgcctcaaccgtatggcgctcctccccctcagggccaaccgctctataatgctcctccccctggacctcctatgcaaaactataccgctcagcccgcttatggaggcgtacctagtgccggaagcgcaagctttttttaccttggaacacccatccttccggtcgaaggcacaacattaggcagtatccctcctcctcctggaaattacaatgcccagtttgacgccgagcgaatcagaaaggctaccaaagggtttggtacggacgagtctgcattagttgacacgatggctccgctcggaggccttgagatgggtgcactctctagagctttcgaggcgagcgtgggccgatcgctcgtcaagacattagaaaaggagacgagaagttggttcttgtacggtttgagaggtctcgctctggggcctttggagtttgactgctggcttctggacagggcatgctcaggaataggaacccatgaagagtgcgtgagatgtttaatccaggtttgcttctatcgttcaatttaaagacgcgtttctaacgcaatgccttccctccctaaactgtttaggctgctgagtgagatcctactcggaaggtcaaacaacgagatctatcttctcaagtcggcgtacaaggcaatctacaacaaggatcttgtcgccgttgtcaagggagaattaagtatgaagaccgagagaatgttcatgtacgtatcatccatcgtgttcaatcctgatctatctggctgatatagcgcctttctgaatcacgaactacaaatcacagcatggctctaatggtatgacccatcagcaacgaacacttacaagccattctgtcacgataactaatcgatatgtcatcatgaaatcttatattagggcaatcgagacgagactggcttcgtcaatcaagcaggtatccagcaggatgttgagactttctacagagccggagaaggaaagtggggaaccgatgaggtaagccattcttatgtaattagaacttcgtctgtttcttgaacactcaatatctttgttatacgcccctttcgatagattgccattctatctatccttgtgaaccgttcgaacgcccacctggctgctatgtctcaagcatactttcaacgaaactcccggcctctttccgctgctgtctctagagagttctctgggcatatgaaagatggtctattgtttattaccagaggagctgagcaggacggagacggtgtcgctcgagacgcggagatgttggaggaagcaatgcgtggtatgggcactaaagacgaaagagtcagtgttgcgtctgttctttcacctcctggagagatggttgtaacgttgctaatctctcctgcgctgtgctgttaacagctgatttaccgaatcgtccgactacactggaaccgtcagcgatttgagaacgtcaagcgggcctacgaggccaagtacggaaagtcgctaagaaaccgggttcaaggcgagacgagtggtgactgcagagttcgtctttctacccaactctctcttctttgatcatgcacactcttctaaacacggaaagctaacttccaccttatcgatgctacttggtcgtgtttctttagaaactgatgctcgcaataatccaataatcgaactcctattactttttctttcttttctccatgctcattgcgtttatacttccttaccatcttcatatttctcttgttgagtacttgcagtagcatctccttaatcaacaacactcggcccaagcttacatttctttctcctgatatatgctgctctcaagccatgtcgaacgttgttcttattcttgtatgtctgtgactagtgcaaggctgacatgaatgcttacataagccatcgagatatatcgccactcctaaacgtttccgttattgttctgtccatcacacacacacacctacacacacccaaacacatatacctagactcgctttctttatagaacgacttagaagagtcagcgttagatcatatatggccaaaaattcaagatcatcgagaggcgcagatactccagggtcaggaccaggttccagaggaggccgaggaggtagaggaggtcggggcggagggggggatggtttgggctcaagaggtggaggtagaggtcgaggtcgaggtggtggagcgtacactaatatgactacagttggtttggactatgaaactctcgatagccgaccaggtacgtttctgatggtcttttgttcaggttgacaaaaccccaatgtacgattgtttcttgatgtacccgtcagcttatctagcgttcaaccggtgctcctgtccttctctgtcaattagctccgacagaaatgccgcctacatttatcccccaacatgtcggaccatcatcaaacttttcgccatctacacctcaccgaggtgctttccgaggtcgtgttggtggcgatgataggaatggcttcagaggcggctcacgaggaggctccaggggcggcttccgaggaggccgaggaggatcggtccctatgcctttcttcatcaacggatcccgagggaggagtaagggaggtaatacaccgactgctagttataggcgatctcaagaggaggaagacgaagcgtactattctagtcagcgaaacgggtctggatctgcctctgggacggccactcctcattatggaatcggagccggaaaaggaagcaagtccagtagaggcggattcaccggatatggaagttcacataatccgcttttgaagcctgtagtgttcgtcaaggctggcactctgttccaagaaggaaaagtggacgtgctcgtacaggacgaggtccaaggtcaaggtcagtgtctctctagacttcttatctgtatttctgtgacaagtcgagctctgatcctctaaccaaatgaattaaaactcattcagacgagccttcgacacatatagagacgttcgcgctgaacgatgccgctgtccctcaaatgatcgattctcgacataaagtcgaagtacaaattcttcctaatgcctcagttgctcaggatgtttccgcacccacctttgttcttccgtctgcagagcctactactaagaccttatcttttccttctgaggcatctccctcgtccatcgtatccaaccctgccatgtccatcttgagccaggtggaacgcgccctttgctcgatggtggtaggtgattctgataatcctcaactttcagatagtgcctctcaccagccttcgatatcccctgcttctcatacacatcaagttgattttgatagcgaatctgatgctgagctagttgaggatagtctagaggtggaggtgaacgaggtagatgaggaagatgaagtggaggaagaacagaaggaggaggaagatgatcctacgtctcctggcttctacgtagacaccactccttatgcttccgccacgaccgaccaggatgaaccgtccaatgaaccactcggtatctacgttgattctaaaccgtcagtttccatgccttctagtacggagggcgaagatcttgggttcttcatcgactctgctccttctaccgaggttcggactgaggaatccgcttcgattcgaactggtttgcctcttgtgcaattcgcagcattaggttcctctagctcgtccaaccccaaagctgatcgatctagctgggctcctacagtacctaaatcccttcgaggaaacgtgcgaatcattgatgaatcaacttcatttgcctcccctaaacccgcctctcctctcactttcaacatgttctctccatcgttcactgcagtttcctcaccctcaggaaattctaagtttgacaagcgtcagcctaagactcggcgagggaagaaagctcagaaggcgtctagaaggaataggaggaaccgccgttccgatgaatacgaacctcctattcctagagagggtgactctgatatcgagtggggatcggatggtcctcctcccccaaagcctggtaaaccatggggtgtcagaggaggaagcgccaaggctgctcttgaggcagagatcttggcagattacatctccaataccgtgggcagcgatggagaacaggacgaagaggctatgcatcagttcctcaaggggacaggcccaatggaacaggtttccgttggggatattgctctagagaagttgatgagggatgaggatgtggaagaagaaacaggcggagcgcaggggtcttctgtcatgggaagtgagagcgaggatgaaagcgagaattctgaaggaggaagcggttgggcgaccgacgaccaagatcctgaagattcagttggggacgaagaagaggaagacagagagctgaatgctatggaggaggaaatgatggcagaagacgattccgatttgttctccgaagacgaggaggatgagaacgattcggatatcatcgatgatgtcgatcttgaatcgttggatgacgagcaagaatcggatcaagagttcttggatgctcttctaaatgagagctccgaagactcggattcagattcggacgatgaggatctcgctgctgcaattcttcgatcccaagcagcccgatcgaagtcgctgcctcctaaaatagaacctgagaagccaaacttcactgtcaacgcgaagggtaaagatgatgataaagagaaggaaaagactacaatgatcgaatctggatctgaagatagtgacgggacgcatgggaaggcgatgttccaaggcaacttttcgtgggtcgaccaggatgaacaatttatccaagtgagtttgtttcttttgatttcgtgcactggttgcctagatcgaactatcattgatgttgaactcacttgcattcgtatcgacaggatttattggacgataaccttgaaatcatgaagggatccaaccgtaaggctcggaagcagctcttcaaagctatacagaacggaaacttcgatgaattggacgactttgatgataacccggtcataggtaagtctatactttcatcaaagctatatccatcataagctggtccactcattttcttatggtatattgtccacgggggattctgtctcaaagctatgcctgtcaccagaaagaacaagcacgttcctgcaaatcttcaggcgcaatgggacaaagatagaaagaagaaggccgatgccaagctcgctcgtgcagaggctcgtttggctcaacaattggatccctactcttcctcttctaagaagtcgcgcaacaagaacaagaagaataagggcaaacaggtctcttactcggctgatggcttcgactcggacgccgactcattctcggttgacacgccctcgagaggtggaaagaacaatcgatcgggcatcaccaatctaatctctctcgaccaagagattcaaaggttcttgaacgatcttggaaagacgactatgagcttaccgccaatggagaaagctagtcgagcccgagttcatcaattggccgagtgctattctcttaagagctcaagtaaaggcaacggtcgaggaagattcacgtaagtcctcatcacgataatttcacctaccttgatacaatgtatttcagtttttgactgattcgtttctttctgattttcatatatcgcgctttctgcagaacgcttgtcaagacttctcgatcaggtctgaatgtcaagtatggaaaaattggtcatatactgaaggttgattcttctttctaccaagcttcctggggtcccaagtccgggtctggaaagtacaccatgcctggaggtagccttaccagtggccaagccacagtcaaaagaagagaaggagaagttgtcggagagggtgccaagagtcttggagaagataatctgggtcacaaactattgtacgttactttctaattcaactatttctgagcgacgcttttgcggtcagtggttcatcgatgacccattttttttaaataggagcaagatgggatggactcaaggaacattgatcggcaagggcgatggaggtctgaacgctccgttagttgacttcaaacaaatcagagtcataccggttctgaatcacgctgatccttgttcatcctttaatatcaaccagcatcatggctgtggttaagaatacgaaatctggattgggacacaattaggtaccaaacgcattggcatctcgcatcctcacattctcacctgttttctttccctgagcttttcttgtatttcttctgaccctaccttagaaaatgtgtaagcttgacgtagaagaacgacaaacacgatctggttgaacaccaaagtttcgattcagatatgcatggtattatattgtctatgtacattaagttgacacaagtcgaagaaaaaaggagaacaggagaagaacagcctcgagtcttagggatatcatttgatatcaaagaacagtcttggaagatgaagataataccaaacatgtttgaatgagcgtaggcgatcagccaatgacatttctgtgcaaaagatggctacttcaaaccaagttgatatccctcaactcgccaaacactcgttgccctaacgccaatgctcctcgtcgaggagtcggcgcgcatccctttccaggactatcgaagttgatgagctgcatctctcgcagaggttccgcaacggtcgacttggcggtatctgaatcagcgtctggaagagctgaagtaacgacagacggtgtggaaatgagatgttggttcttggtgacttcataatccactagacctaatatcgcctcagtctctctgtccgaatcgatgatcaatagagaggacgaggtcattcgaatttcgtcctcatcaccagatgtatgcacacaagacggcgcggacttagaatctgtgtcgaccaaggagccacaatccggatatcgagctgcaggactagggctgaatggaaccaaagtagtgttcgctgaggaaagtgttccatgattgatttgcggtgcgaccgaagccggatctgattcaggtagagttgaatggggaggtgatggcgggagaggcaccatctgcgccgaaatctgtggttttatagcagaagacgttgctttttccaaagcctggacaggagaagagggaagagggaccgattcaggtctcaccaacgttgcggaggtggatcttgaaggaacaaccgtcttcttcgtaggtttgaagctaggtagtgcgggtttgagtctgactctctcctttctcggctgagccggaacggctggcgcagacgaaggagcaccaactatcttcttgatcactctgggtcggaccgtcgctatggtggaaccaactgaggatacagtattaggtttagagactggtgctcgcgcagatgagctcacagttggggctgtcgctgatggtcctttcgaaactgaagttgatctaacggacctagctgaagcagtcgaagaggctgatactgatcttgtggatgaagcggcagacacagatctagccgatgaagtcgccgacgttgatctggaagtcggggtaggagcggatagtgtcggaggaattcctttggttaatgtaggaagaggaggtttgacagctacgcgccgagtggatatggtggaagcttcagaagacgtagtagctgtcgatttgcttgctctcgacatagtggccgaagcaggagcaacagggtgacgagaaatcggtttgaacgctttagatgcagggacagagagctgaactcgaggtgctgatggtttggccgtcttagcggggtcggaaggtttatttgctttgacgggtgctttggccttagtcgaagcggcgatggaagtagtagtggagctagagatggtagtgacattagctacgatggaaggggaaggg

SEQ ID NO: 1205 - DNA, 110710 bp, Xanthophyllomyces dendrorhous
gtattgatagtaatcggagaagtcacaacagctggggcttgatccgcaggttgaatcagaggctcggaaactgcatcaatagtcggaagtgatggttgttccgtcttctcctcgggcgttgcttttgaaggagaagctacgttggatatcaaagtcaacaagttttcgaccctgggctttgctgtttcgaccgtctcctcagagatatctttgaaagattgaggtaattcagtagtcgtttcctccaccgccactaccatctcatcgttcttcacctggacattctctttatttcctttctcggtagagaccaaattgtccagatcgctaatcaaacgaagctcctccggtaccatatcgttccacatactttccaatccaggggatgtttgtgcaggcgccacctcctcactatccagcagccccaaaagatctcccacacgaactggttcttcgaccgttgagctagcttccggttttagatcactcgagatcgcatgttccacctgttctgtaggcaagtcaatcgcaatcagaagagttgggctctgttcctctttttgcaaggaaacgtgcgtcaccgttggtgaaggtggtaatgggattgcatgagctgctgttggtggatgagaacgaggcggagaagcaggaagagggatggcggcagcggcagcggcagcggttgccgccaaccctatcggctcatctagcgttcttccggtcgaccggccgagcgtgacgagtcctcttcttaccccagttgagatcaaaggtggagcacctggtggacgaacaggtctggacggagggcccaggttagaacctgcggagatagaagatgtgaacgaccgaagagttggagtaagacctgatccatgagatgaaagcgagccagaaatcgttcgaagatgcaagggcgcaggtcgagagacggccgttcgagtcgcaggaacgttgttgggggcgacagaggagaaataagaactggaggatgcggcggacgaaacagggtgggtagatgtatgcgcagatgagtatgcaggtgcagaggagatatactgctcctgattgtagtgttcagttcggtaggaggaaagcgatggagagggatggatcgactcgtgttccaagaaaggtctggaggctgcgtgcgaggaatgaacatggtttgataaagaatgagccagatggggatgagaagaactggctggtcgaacagctggcatagagcacgatgaaggaattaagccaggtcgagatgggccaccgtgttgaaaaccttgggaaggatatgactgttgaaattgatgttgttgctgttctgcatatagtggtcctagaggtggttgagcaacatatacctgagacgctgtgggcttcggtttgagcgcggctttgacacgagcagtgcctttgttagaacctgaactcgaacctgaaccaccagcggacggcttgacctctaagcgtttctgggtggtaggtgacaaaggagcggcgaagctatgacatcagggcagtcaatcgtaggagcaagattgaagtcaagtcattagcactttgataaggtaagaaaaggcagtcgaatacacgtacccatctactcttcctggccaaacttcctggtaagccacccacagctccttcgcaacctttctgacgtccacatctttatcagatattaaagctttgataaccttctccacctcttctacttttcctccagcttgccagttctccaccatcagtcgtagccctctcgcgatggctttcctaaatttcgggtttgggtctttgcatgccccagagagataaccaatgagtgcgcctgcatgagggcacgattttaggatgatataaagcgtggcttcggctcgttcacgaatgatgttgttcgttcgacggaccaaatccagtaaaggaggaatatagagccgttggaggtgaaagctgaaccggtcggccaatcgaggagccagcgaggacagcaggtcgagagcatgtttggacaaggcagctcgttcggttagcatctatgttggtaaaaaccaagagattgggaaaacagaacaaacaagacaaccatcgagtcagcttttcttgaacatcaattcgtttagataatgagagatagtgtgaagacttacacaggcaacaattttgtcacccagaccaccttgtgagctaggcccaactgcagccacatagttatccagcttggttgccccccctcgagtcaacgctgccaatctgacggatttcccgtccgaggatagaacgcaggatagtcagcgtttctctcttctgttcgttgctcgataccttgtataaccatagagtgagagaagacgaacgaacctgatgagtgctttcgcaaacttttcccagttatgttctgtctcaggctgagcaaacaagatctgcatatcgttgatgttgtgcgtcaactcggctggagtgttacacttgatatgtttgaaagaaggttcataagcagacgcattcacgattcacatcgcgtagattccatgtggcgcaaggtaatccgatgatttaggaggtggattggcacgagaacaaacggaaagaagagcgaaaaagactcatagtcaagtcagataggatttgtaaagagaatacctcgaatgctgaagcgagtacagaaacagagagatgcagagcagaagcctgaggaaaggaaaaccaggtattgagttgaacttacaggaattctatcatcttcttctttcttaggcttgggagccatatcggtgttgtattctaatcaagatctgttgtttaactctctttctggtgctttgatcgaaaggttgaaggcaatatgaagcgatgaagccttccaggtagaacaaacgtgaagttaagtggagagagaacggacaatggtgtcgaacaacgacggccaatatgctttggacgcgtttgtttttcttttcttctacaatcgcgtcggatcgcttacgtaaaggcgttaatttttgattacataaggcttagcccagtagagtcaaacagtcatcttttttaagggagaaagactacatgggaagatgaattaagaacaaaaaagaaagggaagagagagttgacaagctaaaactactggggaggcctcatctgaggaggaaatccctggggagggaatccagggggaggagcaccagggctagatttgttgaccacagaaatgagaatttgttagctgagttggaccagacaccaggaacgtcacgtataatgcggaaatgagaaaaagaaacgaacaacccagccggaggtcgagcaaatccaggaggaggagcaccggggaaaccaggaggaggaagtcccggcatgccaggcattccagggaaaccaggaggaggtcgagcatagggcattggtcgagctgctaaggagggaggtgggatacctaaaaatatcaaatcagtccaagagaaaggaaacataggtgagttcgaaaattccactgatattttgacatggttcattctcttctgagaagagcgagaagcaacgtaccaccgccaagacccatacctcgaccagcagccaatccttgtccagggcccaaaggaagctacatagaatcgttgaagaagagaccggaaatcagtgacaggcaaacacacaaaagcttagtgcggcagacttaccgtaggagcgtcatcagccaccttgggaggaggtccttcaatagcaatgctgacaacagtctctcctcgaagaataaccaagccaagcgtgcgcttctgctcctgagccggagcagggacagctgaagttccatccgcggcagcttttgactttcgggactatcaataagagaaatgaaagaaaatacgggaaaagatagaacgtagcacgggttagattgttcgttcgacgaaaatgcatggctgcttcatgttgatgatttagacgagattgggagctatcctatatcaggatggcttacgccaatccatccacggcatttccatccatgccttcctacctttccaacctttccgcatgcttcccttcacagttgtttgcgtgagctcccaatcatgcctatcctttccttcgcttcagccttctcgccctcaatgccatccgatcaaccctttcaacgtatcgtattcagaagggagtgcaaacacaccttgatttttcggaactcctcacactcggagagcaccaaattcatgtgcttatcgaaagcaagcatctgtccgatcagacttcgaccgtcgttactgatgatcgccaagggataccgtagacaaacgaggcaagaaaatagtcgagacaagtgatgccgttgagagaaaaaatacaagaggtcgagcgatattgatcgagttggggcatcgaagattggtgggatggaaagagtgtgagcggatatatggtattcagacgacagtgatatatgcagaatcacaagggcgggttgttgccgataggcaaagaaagaagagagaaacagtgagcatgaaatgaaccgtggttatcgatcgtctgtttgtatcctcatcgtgtggtgtagtattaaaaagcattgaaagagaaccaaaaccacgaacagagtgaccttaagccggtagttgatgagggacatcatcttccctccctttgcctttgtgtttccgactgacgaatggatagagaagggatacgtgtcggtggaggacgcgatgaacgcggaaggaaaagagcacaggcagattgagaatcagacaacatgtaagtcagtacaacgaatatctggagaacagttgagatctgttctaaacagaaatagtagaggcaggagcaagaaactgaagacagctgcaagaaaagtagaaaggaaagagagaaggacaagaatgaagaggttgagagatgaaaacgcactagcctgaagccaatgcaattcgtttggcagatcattcaatccagagggatatccaatagtcatcaacaaaaaacgtgtaagattaactcatactttcaaactcatactcaagacaaggagaaacgtaccatgattgaaataaagggggccgagcaagttgagtggaaggcgtttgaaggtgatggagacgatcaagacaagaaagatcaaggaaggaaaaaaagagtgtgtgcctgaaatggttacaaggcttcgttacagatatcacgtgatcttgacgcgtctgttgtacacatcgctcgacgcgtcgtaaacacgaccaaggttgatttttccaggttttctcataaacacaatcccatcctcaatcagtcaaccagtccaggatctctcttcgctcgcagcgcaacgtccttgctctgcgctcttttcattgagggggaatatagattgatcacatatttttcgctttaccggatgagtcgacctaggaaagctcggatggttcaggactcggactcttccgactcggaccacacaactccttctttaactgctcctaccaaatcctcctccagatcaagagcatcccttacaggaccatcggcccccaaggtcaccttcatcaattcagcttccgcttctcctgctggaattaatgacgattcactcgagaaagcacaaaggaggaaacggctctcgatgggcactcccctacaccatatccaatccaaggaagaaggtacatcgagccaaaccgcccttatgcataacacggcgagcaaaagacgacagagcggaagaagactaagtgctatcgtcgctggcgttaatgctgagggggctgcagtcgagtctcacaatggagtaatatctaagccggtagagagcatggaggagatgagtctcaagtttgaggagtggatgaagatggctacggacaacgtgagtctagatctcacaaactttatccattgcaagctgtcttctgtagatgatatcagatatatcaaacattccttcttctgatatcgtgtgtttcctacccattccatacttcggaaaaattcagaaaatcactgtcaacaatacttggaactttgcattgatcgactactttgccgacctgacactccttcggaatggaccagacgaccaatctatcaactttcaaaaagcatcttctacactggacggatgtgtcaaaatttggacgagtcgagttgattcggctttcacagagaccggaaaattactcagcggtctaagcgagacgggagctggagaaggagaaggaggggaagatggtgaagaaggaagtgagggcgaagaaggagaggatggtattgttagaaagaaaagaaaagtatgcgtatctatctctgttatctgaaaaatcctctctcgattcaggtaacagaattaacctctcttcctttgatttttgcagacccactccaaaaattctaccctagcgccttccttccattcactatctaacaagaaacttgatctcgagttctttgttgatccgttgtttaaaaagacttcggctgatttcgacgaaggaggtgcagctggtttgctgatgaaccaccttggatctgctggagggatgcggttaattttcgatgcaggtgatgttgtgctggaggaggagggagacgtagatcttcgagaagaggaagaagaagaagaagaatcgaagagaagacttgccaaaacgaccggaagtggaaaggttgatatccaggctttgagaagtatgtatttggtgtttttcttctgcatccatgcctcctcactctacgcctctaggaatgtagtattgattcattggatcggaatttatcaatctatgaagtaaaattcccagaattgtctcaacatccatctcctattgctccactacagatcacatccgctttgagtggcttcgtcttttcgtcttcgtcctcgaatatgctatccttcgacatagctagtcttaacgccgctgtagcttctgcttcatccgctgctaccgccgccagcggagtctcttatgatgacattgagaatccagacgaaccgggttcaaacgcccaacatgacttcttcgactttgacgacgatcataacggtggcgggggaggtgcaggaggggatgattttggtggcggccagggagatggttatgatgaagacggcgctgtcgatgaggacggaaatccggtgggcgcttctggaggtagctcgggaggaggatttggattcgagccatttgatccgagaagacagccaaatgagaaagacttggtgatggccatggttggtggagaaggtagagaggatagcgctggacaaggcgaggagatgtttgattacttcgatagacagctcttggcaagaaattgggcaggaccggaacactggaagacgagaagaacggtggcattcggaaagaaaggtcggtctgccggtgtctccttgggttcctcattggaagttctgaagaataatgtatctgatcgtctctgtgatccactgatttcattcatcactggcagacgccgtttccgagaacccatcatcaactctggtgaagacgtctcgaaaacctcctccgacgatcgacttcttatcctctgaaccactcatactagcatccaaacttttcgagctcccgagttccaagacgtccatccttctacctgcttcttcgtctaggcgcttggcgagttcttcttccaaatcagagaagaagccttcgaatgcagcggccaagaaaaaagctaaggatgataaagagagggaaaaggaggtcaagaagtacctcttaccagatgacttacatttctcatcaagtcaattgctcagattattcacgaagaaacttttcacagtatgttcgacattggcttcctacacaattcttatacatataaatactgattccgtctgctgaattctttgattcagttgagaatgaggagacagggaggacacgcttatacaggagataatccgcctagtatgttgaccccttcacagcccatcatatttcatgcgactctgatggcacttcgatattcaattgttgacaaccgtttctttacattccatcttagtattccgaggcgatggagaggttgatgagcaattctgggctcaggcagcttctaatcaagctgatatccgaaatgacatttacgaagatgatggctttggttgtgagctcaaactatccttctcagtgtcttgtgccattgtgtcatcctaactccaatttgtcattatcttttactggcatcatagctcaagccgatccgcctccgttcgccactcaattctttaatgacgacgattatgacggtcccgtcgggttcgacaaccaagatatgctagatgcagattccgatgctgagccaggcgcatcatcctcgatgattccccccgaagaacaagaagaaaccctttgggcgggaacacaaggcctgaaacgaacgagacctgattacgtcaagttctcgaaacgagccaaacgagtggatgtcaagaagctcaaggattcgatctggaaaggattagatatttttgcgcctcctatcgagggcgaagatgaagatgaagagattgaggtcggtattttttctcgttctttgtatcctttatatttcagcttaatgcgcgacatttaactgaacgtgattttctcgctatcactgccgtgtcgctttctagtccactactcgtccaacaacagcagaagatccaacccaacctcgtgtgttctccaccgtagtgtcttctctccagtcatcttatccgtcatccaaattcagtgatatatcgacctcgtactgcttcatctgtcttcttcatctgtgtaacgagcgaggtctacaacttgaagctgctcgaggcgatgacggccggaatgctagtaacacctcaggaagctcattccccaggatagtaggagaagatgacgacgaggcaaccgatggggaggaagatatgaatggggctggagctaaagcaagtagagatcagttcgatgagacgatcgttggccaacttgggttcctaaagatcttcaaagatcagaatgccaaaggacatgcctaactggagagaaggggaagagtagcgagtatcctagatagacggatggggtaacggtgaataattggccatatctacgtggcttgaaacttttatttgactttcatcagctgtaacttaaactttttcttgttcttttaatcattcccacatcgttcttcatatgaagaatcgcattctgtacgcggtttgatctatcttccgtctttcgacttttttttactccttactaaaatttacatgtacatttcgagtttctttcataatcctatattgggacatctctattcctttgatgatgtctatttttgatcgtccgggtcccatttgaacgtctggggctagatatttcctcgtcacgttcctttttgagctttggtggctaatccctgaggctcctaaacacctctccggtcctcatctaattcgcccgtcctcacactaatctcgattgtctcggacttgtccggtttggggaagaacgcataacaagccccaaacgaactaaccatcatggtcgctcccgtgaataagattaggggggcatagtcgctcaacccataagctcctttggcagaggcgaatcctttttggcccgcagtaagtaatccagtggagatcggagcggatagaatgttacctaaacctcgggtggagacaaagattgcgtagagaatcagtgtctcggttgggtcgaccgagacagcgctgatgaaacgaggccacatcgctgaccagcctgttggatgcgaagcgtcatagcgcacgagcaagaagagaaatacgcagttagcaaatatcaaaaagctggggcgagataagatgatgttttgaaaaatagtgagaacatactgggtccaaggaagccaaagatgatactgaatgtgagaagaggtgcaagagataaagagaatccccacacaaaaaacgcggagagcgatgacccgataccagaaagtaagatgcctaacaccagatgcttatccgagactacaaacgttttcaatagatatagattggtaagtctgctggctgcactacatgaggctgtgaaaagatagacaaggaaggaagaaagtaacacacgccagcctaacaagatagttccaaagcaagcagcggcgttcatcaaagagagacacagcgttccagagtttgttgtcaatccgagatcagacgcgaaggctgttgtaaagatgagataaacacaaaggatagagtcaacaaggatctcagacaggtgtttttttttgtttaaagacgagaaaactgactggggatgtagatggaagggataaagattccgagcccttgcaacgtgttggccgctgagatagcgaataagacgagaatcaatcaaaccccgtattcgatgagacaacatcttgggacaagtatgagatagaacggcaggcttacccgtgaacatccagaatgcagggtttcgaacaaagctccagtttactcttcttgtaccaaccacttgactctttgggtatcgactctttatgaaaggtagaacagggggaatgaaaacggcgaagatgatggcgagaactcgaagagtggtctcatgtccccattttttgagaatccagttcaaaacgagcggcatgaagagacctcctaacccagttccagcttcatagtggtcattggaaaaaaagtatcgcgcgtgagtttctaaatcgaagcaaggctacaaaccaacgtcaagaagagacgaacagaaaataagtccgtttgccattcctctgtggacaacaaaccattcccacacaaaagtggacgccgaaaaatagagggcggctcctccacatgagaagatgacaccttgggttataacgagttgacctggattggtttattgaccacgatcgtatgagtgttttgtactggttacaacttgatcgagaagaggatcgagattaaaagtcttactgggcgtcttagcaaagcttgcagatagcaaaccgatgacacagagtactgtaccaacgtacatgctattctgcttctggttaggccatctagtgaacactggaattaatactaaggatagcagatagatcaatcctgacgagatagatccaattagaggaagaagagcggatttgtcatccggaaaaagagtggatcggtagtctttcgatcatcagaaattttgatggtgatcagcatacctctgactgactaccaaagatattcaagatacatcttgacttacattcaagaaaaactccataactgaacggaggagaccacaccaacagctctacaacaaatgcagccgccaaatacgcatatgcgtcaaatccgccatcctacagaaatatgactccaatccaaggaagtttgttatcgatctttgccttgacccgaaaggcagagtaagacacaaccagataacttacgactggtggcagttctgagatagacacctcctggtttgcgctgtgctgtgagctcaaaccataaggactttcactgcgcctgctactcgaattgttatatctctgagagtcgagactgggtcgtctggattccccatgcagattcgatgtatccgtatacacagccggaatctggtctagctcaaattctggctgttctgaagaccttgaattgttgacaaaacttgaagccatggtttgatggactttcttgatcgcttgtacaatagaagagaaagaaaggaagatagaacgaaacataaattgttccgtttcccttttgcttcttagaggcaattttgttccgataagcgttcgaaattgaccgtcaaatcaagcgccctttttattctatttgcattgacccggagcctactctatgtttcatggccttggccatcaatagaactcgaggaatactctgttatgatgattaaagccgatatctaccaagcatgggtgttcggagttgtccatcgatcgcctgcctactgagtcgtatgctttctccgtccacactgtccgaatgatcttttaccggccttatgcggtaatgtcttgcacagccttgttcaactgccacactcactcacaccttccccatacaagtttcatctccacacacacacacacacacttactcttcttcccttcatctcattttccatctgtttcgaccctcaaaccatggacttcttggaactacttatcctcatagtcctcgcgcccttattagcgtacgtattgctccattggcgtgtttgtttctcgctttttgttttccaaatcacccgtcacgcccttcgctattagagttctaaccagctcggttcctttgatccgctcgatctgaatgcgctttcgttaattgatgtgtgagaccatatgtagtctggtgctcgtcaccctgagagcaatctttgtcatgcctcttgtgggtgctctcgttcggttcagggcaaactacacccctcgaggagtgggcctagatgaagaagacgccaggtttgtctacagcgccttactgtcatttatcgctggcccgcaggctcaacccttgtgtgcgggtctacgtagatgtcttactctttgattcgattttgtgttcttatttgaaaacagagtcggacctgtagtcaattctctttgggcgatgatgattcgagtaaagaatttagagggttgggacggcatgtacaaaggtaggttgttccacgttaagctcccaaacaacctccctcttccgaaaccttacatatttaccactgcggtctatcgtttcgaaaacaggcgttatcccttatacttgtctccataccctcaccacctctcttgtattcatctttctgggcgccacagtctcgattcttccctcgggtacgcttgccgtgcccgatccatctggcatccaaatgggctttgtcactgttttcttggcactcattaccgttccaggaactatcttgatcaaccggtatgtgatcattttcttggtcgttttgcgttacagtttcctcgtatttaacgtccgacaagtttcacagagcaatcacaacaccatatcagcttccatatcgagagaagagatcacttcagcagtcgcttcagctcctcctcacgccgtatgaatatagaaaaccttggatcctttggcttacgcctgggttgcttgcaatcacagcgatctacgtcgggtggacggtcctcctcatgagaattatgcgaaacgccatcgttggcgaagcgtggagtaacgcgaacagaggcgcgtctgacgaacaggacgaacagctgtttgcgaacgtgagcacattcaggctaattgtattcttcttggtacgtcatcttctgcctctcttgctttatttaacaacaatacttggtgaggtttgagagtgtgcagttaagcttctctggttctgttcggtgttacccgatttgaattcgtccttcagttccaaggcctttcagccatcatcctcacacctcttgaggtaatgacgactcggctatctctgcaacgaaatcgagatccgtctgatccttcggccaccgaagaaatctcaggtgaagtcccgttcattgctgaaggagaagatgtggtcggttacagggatgctggagaggcaccttatgttggcatgatcgtacgtaaatctcactctgattctttctccaagagagtctcatctgatgatcatcgaactgtctctgtttctgtccttgttgctgttggcatgcaggactgcactagaaagatgctagaagaggaaggctggggagcgttcatgagaggttggtggattactctgggaacaaacttgatcagaggtttcccttgaagaaagcgtattcaatgaatcttgagatcgaaagtgaagactttcgagagacgataggagggacgtggaaagagagtcatcttcttacatgatttatcagcagcaagtcagccgctctattcaagttcatgttgagggtaggcatcactatatacaagcatcattgttttaaagagatcaaactagagatttcatcgaccagcggcaagagcggcttcacgaagcatgacttcttgatctagcttgatcaggacgacacttcgttgaggaaatccatccgtagggacggaatgagcagtcacctttgcaggctttaggatatgtacacacgcacaaaagaaatacatcgatgtcaatttctattttatttgaagaagcgaagcagaggaagaaacgaacgaaatccagtccatcaaggacaccttctacgatacccgccgtgaaggcctcgcaagatagtgtcgacatatctttaggaatggagatatgctgggttaaaggagggacgttcatcgaaatttgatctttggaatcgaagatgaatccaagtaatataaattgtttgccaatgagtaatgaattcgaagattgtttcgtggttttctatacagagcgtaaaaacgccttacattcgtcgtctcctccaaaagatttctccagtccatcagcaggtttaccaaaagcagctttgtatacttgactgtgaatgaattgaagggtaggaatcaacctggcttcccgtttcggatcctgtgcaaagcgcatatattcagtatttgatcgatagaacaaaacgcgacgacagggatagattcgtgggttacgctcagtcagctacttctttaacgtactttcagtgagcttgtgtttgagaagagatttcttaacagaagcagtgagagaattcttgttccaacgtgatgtcctagggacgacaaactgtttaatgacgaggcatcgaaggttctgttcaatatgcgacgcgcttacccggagtagaaggattggacatgagataacgtaccgcgactcgagttctgctatgctatctactcttgattggcagtatgagattatctctgatataagaaatgagatggccgagagagagatttctgagcgaagcgatttgttataccttaatcaatacagaaatgcgcaagagatcagcttgtttcaacagagtgcatttcagatctttcgacagctaaatttagacaaggcctgatatccgaattctgacttacggtctttccaaaatgttaccagcttgagacactctcttagatgcattcagagcagagggcgtgctcactccgctggactgatttgttatcgggagcgagaatctggatgatggagacgaatagacactgttaggcggtggtgtaggtgattgacctgctaaatcataggagaaaatacagaaacagtcagctcgaggacaaaagacgcgcagatatagcacatcctgtcaagtcgaaccaaccaattgaaagagcagagagacgggaggccatagtgaggtctaaactgatggtcgatgtggatgatatgatgaaggagggtgagaagcgatggtaaggtgatcgtttcgcttacataagcaatattcgtattttttgcctcttctgtccttttctttttttcttttcgtgcctttctcctcaacatccatcactctatccatcatgtctactgactttgtccttcccgagatcatcgacaacgccgatggatcatggggtccttctggatcccatctctctactggattcaaagagttagtagagtttttcttagccattcatcatacatctgctcgcgcctgcagagtttctcttttcctctttccattctcttctttgtataacaaaaagacgtggctagctcgatggttttataaaagacattttatcgctaaaccacataaacgttttatattctccctttgtagtattccctacgcccactacaacaaggctgaccgaattgagcgaatcgtcgagtggtatgatgctcctgccggtcaggcctcgagctcgtccgctcgaccttcctccgccgcctacaatgctcgaacccgacgagacggagcttcttctggcaccaccaatgatgcattcggatacgttcatggcgaagacgagaagtccttctccctcgttgacaacaagtcatcggctggtctcaagcccaggaaccagggaggacttggtatcggacggattggaggaggtggcaaccgaggtggtcgaggcggagcccaggctggtcgaggaggagctcaagctgctaggggaggtgctcaacagaggaactacactcgaggcggaggcagaggtggctttaacaactggaaccaggtgagttccacctcttcctttcaaggaaagatttgttattcaagatgtgccaacagacaaaattgatcggttctttttatgtgacggctatctttctcttgtttctagaacacccgagtcagggagtcctctgtcgccatcagtcccgaatggccggttcttgaggagatcgagttcaaccgactctccaagctgtccctcgccgtctctgagcccgagactcttgcctcatacggaaccgtttacgcatacgagaagtcatacgaccgaatcaccaccaagacttcccagcctcttcagacgatcgatcgaaccaaattcaatcctacgacgtcggacgaccctattattcaagagttcgcctcgaaagataccgcccgggtttacacgactgatgcaattctcagtgtgctcatgtgtgcccctcgaagtgtgaactcttgggacatcgtcgtcaacagggagggtgataacctctatcttgacaagagggagggaggtgcgttcgacttcatcacagtgaacgagaacgcgattgagcctcctctcgagacctccgagaccgacccctcaaacgctgccaactcgctgtcgcttgaggctacctttgtcaatttcaactacgcctgccaagttgtttccgctgccgaggccgccaagaagaaaccgtcatccaaggtggatctcggcaaggcaaacccgttctacaaccctaaagagtcgacggatccgttggcatcctgtggatacagatatcgaaagttcgacatctcgaccccttccgacgaggagccgatttcggttgtcgttcgaaccgaggttgactcagtcattaaggcggagaagggaagctctcagccggatcagttcgtcaacgttcgaactttgttgaatggaccttctggtacagtcgtcgattggaagcagaaattggattcaggtcgaggagccattgctgctcaggagatgaagaacaacagcgccaagttggccaggtgggctattcaaagtattttggctggggctgaggtgatcaagatggcgtacgttctctctttctccgtgctagatgatcaagtgatctctgatagatattgatacccctggttatgttatcttttaaagctacatcgcacgagccactcccaaggaccgaactcgacacgtcgtcctcggtacgcagacctacaagcccaaggacttcgcggctcagatgaacttgtctgttgccaacggatggggtattgtccgaaccatcgttgacctttgcatgaagcagcccgagggtcgatacgtccttgtcaaggaccccaacaaagctatcgttcgattgtactctgtgcctgacgacgccttcaaggcctctgccgagggagaggacgaggaggagtttgacggaattgatgaagaatagtttggaaagtcttgtggatatatgatggttttgcaatgaatacactatcttagtatatgggaaatcaaaatcagaatcaaaattcataagtcagcttacataagtgcttagttgagaagtgattttttctcaacaaccaaataattaagtcaaccaacgaccacaaacacggcaagacattggaacttctgacgcctgtgtttctcgtgtgagtgtcgtaatcgtccatccatctatccatccatcagcctgtccgatatgatggttaattgcgttgcttttcgttgctagtttcaatcatcacattcgtcatgggaaggcataagggtaggaacctcgttatcttgatagctgatcggcttggctagtgaattcacgctcgatggctagcagattgactgacctgcgcgtctcatatgatccttcaacgtaccttttacaccttcttaggatccaagaacaagtaggttttgaaaattttcctatatacgtctcttacatgcatcgattctggtcatgttccacgtttaggtttcatgttcacgctcgatccacgtacttacgtatcatttggttcaattggttcgcttttacgtcaatttgcgtgtgtagaataggacataacgctggaggagctcgatcaggagctggcagaccgagggtatccaactcgggtgacatcaagggtgaaaccggtctgagtatgttcctcgttctgttatatctatccatttattcgtccatctgctcgcctattcactcttttatgctatttatctgtggtatcatgacgcgtccggtttcttcctttctctagccgccaactacctaccagtcaactgtccatttgccgtctgtgtccgagtaagcgaccgatcatccatccgtccattgatttggcttatattgtcataatccttcttactaacctgtttgaaacctcaataaatctttttacatcgccgtcacacatcaatagcgcttcccggccaaaggaccgggtcttaggaatcatatcatcatcagccactcgggtgaaagagatgcattgctcaacgatctggcagaacagattcttaccgaagtcaacactcaatacggaaacttacgcgtcaacttagaacctatcgtgtccgcagaaggcaccgagacgaatggtggagtgaacgagtcagacaactccgaagctttagatacttcggaaggacctgaagataacgcatcaaacgacagattcttcctctcggacggaacccccactttccgtgtcactggacctcataatcccctcgaaccttccgcaggctcgtccggaatcaacttggctcatggattagatgacagtggtttcctgctggatcaccattctttccctggtagctcaaaccaggagatgattctcgctctccagtcaattaatactggcaaccatgagcttgcgcgggtgcaggaacggatgcataacggagaaaacccggttggtctgccagaagcagtgatgaatttgctcaggacggcctccgctctgaaggaccctcatctaccggactcggtggctcatgaacatgcacatggtgctcttggcgcacacacacccgacattcatcacgatggtgaggacgatgaggaagctgtcggtgcgacccattctcaagatatgtcgattgatcctgatctagttggcgatgacggacaaggaccaagtaaccaacccggacagtccatggatgtaaaacctcaccctctggcttcaaagaacgacgtcggtggaggtcgaatccacacctctccttcatctcaggatcgcttgatcgcatctgctattcagtcgagtgctcaacaagcacgcgcggcacagattcaatcccaaatgatatcacgcgggtctccttcgccttcgcctgggtcgattagaaatcgccaaccgatgacgccgaattctataaccgctcagctattgagaaagaagccatatgcgagggtttcgccatcagcgcagtctcctagagggccccgaaactgccgacgatgtctgggatatggcgataaagtcggggcgctaatctgccccggtcgatatgttcgagcaaactgtgatctagataaaagagttcaaactgtgatcccttcgtctggaaacgattgggaccaaccagattcgaacgcgacttcatccggtcaacttcacctatctgatcattcagaacatcatcaccagcaacatcatatccaacagcagcaacagcaacaacaacagcagcagcaacaacatcatgcagacgagatatcttctcttaatggatcaatcctgcctgaagcaggaccttcctcccagccattcggacaatactctactcagacttcactctccattcatccgtctcactcacctcttccttcgctaccgcatctatctggcttgacctcccttccagcaattctaccacccactgcaggtaaggatcgtcaacgtcgacactgcagagtttgtcaagcaaatggcggggatggcttagcttgtccaggtcgaggagacaggaaaaagtgtcggttctggaaggagggagaaatgaacggaattttggttgacgctggtttacaacatgttgggctaaatgagaacgatgttggacaaggtctctctcagcagcaacaacatcagcatcaacagcatcaacagcttcaacagcaagaggatgaaagtgtgtcatcagcccatcaggaccatcttcatcatgcccatgcccatgctcatactcatgcccatgctcacactcactcggacgaatctctccgatccgactcccaattgactgagcatcatctggagccttctgattcagatcatcatcaccctgtcgatccatcactcgtcattgtcactcagcaagaacagggacaacaggatgaagggagtagagagacagatgtggaaggtccgtttgggacgtcagcgacagatgaggagttaaatcacgctgtcgccagtttagccgagtaggcttatcttctttattgttgtctccttttcctcttggttttagctgtctgtctttctccttctgatcctctttgtaccaagttccttttccctgtctctcattctttcccccttgtctattgttcgtttcttcgagtcaatcctctgtttaagccaatttgatttcttattctgtctttattattttaggttttagccctctcttcctgctattgttcctcgtgtagattgtcaatgaatcacttatcagctgtcaagggctcataattctcttgactcgaatttcttgagctttctttcgtcgtatagcatcaagtgacccttctgcacaaaactcaaaagatttagatgagaaagccagaggctgaagtctaagagaatgatcataagtccatggcgtcttgagactcaagctcggtctgcccaccagctgtcgtatcgccttcgaaatgcgattcgaaactcgatcgaatctgatcgtgggtctcccgtgcgttggtgagggttatggctagagcggtagtgatctatatggttgaatccaaaggaggttgtagtttttgaaattgatgaatgcaaggtaaaaagagaaggcggatgtgagcaggacaaagtatcatactctttgatcattaggtgtatcaagaaacagcagattcgaccatgcttctttatactcccctcatcaccggaaagagaaatcggtttcaacagaccagcaaaaaactgcacttacgtcttcttcgtcaaattcaccctcaccctcaaaccaaaccacactctctccaccctcaattaatttgccttcctcggcagcgaccctaaaggaagccccaaaagcatagccaaccccgaaaattgccaccgcacttcgttcttcctcgaacgtaggatcaaccacccagcgtttgccctcaccaggcaacaatgcacagcatgccccaaccgcaagtcctaacatccctatcgacccggcgtccaacgcggccaaactggcggctgttatcgataatgccttttcggatgtcggaggcgatcggagaggtcgtttgggagtggttggctcaaacaaagtatgtttcgggggattcgggaatactggaagcggaggggcggagagtgcttgaatggtgaggagtacaagcgaacgagggtgtgcggatagatttagaagggggagtagtgacgtctcgacggttgaagcgagtgtcttagaagcgagacctgaacaaaattcacgaacaagttggtattagcagagagtggttcatcaagaaggctggaaacagcacctaccagaaattccgtctagcggtcgatgtgagacctcaagtgttgctcgatccaatcgctcatcccttattcgaacttcgatgggtccagagaaagaagccagaagggtcgtagctcctgagaccatagaattataatgagattgtagtcattcatgaaagaaatttgaaccgcaactagtcaatactgtatactgagaagaaccagatagactctgactatcggggggaaagagaaggaagagaaacgaacccatcgatactcgagcgctaccatcagccctggagagcgttccaaattttacagaaaattgacgttgctgagaaggctgccttccgtcttctcgaggagaaagatcgtccatagctttgaattgtggtctagaaatgtggcgtaagaacaaatagcaagtcaacagacaagttgggatggatggttgatggagttttcaagagagaaattctaattatatttcacattattctctacaccattctgttccctcttcttcactctcatcttccatcttgtatcgaaatctctacagacgtaataactcaactcacaaacatacgaaaagacgactacatacgcagacttacatcatggaggcctccatttcaaccttgcctccaattaagctcaagccgctgacggtagctcaagaaggtgtgtccgacgcgtctcctcgcatagattgtttggctcatatatccttcgttttgttcttgtttgactttcggttagaccgaattatcgagtctcggctatccaacgatgaacgagggatccgcaaaactttaaaaaacatccttactttggaacgccgatctaatcagtccactatcgagaaggatgttgacatggaagcctcctcgagtgaaaacccagccgctaaactaaggggaaccctttcggtggaggataagaatactgaggcatactcggtattcaacgtcgaactcaagaacttggagttgcatgttaagaaagctgggattgttgggaggatggaagcaaaaatgagagagacgtatgctgccaaaggaaaggagattggtatgttgccggtattcaatctctagatgttatcacctcgagctgaatattaaactcgactcacgaatttaccgtcaatgtgctcatttttagagagaaaacgacctcaacacactcttgagatcgcttccttacgagaaagacttcaaagtgcagaagaagagcgcaagcaaaagatggaatacgatgacgttgcacaaaaaattttggctgttggcaaacggaatgaccttgaaacgtaggtctcgataaatcatatagcacaacagatgactcctgtcttacctccaactaaaacacatgttcatatttatagcgcgatacaggaacgccaagaatctctcgcatccctcatagctcagagacaggcggtgcttcggtctcttcgattaagaagtatcgctttaggtaaagtccttcaggacctgactcaagtcgaggaggttgcaccggagactaaaggccccgaggatgatgaggtagatacagaagtacttgaagccgaaaaaatgttagttgaggacgcgccgaaaggggatgcatcagatatagccttaaatgatggcgaagatcaggaggaggaggacgatgacgggactggaaaaagaagagaagtagagaggttgccgtcgccaacggcggatgacatccagatggtcgaggatgtgctaccgtccgaagagccacaagagacaggcgaatcaaattcgcaatctaacccctccaacttagtcctcaatccttcgtctccggtctcatccgctctttcaaattctttagtctcttcgccaggtgtcccttccatcgccgacccttcgttcgctgctacctctgtctataataccgaaatatcgccatcactaacaccgtcgccctcgccgagtcagttggaagatgatttcgaaacttctgagacgacacgcatcgtccctacatcgcccacaaattccaacatatccgtcacctctacgtcgtcttctacaatcataatgatctcaaactcgcagcttagaactactcgggcgccaagaataaacaatccgtcgtcctcagcagagacagagccgacagtatcgggaacggagacacaagcgagacggacgaaactaaacacgccgtcagtcgatcaactggcaagtgcagacctcagcatcaaaaacgatatagaagatgcagaacccgaactggtacaaccggagcaagaggaaccacagctttttacaagtagtggacgaccaaaacgacgaagcttagcagcttcggcagatgtgtcttcgttgagcgcaccacaaacgaagaaggcgaagactagaagatgagtggtatgttggcaattggaaaaaggtgtacaaatacatatataatatgatcttcctcttcagcataagcagaaagaagaaagacctatagttcgcaatcaagccgttatctttgaatttccttcagaaaacttccaacttccattccccaaaaggtgcttttctgccaaacatcatcgtgtcctttgccctctacaagaacccatcgtcggagtatcgtgccgtttctcagacgagcggcctcaaacatttctttacccatagaaggcaagactaagctatccttagagcctgaaagaaataagatcggcgtgttatacaacagagaatgtggatgcgaggtttcgagggcggatagggcatcccaggggtcgaagacaaatggagtgaggtaatgatacggtaaatatcctaccgttttggaccggatagaacagaattcaaggataacaagatggaaaaggagtattctcagcgcgctatcaggtgtaaaaaagagacacgattgaaaggagaacgcacgtgaaggatatagagattgagttatcattcttttgacgctcggaaatgcgttttccaacacaacaccttcgactgagtttgactcttcatcatgtttcaactcgctcagcatgcaacaaatcgctgttcctcccaagctgtgtccgtagagtacgatcctgctttgagggtaattagcccaggcgtattcaagaactgtccggtagtcgttcagaagtcccggctgagttggtcgcgtgttagtggagagatagaacgaccgagggggtacaattagtagtttggtatgccctgatgagaaaggagaacgatcggagagaaggagttggcggaagagaggcaatcgggatacaggagaacccatgttgcctaagaaagtcggcgcagaagcggcgaacagcattatgacatctgaattgacgaaaaaaggctcaagattagcagaagatgagaactgaccttgaagatagatcaacactctgtctgggtgagagtctgatttctttgtggtcagtcggttggaggatgcaggtctttcctgcgacagttccagacctctgaggatcacaccttttccatcgggccctatggatggaaattcaagctccttcatatctaaccctctcaaaagccagtttgtcttgtcgattttctgcgacgcatcatattcatcatatagatccttgtcaattatagagatcacccgaccgacggtcgaaagctgagttctttacttacggtcgttcgagatcccggtggtaagaagcccatgtaaagaatctttctctgaaagagaatcatcatcaagcatttgtatgaccacagagtggccggaaggcctataagaacggaagctacaagataccagggaacagatgatgccgtcacgattgtccgagtatgtgacggtcgcgctaaaagtttcttgcgaggatacggggatgggtgtgaaacgattctgaacaacctggcgagggtacagtacatgtttagagtgaggacccaaccgatgcagcaagttagactatatatgacgtgctattatattcaaccaaagttacatgggttggcgttatcgaggttttcttagagcgaacattcggtcatcgacgtagaaggagagtaagcatgcaacacattaccgtgaggaaggttgggaattggttagaacatattcgtaatctgacacctgcgatattcggcgttgataagatacgtgaattctcgtctcgaaggccctccatttccctctccacccatccgccctctttcttccttcgatctcctcgctgctctcttcattcaccctccgtctagtgtctatcttgttataatcgtatagattgacataagtactaagaatccctgataaacattagtagccatgatatctaccccttcatctcacgcggccagtctctctggctcgtacacccccactcagcatcagaatgtcacctacggaccatctgccataaccaagttgcccgagctcgtacacttgttgcttccatccttcccttcggacaagaacatccgggcaattattgtgacaggtaactcgttggcaaccaagactccggtaatcgataatgttatcaagcttctgaacgatgctggaatcgacgccgatgttcacaaaggaatcgggcaacatgcgcgtgagtaagactacatcaacgagatatttcttccatcgtctcttctttgtatattcacgaaatagaaactctccatatgatcttcaacctaatcgaaaaaaatcagctgtcgcggggatcaaggaagctgtgaagttggtcaagtcaaacgtgaacaacatcctcatctcaattggtggagggtcccctatagatgccgcgaaggcgatcgcttacttccttcatgaggaggaagcagccgattcgcttgattatatcccacatatagctatcccaaccaccttgtcagcagcagagttcacttcgaatgctggattcactggaaatgagggcgacaagatcggagtcaattctgcgtatattgtacccaaggtaggagatctgatgttcatttctcattgatatcttagtgaagagaataacatgttgaagcaaagcgctcactcatgtttcgcctcttgaccaggttgtcattcttgaccctgagctctctctctatacacctcaaggattgtggattgcttcagggatccggtaagttgtcctctgctgatgctcaagtcgcaatggggctgaccagcgttcctctatgtccgtatgatcttcagagccttggatcatgctgtggagaccttgtatcgaaagggagctcagctccctatgaaaaacttggctctggtcgccatcaaagatctgttcgaagctcttcctgcttgcaagaaggacgaaaaagacttggacgcgagaggaagacttcagattgctgcttggtaaggatctgtaaaagacggattgagcgcatagagttggttctcacgtatttttggcttcttggctcgcatccccatattcaataataataataataataaataggcagtctctctggctgaacaagctttctgggcctgctggtctttcacactctcttgggtacgtttgtttcatctcaggatccgctaaaatggtttatctcgtatgttaaataaccttttcgctcatattgttcctactgcatacagtcacaaactaggtgctcgatactctatcgcccatggaacatgctcttgcctaactcttccatctactgtaaccttcatggctagagagcttccgacctcatcatggggtctcacctcactggcttcagctcttcccttcattccggctaacttttatcctacttcttctgctcctgactggactcaagaagactctaagagagaggctgcttggaaggtagggaaatccatcgagaaactggtgaaggatctcggagttgaaggaaagaaacttgatgagtacggggtcaaggaggtcgacctacggaaaatagcaggtcaagcgcttgcttcattgtcaggatgggaagggattccacaagatggagaagagattatcgaaaaccagatcttgaggcctctgttctaagctcactctcgcttcaatcgctcgatctatgtacaaatattgcctgatgtatgcctcatgactggaacgcgagccctccagagaagcgatcttcaccgctcgatcaatcatatagtattacgtaagatacgatgagcacatgacttgacgcgtaagctatgctcaatgtggcgttcaaaggtgacgttcctgctttcgagacatccatcgtatcgaccgtgatgacagattgacacattcatacacgcagacacgcttctacacatcttcccaacgccactcttcttgtacggtactgaatgcaatctgtgcatcgagattccgtctctttcgaaggtgagaaatcccttttctgttcccctcaccgatcatttgtccttacgtaggtttgaccgacgtcaggtcttgagattcgtagttccttagtacggacggactttcacgctcgtccattctttaaccatgaccccgaactggctcagtaaatccacgactatcacctcatcaaaccctcaagcttccccttccgaagccggacctaagctcacgagcaatcaaacgtctcttacccacttgggcttcagagggtcctcacccttgtcatcatcggctgctttttctcccctcacagcagtgatagataccgccggtcgaagaagggccaactttccaagcgcacgtcaaactgatctgactgaatactttcgtactcatggatctgaacgaacgagaaatgcctcaggtatgaaaccaagagcgcgaacggaagaggtcaatggaagaggaaaagaaagggaaactgattgggagaatgaaggaatccaggtgatcgggcaccgtctctcccgatcgactacgcctatgtccggcgaccatacagctcgtagagtcgctaatagctcgaccaccacaatgttctcgatgtcgtcccctagtcaagcgcatttgattaaatcatcagtcgcatctgaatggactaagaatggaaggtcgagacttcggcctttgagttcagaggatgaaatagatgtcaagctagaactatctcctcaagagatagcccaacaagcacgccaagaggatgctggatttgagagagccgataagagaagaaagaggagtccactagccgcaccttttaaagaagcaatgacttcgctaaacgaggccgaggataaagggatggaaagcgtgcttcggtcgaggtcggcaagggcagagagattgatgaacgacgagagttcgaccaccggcagtgcatcaatattgagcatggtatctccgaacgcctccaaggaccccgaaaaaccgacgtctagagtgtcacaatctggtcttgtaacttctagaagaacgatctctccttcttctcaaaccgcacatagtggtgagcttaatttcgaccagccggctgccttcagggcgtctactcttcatccaactccgatatgcatcgatccttctgaaccttgtccaaccccagtaccatcatctcctcttttatccgagtcacttctgccattactcccagcgtcatacccatcacctatccagcattctgaatcccttctacgcgtattcgcgccgatgggaaaagattcggcagctcatctgcggatgctgcgaagggatcagtttgcctgggaatcagaccaggcttttgctaaacgaaagaaggagctggccgaggttgaagcaagaaaggcagaggaagagaaggccgcaagagagaaggtgagaggagtatggcaaccgccttccaggccaagtaaaaagcagagagcttcagacgaaacggagaagtcgagagaacagccctcagttctcatcacaggaccgagcaaagacatccaagggagaggggcaagagaaatctttcaggaagagctggaggaagaggaggaggatgcaattttgcaagcgatcactgtttcttcgactacgcctggtagctcttcgaagcatagtcgacaccatcatctctcgccaattcgggttgttggtcctttcagagtacagggcgcaccttctccgaagagagctagaccggcctcttctcagcaaacatattctcatactcaggtttctgaaaattcgagtcaaacccagagccagcctcttccgatcggatcagtccaaggccaaccgatcgttcaccccaacaagttgcaacgaagtcgttctgtgataaatccgttgcgagatgatgataaattcagcacctcatcttcctcccattctgagacacacgatgaatcacaactcccagctataattaccgcgtcaagatccgatcttggtattctacctcattttcacctgtcacctccgttgtcaaatactctggacacaaatcaaccaatctctcggcgactatctactccgtctatgcaaaaacgatctgatcgtattcttgtggaacagaccccgactcctccgcgcggacgcacttcatcttcctggcacataaaccatggcccttctcttgattctggtcagtcgtctgaaccaatcgttcgagactggacgtatgatggttttagggattcagactcagaagatggattggtcgaatcgagtgtattaccggagagatcaagactactatcgagcaagaagaaaggagagattgaacctcagagcgtcgagaaactccgctcaggagatagtgccgttcagtcgagcgtcccactagcgagctcgatgctaccgaagagaagagagaagaaactcaaacaacagcaccaagatgcaaatcttacgatgatgagtgaggaatctggcataggcaacagatttatctgttcgagcgttccgctcgaaagttcgaagcggatggcaagaaggcagtctttctcgaagaaaggcaacgatgaactcgatggagtgcaaaatagtttaaagactgaatcgatggatagaccggatgtgataaggagagagcaagatgaaccatctcatgtcagtgatgccctgcccatcttgtattcattatcttggaaaatgtgaggctgatctcttcctctgcttgttatttctaaagtccacacgatttatgatagagaagcaaacttcgcgcaataactctctctcgcctgacaagtcgtcccctcttcgccatcttccctctagtcatttaatacattcttcgttcaattccacgtccgtcacacaatcacaagaatccagatctcacttgttttccgaagatgatgagatagctgttccttcatcccaattgaatgagcgcctctcacctctccgaagactcggaagtcaaccaatgagacccaagaacaaattgacatcacttcgggtcccgcgctttccattgcaatctgcacgacctgggttggatatcccatcacgtcctcctcctcctgcagttgaatctgtaaaaactatttcatctagaaaacgaaattccagctcatggaatttcagccccctcatagctcaccctctagtctcgagtcaaaaggctacatctcgttcatcgtctccttctgcactcctattctcaccgtcttcttctcagaccccgccggccaaacgcagagcaaagactccaaactctcaacttgatcaaccatcattcaaagatgaaaaagaaccccagcaaagttctctcctggctcactttcgacggactacaatacccaatccaaaacggctcgcgagacttcatggccttgatgaagagctcgacgacatccaactaagtgacgaaggcaatgacgaggaggcaacagagatgttaaaaaaagagaatggggagaagaatagcggcaatcttttggaacctgaagtcgccttgacggaaccggcctcatcatctgaatttgttattcccaatagtcaaccttctcctaaaaaccgtatcgtgttggttcagagaaaggcgcagagagtgatgggcagggttccatcgccacctccaagaaacatcttacttcctcgattggactcgaagcctattatcactcggacgagtgattcagaaacggatgatcaaaatgaggacgaaaatgatattgtgcctgactctcagttcgaagagggaaagacgatattggctgggagaacaccttatacatcaggcggtttctcaagaatgtatgggagagcgatgatgacgggaaatatatcggtaaaagaacccgagggtcgtttcgacaggtcggttcaggaagatagatcgtccatcaggtcgaataggccgtcgatgatcacaatggcagagaagaatgggagtgaatgtatcgaggaagaaggagatacaaccattgttcctgatgaaccaccaacagatgacgatagtgatccaaatgttactgtggtccccactcagtattacgttgtcgatgaatttggatcaacagaacctgttttggaagcttcatccttgacgagtttgtcaagtgactccatgtttgtggacacgctcacgagacgatccgatgagtcaatcagtttctggaagtttgccgctccatcttctgatgatccatctacgtgatgtcatgtatatgattttccaaaatgatctttccatatagtgtaagctagacgttgtgatggatctcattaatgatgtatcttggtgcggcacgctgttctcgctttgcatcccgggcgccgatggttgatgataatgatgcatggttcttgtatgaatgcaaagtataacagatgattgaccgagtaccccaagagagaagagaaggaaaagagaagaaaggaaagcaaaagaaggagagatagaagcaaattacaaacacgaggttcccctatccctcaatttcttccctacctcgccgtacccttgttcttttccttctttgaaaggaagaagacgagagaggagaccctagagtaaaaatgaaccaagacagatgtagatgacattgatgttaaaaaggaaatgaaaagtatcgggaaaacacagaacagatatatagattaagatagcaagactcaacatagacaaacatgagaagctcagatctgatatacagaaggatgccctgcgtcaaaaaaaagaataaacaaaagaaagaagaaaaagtacagagaatgttataataaagtccgcattatccagagtatctaatttatatctgccagagacagctccgacccggcccaactcctgagaccgtcgtgctgctattcaaaagtaaagagctcgtcgagtgaaaagaccaatgaggactgctcgcttaactttccgggctagacggctttgtatagacgacctattgggggttggatgaggcaggaggagcgactggggttggcgtatcgtctgtttccatagctgcggctgaggaactgaattctggtttctcagacgctacgtccgaatacagaacggaagcgatggaaggagatgtagagttcgagctggatctggatctgccgatgacttttgggagatgaagctgttcccgacgttcaatctcttctttttcctctctagctacctcgagtttctgagaaagcacgtcaggacctgaggttggaacgttggtgagcgggatggtctgtgaagacgatgaacctgacgagggagaggcctccgagtcgaccgactcagaagtgccggatggtcggacagctccctcttcatgcggagtcggttgctggatgttgataggtggaccagaagcaccagtttttgtagcaggttcctggacggaggaagatggagaagcattggctgaggtctttcctcgagcacgttcaatcttgagccggcctcgcagcactttagcctgcgcatcggcgcctgctccaaattctcttgaaacatcattggtttcggcacgatcagaccctcgccatcgtttccagccaacgaagtcgatgagagcctaaaggtgaatagaatgaatcgattgagaagaatgatcagtgctcttgatagtcgtatgcaacaaagacccagatcgaagaggacaaaactcacttgcatgcaaccccattcaacaatttttcgttcaagccattttagcgagactggtttggtaaggaagtcattacaccctgctgctagggcggacactcgatcactttggagcgacgaggcggtgagtgccacgataatgaccgacgatcggaagagagctgcagacgccttctccttcgagggcgagaaggttcgagctttttcagaagcgggtgtgctcgggaacacgccgatgttgttcaacttctctaggcgtcgaatctctcgagttgcctcaataccatccatcacaggaagttgaatatccatctacaagtcacaacagaagaaagataatacaacagtaaggaatgtgtccaagatccctgtcttaattcattgttgatatagaaaagacctaccaagattagatggaaaccacctgagctccatttgtccactgcttctcgaccgttgttcgccaccccaaacttaatcttcttcttcttcatgaaagtcatcaagattgtttgattgataggattgtctgtttcccaaagaaaagaatgggccaggtcagatcatgatatgctactgagataaagacgtctatactgaccttcaacgatcaaaacattaattggaggcacaatcatcccatcgtccttgactgctttctttttacccttctccttgacggccttcttgataggtggcaccgatggactcaagactcctccagtttcgagagggggcgagacagataatgaaattggcggagtaaaatcagccgaagcttttctcgcctgctgactcggcaaaaccggtgcttcctccgtcgcgggcgttctaggtcggctggcattggaattccgatgcgagagcactccaggaagcgttgttccatcttgagaggtctttggccgaacaagccttgaatgagtaggtggtaccgaagctcctggcgaaacaacgcgatccagaggtgaggtctgtgactccaacccgggagattttctggagtgatgggatccagaatcccttctggagctcgagacaggaagtccactctcgatcgtactggctcgataagctcgatgagaggttggagagtattttgccaaactctctgctgagaccgagggagagaacgtcgcgatagcaggtcggttcgctccacttcgacgacgttccagactgtccttatcgcgcaaggtggacgatctggacctcccaccagaaggcactcgaggggatggatcgaagaacatgcccattgggaagccatctgggctttggattaacatgccggaccgagcggagtcaccgtatctgttggcggcgtcggccatcaggtcgataggacttgtgaagttcggaacaggaatactgaggtgtagtggctggggatgatcagcagctgaggacggaggaattccttctaaaacagtccctgtcgagactgttcgagggtgaataggtcgggtaaattctggaatctctcccattggtggcgaagtgaatgaaaggccgtgctgttttatgactggaggtggaacattagtagaagcaggtggaggagggggaggggggaagtatccgtagccggtaccgaaacttccagaagggctgagtggcgaggtggcgattggcgtgaagaaagggtccacaatcggtcgatttacagcggtgtgaagagatgtcaagaatcgtctaggcccaaccggtttgggaatgaccatcacctccggtaacgaccgggtcgatcctggagagagtaaagattgtatggcatctctgacttgcgaatagttcgaaagactggtaaaatggatgatgatgactcctcgttttccagagggaggtgaattactcgaagggcctagaatttgtcgaacagctggagacgatttggctcgactaccagccaaagtcggtcgtttgttcgatcgaattcgaagaggcaagttcaactgagtttgggcgcgaacctgaagaagtcgacgtcgaaggactgaaacgtcatcatctatagacatataggagaatagaataatatcagccatacgctttggccaagtctgtatatcaaggatttgaagaacctaccaatcataatgaagctgggagaactatcgtccgaggaacttgttgaggagaccattgaatctgccaggacatcgagacccagtccagacgttccctcagactgggacaaaggactggccatcgactcgaaaggagggttcgaaggggacccatcgccctgacccgagcctattccttgctgagctccataacctcctaggctagaattactgccaccataccctgaatcacctctgaaagtcgtgtcacggctcttccaacattccgcttcatccatttgttcgtctgatgcgatatgtctcatgtccattccccaagaggtcaggtagctggttagatgcttcgcgaatactgaggtctcgcttgcatgcaatgagacttttttgccacggagggtttcggcgaacacatgcagttccgataatgttggctcccgagcgagcttgaacgttgagaaaggttgacgaatggcttcctcctgctcggaaagcatcgccggctccccaacaggggatcctttatccatgaggagcgcaagctcaaacgttcgtctagttgatgttggatcagtttctacctgcaaagtagccgatatatgcttcagcatctttttggtgagcgaggaatccaaaacgggaagtggtggtagagcctgctgagggtgcttgtcagttgtatcggtatctaggggagtcagaccggggaaatacgtcttgcgtgaattgtcagtgctgacaaggggtgtcgagacatctttctcggtactaggagttcggattgggctttcctccttttttaacggtgatcgattgatgttgtgaatgatttcgaatgtgcagagcaaaggactatcctctgaaacaagatcgttcgaggcgtttgagtatagggatgaggtagatagtcgatgttcgagagtagcgaccgggacctcagtttcggagattgctgagtccgttcgtcgtcgtcgagagaggaaatcctggttcaacgggaagtcgattgctcgacatgacgacttctggggagtgacatgaaggccaatctcgatagcatccccaggctggcagactagaaagatttgtcgaatcacctgtgacataacgaacgacaccagtgagctcaatttgtttgagaaatcaaagttgaaaagaagggactcacatgcgacaacacgtagcaaacaccaccctcgtctcctttcacactgaagtgtttcatgcccacatctccatgaaacaacaccaagtcgatcccggcttgagctgctagtccgccaacgagatctcccacagactgaaccatctcccccacgtcaaagtcttggaacattgagactggttcggaactgagcgagttgaccgaaaccgacgagctgtttcttgagtcactcctcctagctgatccgctgattggcaaatgaggggcaggcgatcctggtgatagcttcaaagcctccagaagaggaatggaagaactcaagacatcgctgttactctctcctcccttgttggtgagccacgttcgtgaagattggctggacttgcttcgctctctttcgctcaatggatcttcctccgccatgctaaaagctttttgccctgggcttttggtgagggtctcatcggtacacaatggagcgatatgctctgacagatagtttaggttcttcatcgccgtcagaagactcgtgagactcgtcgctggaatttggactgaacaagcagagaactgctctttggccgagtcgaatagatgaatcggcgtcaactgaagaagtgtttggatagctgcctggatcgagtcggccaactcaagagaaagagtatatagtccggtttgttgaccctcagcaggaagagcaaacggaaactggccaggtattgaagcggatgagactgagcctgcagtagaagaggctggccgagagaggagatgatcatcagctggggagtaggcggtgactgacaacctacgaggcatgatgatgtgcgaatcactcttggaggttgagatgtttgagccctgagtcgtctgtctagttagagatggagaggctgggttgtttatatggaggtaggcttgaccggatccagaagttcttctgttgggatgagcaaggtttctaagcttattaggctggacgggtgcagaaaatgctctcagaaaaggaggaggtgatggaggcaataggccggaggaattaatactcggaatctcatcatcttcggcgtccgaggatgacagccgttgagacgaaggttcggtagacgagtatggacattgaagttgactgtgtggagcatgagctggaattattgttgttgaggccgaagagaacacaggacgatggagatcataactgtagataccagctgatgtacttgccctctgtctttcgtcgcctgtctggtcgtccggtgagctttcatcggccacttctccatcgtcccccagcatgctggcgttggccgaactgtcatctgacggtccatggcttaacccatttgtgttattcacatcttcttcgtcaggatcggacccaccgtcgttcgcaaaaggatcgtgagcgaacgagttgactccatcatcgaaaggatctcgaagggagatcggaggagtcgtgatagatgagacagtgtggtgaagggatgggtgaggcatatgagacattatggacgattggaagaggtccatcgagggagaaacaatgctacctatatggccaactggcagatgataggacggtgccggtgtgaaggtgtccacttgaggccattcgtgggtagatggcatctgggaagatcccggtatagaaggttccgaggcctgaggagataaaaagaagaagaaagcaaaaaggttttccaaaacagaagaaagaagagagaagagagagtgaggaattagtttatcattccatcctcttttcaaacgatgtagggggaaagaccagaaaggctcagggagcttgggaaaaagcacagtaaagaaatgaagaacagcgacaggggcaaggcaacgcccggccagagctgttgagaaagaaagacaacgatcctctcgagtattttgtacacattcgttcactgataaagagaactgtgaaggaagaaagaaagaaagaaagaaagaaagagtggaaggaagggacatatcaaggcgaaggaacgaatacttacaggccgctcggcatctgatgatccagcgatcgtagtcaatcgaggccttgtcagcgattgctgttgttgaaggttgttctcatcttcgctactgatgctggcaggggtgcctgtaggtgccggtgggtatcttccagttgggctgtgttgaactgacggtgtgtgctgggtatcgtgatgatgctcagagctgatggacatgttttgaaggttattggacagatgtgatttggaagacgagccaaggcccatgcgtaaaagagagagaagaacaggagggcaaagacctagaagcggtattatccaaaacaaaaaagagaggggaagaaggaaggtcaaaggaagacccaaagaaggaagtgaggaagaaaccaagaagccgagtcgaggtagagggtaaaaacggttgaaatggatggaacaagaatccggatttgttccggaaagaacaaacacaaaggcaaaccactcgaggggtctggccttctaaacactgcagactgccctttggagaaactgatgacggcgagatggacggcggatgtgtagctgaatcggattgagagatggctgaaggatgagggaacaacgaacaggacaccacacacgaggaaagaacgagggagagagcggactggggagacgcaggtcacattacgtaattttaatttaatttaataattttgcaccccgaccagactgatctgcgtgttgcttcgtctcggtctgatcctgtacatacatatgacattcacagatgacgacaaagtaatttctatctcttctctgttttcaagccgtcccggcaacctccaagacgccttcccagattcctttcaccaacttggctgctttgtcctcgcccgaaccttcgaccagggcggtcgtgagcgtggagaatacgacggtgttgatggtggatgtgtatgttcggaggtgatggacatactgattgacatacatgagagttcgtattcaggtatatcagtttcagtgccaaggtgtgtcaaaagagaaagcacagagagagaaagacaaaccaatcgacaaaactctcgccaccagccccactgtgaccaaacagtccagtcctcttccgtccatgaatctcgtccgttgaagcctcctttgctcaacaatcccgctagaccctgcttctcctcaccagctccagtctcaggcaagagtgaccggatgaaactctgaaccgcgctaacgagcaccgccttctgggtctgttgcagtgaggagagcgcggcaagcgccgagatcataccgttcgtctttttgacttctgtttgggtatcagatgattcgttagcacaagaagtgttagcgttcaagtcaagttactaatgaaaatcaaaaaaccctctagtgatacaacggactaaccaggccgagcgctttccccagtctcgtcctccatcgttgcatccatcgcccgagcccgccttccgccacttcgctcctcctcctcttcctccagcaagacgattttccgtctcaccccgacaactctgccgttcactttgtcgatcgccatcctcaacaaatcccatttctgcccactcatccactcctctccgtcctttcttgcaccctgagcttcatccacgccgaacacccaccgaacgacatcctctccacctataattccatactgcatcagcttgtcggtgatgatcaacctcatttgaccgctttctcgccagaaagatccgacgttctgaagcaactcggccttctcaaccgaggtgatcgatatcgcgcggagcacaggaaggtatcgctcagttgcattcaagaaatgcgagaaggatcgagcaccaatgaacaatagcgtttgcacagcaatcgatcgggtcaacgatgtcaaagggcccgcactcggttgaagagggaatccagaaaggtttgcgatcactgtctcaggaggcgttttggatcggaacattgactgaagagttgcggctgtgttgtggtgctcgtggtctaaggcaaagtgaataggacagttaagagaaagcatctgtttaacgctttccgttccagagtcgagcagaaactgtaaggccatcagaagatcaaagcctcaccttctttctcatactcgtaacagaatgcctcagaatcttcagcgatcacaccggcagtgaaatccctcattgcttcaggcaaggttcctttgattcgctcgtggtacgacaatcgaatctctagctcgaccacccgtcgaatgaatgacagcttgggatgaaggtgaggcgacgtgagatcgggaaccctatctcggaaataagagttgtaggttttcagcgcaaggtcgatgctttggaactgtttcatctcttaaaggctaaggatatatcactgaccagtctttccagagccactggaatccaaagttactcaggtgaacagctaaccaatctgcaaaccgcctagtgcattccacatccatcccggcatccaacgacgcgtagaattttcgaccggttttcccgacgggcggagccatggtaccgggactgaacttacagagttcaacgatcaaactcgtgtagtagagtgtctgatgtgggggtgaaggcagcgcgatgatcatcgaaattactgatgacgctaacagggactccaacgaccatgtcggtaccggagcatccggatcggagggcaaagccacagtcacattaggcggcggcttgaatgtcccagagttcaaccaatttggcaactcgagcaagattcgagcgcagtcctttcggttgatctcgtagatattgatgatatcatgaacaagctgtcgaaggatccaaccaggaggcgtggacggactaggcacgagttcaggctcgaaaatttcaagctcgcatgtagcccagccttcaagctttttttcgctcgaaccgggggtatcgcccacatcaacaagctcaggtggaaccatgacgagcggaagcgagtatgggccttgagggtcggttgctcgatctgggaagagcgcgtgtggtcgaggaaggaaccgagggaggacaaagttttccgctcggagttcgcccagcgccttgttcagatgcgtcaagatctatcatttatcatttttaagaacataaaagcaaccaggtatgggatcagattattgttcaaacaaacctgaggttcgaagaagaagatctgtaagaaaagcactcacgtcaacctcttcaggaatatccttcgcgtcctcaccatccaatactctagccccaaaaggtgagactagatctttcctcgtctgcctagtcatcacatacacctcaatagcagccaacatcgcgctcactccttcgggatcaatctcgttcaaaactgctcctccctgaggatagaagcgtaaacaacaccaaacgcaaagcagtcgtagatataatggatgatgataacaagcatgtcagtaaataagagagaaagatctgacgaatacaaaatataacagttgaatgaaccttgatgattccctcgccgacagcgatgatcacgcgctcagcccgcgcagggcttactccaagttcatccacaacagcgaggaagctttgaagaagtgcgaggaacgatacgggagtgacgtctcctgaaacagctagattagcaaatagatgaatctacagacgatttacatcatggttagtacgacaaaactgagaaagccgagtaaattctttgaacgaaccatgagtctagtctctctccatcgtcgaccatctacatcggatctgaaagtcttcacaagatcctctaggatgatcttcccaatcgagggtcctgatgacgctaccggtttttctgcctcatctctggcctctgagtgaccgccctcaatctcaactgggcaagctgccaataagctgatcagcgtcgcatagatcgcgatcttgaagggctgctcaacaattcttataatttcattgagttgaggaaaatagaatgttttgttcagattagagtggtgtaacttcaagtcggtaagcaaggattaaacaaaggatgaaccaacccggctctgaaaccctcgagaacggcttcagtagttgaaggaaattgacgctcaatcatattaaccaatctaggaagatcgtgtaaaggatcaaaatcgtcctgttagatttatccagaggacatcaagccccggagaacacgcatacgaagaaagaatagatcagcgcgatccaagagcacatatacgtcgtttagatgtcatcacgactcacagctcctccaacattcaggatctgcttgagaatcttttccgaagaagattccggaggaggttgagcatctctgggccgaggtccttggtggccctctgtccaaagccgagagaaaatccatattgatggattgatcgtgagacagaggttgcaacaagtgaagaaggagaataatcaaaacttaccataaggctgtcttctaggtcccctataaccacctccagcagctcctcctcctcgctgccagtttcctcctcgagagtttcctccagctgtctgccaggaagatgatggagactcttgccaactcatgattgtctgaatgggttgatcagtatgataatgatggatggagaacttgtagaatttcaagaaagaatatgcgatgaaataacatgaaaaattcgatattcagcttccatcaaagccagccgattttactgttagggttatttcctctggtaccgccaagattctacttgtgttatttctgtccgctcttacctcttcgtcccctctatcaagctatttactgaatcccgtaccagatcattggcccctgcctccgacctcaatattgtgttcacttacacctataccttcatataatgtagagtctgcacctggtttgacatctatgtcagtgtatccaccagtaatcagttgaaaattaattaaagtctatgatgcaagttcttcctctagttgctatcaatcagcagcgtgcacttagtcttttctgtcccgttgccttttctggacccttgggctctttggtctttctcgaatcttttctcgagtgtggatctgattcgttttatttgatcttctcagccaaaggcgtctttaacagagacctgttcgttcttgatcaacaatccaagggatcctaaggctttctgaatcttggaataccatctcaagggtattcattccactactagagggttgagccgttactggctggcaattcgttaccttgaatttaacgatgagagcagatgatatacagagaaaccagcatctcaatgtgatatagataacgtagggtgaaatgattgagcgacgggcatgtataattatttagcacaagacaatatgcggaagatactatctaatgaataggcgagaattgtgtccttcccttctattagattggatgagtatcgatctataaaggtcatcaaacgaccattcgacattatagccgttcctcgccaacctcgttccatccttccctctcacatcacaagaggaagagacaaatttcaggtaggagtgtagaagaggaaaaattcgagaagtcttctttttgtttccttcagtaccagctgaaagaaacaatggcgaagcgttggcctttttcagtcctttataacatgttcagaccaggattcggtgcgaatgtttatcttatcttatccatcctaaaccgtctcaatctagcccctgttcacgtcttgttcgtttaagtcatcctttctgactatctcctctcgaatcatgctgatatgatatctctcagacgctgtatgtatgcacaagaactgatcggaagaaacaacaaggaaaggaaccgagcgatctatctgtttaatatctgtcaattcgagctctggtctcaaactctctcattattagtcggatacctaatgagcgttcgtttctctcgcttttatcattcccggtctccgatttctaatgactgttctacttctcgtttccgtgatgtagtactgaatgttatgaccgctcccatagcatctcttccttgctctattgtcccttcaaataagtcattccccttattcaaagaaaagtatagaattattgttaataacaaggcatacatccctttgtagagtatacgccttgtgataagatgaaatggctcaaagtgcgctaaaaactcatatattatcatggattgtcagatatccaagctgatacaagtagtcaaagacagaaattatcacttaaccttcaacgttatcaagtacagatcatctcgtttttccaattgcgacaaccggatgtctctaagatagattccggaagtaataagctttttacacatggaacactcttagatatcaatgcaggtgagaaaaaggcaggagaaatttttagacgatattcctagcttttgcaacgagagcaacccgtcctggatgttgatcagtatacacagaaaaggttttcttaattcaaggttacacctcttgctcgtgatatattcatgccaaccatcagagatcgactgactcttggtcaacttagtccatcggaaccttcaagatatgtagcaaactgcagttacatttgaaagggcagttaggcagatacggagctcgccgtttcatctgcttctcgttgatgacgacagcgataatagtatcatgtacgacataagccacgatacatatagacgagaaaagtgcggccatagcttcggagagaacctatgatgaactgtcctatatctattcccagatgagtagaatcgtgagatgtaacaaatgtaaggtgagcccgatggagaagagacgaatgagtttgcctgttttggcgctcttacgtaactatccttgacactatccctctttttacttcctttcatcatcgtcactctaccttctatctttcactcttacacccttcatcatctatacaactactttctctctgcttaactttcattgctcatcatgggacaagcaggatcagtcaaccaggcattcacaggtccgtatccactttcttggaagcttttcaccccgcttggagcgtgcttgaatgttgtttgcctctaatgcctcttgtctgttccttatgacatctttctgaattgacaatatataacatacgaattatataaagagatggagcggtcgtcaaattgttcgactatttcttcaaatttcttgcgtgcagctctgtttctgatcattgcactacctgtcttgtttcccatctttcacgacgacatcataatcagtctcggcccaggagctccaacgtcttaagaagaggtttatgaagcttgatagggatgggtctggttctattgacaaggacgagtttctacagatccctcaaatcgcgacaaatccgctatcaagtaggatgattgccatcttcgatgaagagtgagttccacagttccacaattcatatatgaagaatattgaaaccatcatcacaaaggaacggcggactataagcgtcaaggtatccttaatcagaggctgatacctacatatcttgggtcttgtttgacttcttgttcgcgatcttagtggaggagggaccgtagactttcaggaatttgtcggtggactatcagccttcagcagcaaaggagctcgagaggagaagctcaaatgtaagggcccttcttgtcttaacagtggtcacttacagctgcgatccatcctttgaaactgaccttgtccgtcctaattgtatctttgatgacggtcggtgctttcagtcgcgttcaaggtgtacgatatggatagagacggatttatttctaatggagagctcttcctagtgttgaagatgatggttggctcgaatctcaaggttcgtatcgtcgattcttcattcaagcactgttcacatccactctgtctactgaccgactttgagctatgctctttgttgcttcttgatcgacataggatcagcaattacagcagatagtagataagacgatcatggaggccgataaggatgggtaagcgattatgcgcatatcattttcggctttggtgactcaatcttctgtctttatttaaaatgtgtagagatggcaaaatcaactttgaggagtttacagcaatggttgaaaacacagtaagagccgttttatccgacctacttgccagttggcaacttccgctaatgacttcacatcaaccacctcctcgtttttttgtcgatttcctttctaggatgtaagtctcctgccacttgctcttctcaaagatttttgcgacttattcaacctttctattgcctaaaaacagctcatgaagcaaatgactatcgaagatctcttttgagggtacacatatgcaaatatatgcatacgttccctgacgctcttttgttcctgactacctcatactcttctacatctacgttcttattctttctcgtgccgtcttgtcatctcccaacccctcggccttacacctctgtcatcacagacacgcatatcttttctctattctcgtcttctttctcttccttgtataggtaccgaatgccttcttcgttttgtgtgtttatcctcttttgctccaagactcagaggcattggttataccctcttctatttatgtctctttggcctgtccttatgaacgagattgatgtcgattgagtagggatgggatggctcaaatggacgtaaccaggccggtgactgcgcgtacctagcttgttacccgttgcgatcatcatttcgttcggccatctttgatccacaccatctttccagcccataacaatcatccatctgatccttcatcttcttttgtcttgtacacttattcccatttgcatcatctcaccatggcactcccatcggcagcttctgttcaacaaccttatgacacccgggtaattgacctcccagaaggcaaaggacgtgggtttcagcttccttatcgttcctttcaacacttcatccttatttcgcatttggctttagtttatatgcttgaaaacaagttcattcgacatactcatcttcattatttgatttctatgcttctgcttctaatgttccacgtaaatctctgggcatgggttcatggatttaggtatcttgtgtatcgccgatattaggggagatatcgaacagtacgtctctgatcgcacgtgtcttcaccatctctttttcgtcctccaatcggaactttgcgaggctcgcctgtcgagattgactaggctgaccgttttctgtacttgacgccgtcggtatcattgcggtggttgtggttgccatcaacagactcaatcggcttgtcagagaaacagaagcagtcgcgtgtatccataccggagactttggattctttgaagcatctagtctagatcggatagccgacaagtgggtttctacatccatttttctttctacgtccctttgattgatacgtgctcaacgtgatgcatgtttgacttctaattcacctccgctcgatggttgaagaactctcaagcatctcatcacctactcacctacgatctctccgtccctccgaaaccgactattattacccaacatacaacgagccaactccctttctcttctcgcgccttcagaatctcagttccatctctcacagttcccccaactgctaggaagctcgccgagacttaagttgctggtccctacatttgtgagtgatcagaatttttatatacatcacgttcacgcggtgtgatgtgtagacaaggaggaccgaagctgacttcaaactcaattttttataactcatgtttcaggttatctacggagcgtgcgaagatgtccgtatcattgagaaattccggacgaaggaacaccaagttgacaacctgactgtcttggacgaggctacaacccgggttttagaggtcggaggagttcgactaagactcttcgggttggggggcgcagtggtaatgccaaagatgtttgataatggttcatacattttccggtttgattcacaagcgcatacaacatgatttacccaaagtcactaaattttactgtctgaaccttttgtacaaatcaggtgagggtagcgctactattgctggtggaggaggaaccatgtggacaacagctctccagatcggggagctgatcgatactgctcaaagagtatgctgcacggtacttcttctagcacgcgtcaagcaatctactcagttgacacgtcctctctctcatatcgaataggtctacgatccttccgaaacacgactgctcatcacacactcctctatgggccgagaaccagtgctatccttgctggctctggctctgaaagcggatcttactgttagcgggggtttacacttccgatatggagcgagtttcaacgaattcagtgtccaggacgaaggaggagggaattggtgggcaaaggttcagaggggtaaaacggccttctcagcagtatacgatcagattcgaacacaggtcgaagaggtcatcgagtgagtctacttctcttgcgcgctcggactttaagtaaaattcgtcggatattgaccgtacacctgttcttatgaagctcggaacagaaagtcttcctagataaaaccttagcagcattgaatcgatctcctccgtccacagggagtggaactggtgctgaggaagcttcatggaaaaatacttggagttggaatctaactgactccacgtacggtcaccttctattggatatcaaagagggtcgtgtatcggccgagctgaagagtcaaggtgtgtcttctctcttatatgtgtcaataggcgcgtaaatactgatccttggtatacgatcttcaaaacattcgcataggcttcaattttgctcatcggaaagcttctcagcatagcattaaaccatctaatgtttctaaagcaacaacgaacgcatctagttcctcgtcttctatggcttcagcggtgaactctgtccctgtctggaaaggtcctaaaacagcttctgcagcgggaacgaatgggccctcccaatcaacctccaacaaactttcgtcgtcttccgcatctgcttcaactctgtcgacacccgtgacatccctgtcaacccaactgccctcaaccaatactaatactaccagcagcaccacgaacaagagtgcgcccaacggcgtctcaccgtcttcggaatctaacaaggcggaccagcctccaccctctctctcgacgacatcgcctctggctactcctgtcggggaggcgccgccaggtggaacgacatttaagcctaggagcccgcatacgctatacatcagtcagatggtgccccctgtgagcgaagcagagctcaaggagttctttggagacgcctcggagggaatcgtttcggtcaagcttatcatggacaaggagacaggagctcagcgacattttgcttatgttggagttagttcccactttcttttaacgtcaccctgtcttctacctgtatttttcctttcctgagatacggcttgactaaacaagaatgatacatttgactgaatcgaccagtttgctgacgcggctaccatggagaagggcctgtcgtcccatgcaacaactctcaagacagctacgcctaatgttgccatatctaagcctcccagctctggagagttttcaggttacagccgggggcggggcggccgtggaagaggaggtagaggagatcatagcggtggaggatccagaggacgaggggctagatcgtcattcaacaatggccaaagagggtcagaggaaggaggggcggcgcgggcggattagaaaacgaactagattgcaaagtagataggaatgcacgttgtatatcgtcgtagttatccgatctgtatcctgtttatcgcggttaattccgctcaagttccggcacacctttgtcttctgacaacaactcttcgttttacacgtgtgaccgtcgtctcgaactcttttggtgcaattcttggttacagtagagaagacctctctgtcaaaggctggtaaatatcagaaagacaacatggtatcacaagactctcgaacggctggtatcaatctatcaaacggttttaattatcttcatcgtcgataactctgtcgtccacagatgtcttcgcagcccattcatcccaaagagatttgagtggctcttccgagtccgaatcgagaaggccagagtcccaagtatcttgatcctcggacgccgaagatgtagagtttgagatagagttggaaggaaaaagagattcatctagaggctgagacgaattttcaagattctcgtcctcatcttcgtcctcgccatcatcgtcgtcgtcttcttcctcgtcgttttcctcatccttgtattcttcgtcttcttcatcgtcggcctaatcagattcgtttttatacaaaagaagtagatcggggtacaaagatgttaggaacaatgaggagaaactgaatggcaacggaaacatacatgaacggtctcatcatcttcaacttgctcgtcctgaacttcttccttttcatctccttcatcaacctcattgtctacttcctccattgatggatcctcttgttccatctcccaattttgtagagtccgctcgatgtcattctgtctagccgatccactggctgttggggcggtggcatctgctatagctgcctctacctgagcctctgcttcgtaaagaccttggaagaaggatgcctcgtatctgtcgtgttgatcggatgagatactgccctcaccgagagcccaaagagagtcacaaacgtattgagtggcaaagccgagccgggaaccgttcgtttgagcgaagaatttggcagtttctgtaattcagtgagaagacaatgaaaagagacgaattatgtcagcattcaagacagttgaaaaaagatgtgatatagaacgtacggaacccatcagagtagcccttagcgatagcagcctcttcgaaagacatgacagtcgatgagtttgaggaagatattgttgagttggatttagaagtcttggacaaaggaagagtttctgatccatcatccacgcaatcagagccatccgctccttggtttggcttcccaagaatggcggcggcggtggtagcttcttcccgcagagctcgagctctgaactttcctggcggcagcttggaatctcggaacagagcctgtttggattgcacatctcttccatttagtatttgaaagataccaaaggcggtcttggtcaaggttcgcttcctcgattcgggagcttgaacaggctcctgaccaactttgtgtgcaaagctaagagtaagattggtgatgatgctggccagaggttgtattttgattgctttgatagcatcaacaagggatgacacaggggagagaatcgcaggcaaagagtctatcatgagattcccatcgacgaccgaagagtttttagcgccatcgatagattgagacgagtagcttcctgggaaactgaagaaggttgagggaagtgatttgccaacagcgttcttgaagcaccagtcttgatccgtatcgcagttttcggtcttgtagcctgcgcatatcaagaacgagcaaataagatcagagcacgtcttgcatgaaagcgcagacgatggactcactccagaatgcccatccagccgaggtattggcataagtagccatctgacccgtcgtataagcttgtcgagcgccgactggattggtttcttttgctagagaagcctgactaagagctgctgaccattctccaattatcatattgttccgagtcgagagagaggccgtgtttaaagaggtcgatagtgtgttttttatctttccggtcagatcagtggtcgattcatttgggtcttgaggcgcgaacacaaaatactgatgatggtcgacgacgacgaagtcaggtcgctttgcgacaaaatctgcgaatttaggcagatcaaaagcatcgtgaatgctgtatacacggacaaacagaacgtgttaataaaatatctgattttatccttttgaagactatacgtactagaacgggaaagaagaggcggctggagagatctttcgaagctcgtcgagagcccgtgtatctttacaaagggtaatcatgatcgtcagcacgtgtcctaaaaccatgagaagtgaattcgtacttacagaagtctggaagacgcccatcattggagggttcgttcaaaatttgaattcctacaacgttcgtcacgttgacgagctgctctgtcaggaatgtcagagcgcagatagtggaatcttggtcatctttagagtcgaaaaatccgataacaccatcggccagtccagagtgtgcttgtccattctgagagccaggagctggtcatatcaacacatcaagacttgtcaacggctacactctttgagtggtttaagtagatggttggacatacccccatgcatatccacaaggacaccaagaccatatttggcagcccagttgatggaccgaacgactcgcggccaagagttggcatataccgaagagaccttctcaaagggagtgttcttgacataatctgggccgagtgaccagtatccgatcggtagtctgactgtgttgatacctagatataaatgcatagcagatagtatcaaaaagtgaactgaatataaagcagcggaggctgaactcgatgacgaaccaatcttttgaagatgagcaaaatcatcctcagtgatccactcgtcccaatgtctctctaaagtatattgagcgctcatagtgtttccatcaaatccggtagcgacatctagctcggcggatttgtttcctgaagcacaagcaaacagactgggattcatccaggcctcttgcgcaaacctgaagcagaagaccaatgaatgaaaagtttcagaatttcattctcgaaaggctatatcagtttagctagataaacacaccaagagcccagattgacgctttgttgttgtctatatctgtagacactcgatactgcctggtcaaaaggcgcgaattcctccagggaaaccacgctcttctcatacgcctagatatccagcccgacaaaacatgtttgaaaacaattaaccataccgttcgtcgagtgttttcgtcggaaaacagatgtactaacgtctacagcagaacaattggcagtccgataaccgatcccgagacctccgtcagccgagaggatgtcacctatgagaggaacaggcttcatgatagaagctactagacccatggccgagaggacagagctcaacgagaaagaagaggagagactcattgtttttttgctgatgagtttgttgacgaagaagaaagggggtaagagcaccgagaaagcaggggttaaagattggaaagcgggaagagaaaaaggataaagtgagactaggtcttggatggaaaggagtgaaggtatatgtgggggattataaggagaaaaagaacgtgaacgacggaaccagccgaagttgagaggaaaggaggggaggggatgaacgaaggaataagtgaaggtgatgaagagaaagaaaacaggatcaacattgctgaacttctggcttttaagacaactcaagtttcaatcagaagaacgtccctgagaagaactaagcgcgttcctttgttgatatgtgttttcattcggatgacgataccaagcctctgaccaaacaggtccggaacgaatgtgtaaaatcataacgatcgttcacagcatcgagagtggatactcgcaagatcagtttctgggttaataacgatatcaacatgagtgacaatgggtggtgtgaaacttgggaagacgagtctcgttgttagcttcggaacacagcatgcgggtcagtgaatcattcaaccctccgatcaacatactctcagcgcctacgggttcaatcatctttgtatccaattcaggcttcagatccagcataaatcccggcaacaatctgttcccgcgatcattctaaccacaagatgaaggtggctctcgacccctttattccttcgagctaagaccacgaatacatgctcgtttcctgaatgtccggccgtgtttcatgattcttgacgcgcacgttgagttcgagataataatgatatccgaagcttgagggaaagagaagagtaggtccagataggcgatagtccagccgacaggtaaagagcgaagagctcttcgcgtcgaggaggtccggagagattcacctccttctgttaagcttgaaatattccgattcttcacacctcgaatttatctgttgaaaccgaaactgttcatccggtcgcttctatcaggtgcgattcagatcactcgagaagaacaaaagcttgatgtcaactcactgactcaaagccgtcgacgtcctaccgtgtagaaatctccagatgtcctgtgagaatctttcatcaactcgatcccatgtaccgtatcatcctccgtttcttttttgtattcctctttctctttcccttctttcttcccgtcaaacaaaattattctctttccccatccgggttcgatatttccaaaatcttcattggcctgttccaaaagctctctgaccttctcgctccttatccctctcacaaccttcacaagctcggcgacttcatcagcagagcaagatggatatggtaagcctgaaagcttatggagtttatgaagagtctcctccggtaacagactggtttcgaaagaactggcgaggagatcattgatcgagtaagagccggtcagagggatacaatcagagtcgactgaatggttagattcgtgagaacgttgaaagaccgctttggagttgaaacgggatgaaacaataatccttggtaacagacaggagcgagatgaagcaaggcgggctaacatctgagcgagatatacgttcggatagtcctttcgagaatgatggtctgtagtaggtaatgcttcaaatgagagaagttgatccacgtggggattcaaccctaacgtttttacttagtggccaacatattaactcttcagccaggtcttcagaacaaccctcaagcgcaggggttcatagataactcagattatgatacatacataaatgaaaaagacagaacaagaggacgagataaacaaaaacaaaagaaggaggcaagtatggaaggaaggaagattaggcttatgtacttctagtccaacgtaccactaatatcaagtaatccgatgagatataaaccatgatacaggtgagaccttattctttttggcatgtcgagaggatcatggaaaaaaagatttactcacataaatgtcggttcgattcgcctcttcttcttcgcagcaccttccgccaccggcttatcagccaaacgctcccttggcgcacctacctctacgcctattcctaatcctataggtccttgtgtcgagggagaatcagatacgtctgtcaacagagacgataggtttctctggccgtcttcctctgctgatcgtttgagtgtccctccatttgcagcgctcgtttccgaggggttttcctctgtctcctttgcatccatgatcagcaggtcttccatcaccacttcttgagcggctggcaggggcactggggcagacaaagatacaggtgccgcaaacgaaaccagcgggacgggtgcgctgtgagtgagggctggggagggaggcagtgagacagagtgggagcttgatgtcgaaagtgtagcggccaaagcctgaagctgtttttggtgctgctgggttgggtgaatcactccgagctctccaggatcgaaaaccttatgaggaaaagagataaagaatgacagatcatgtcagacaaaataaagaaacggaacagcgagattggatctatcacatacgacaacagagcagtatccatctaacgaagataagatcaacgactgtccatccggagacctggttgacaaacataccgtatccaaacattagctagaatacttacatgatacatagattgagaagaagacaaagaaaatcaaccgagaacgaaccaagccagatcggtgaacccagagtaatgcaatcctttgaagatagctaggggagaagtctgctgcgtatcatagagcaatacagcgtcctgggttgcgaccgcaaagtacatcctgtacggtaaactaaacacagcgggcgacattgagcctgtagggggcgggccgacagtattgatttcagacacttcactccctcctccagctatacccgatgataggtgcgatggctccgatccttctgccaactcatctaatcctccttcatccagttctccagacggaaggtccttcaccacgtcaacgttatcgactgttcccagatgaacagtaatatcctgttcgctatgttcgtccaccacgattgtcttcggttccctagtcccagtcccatcgttgaatgtattcaagtcgtaaagcactggactaaacttgacggcgatactggctgttttctgacctgggagatgagcgatcggtgcgttcgacagattggccctcgaatatatgtatactgtcggtctcgaacctgtctctcctaccgcagggcgtcttgctttagaagaaggcacagcagagtcgccggtagcagacgagacagaaggtgagggcgagggtggaaatgatagaagttggctttggatctggccagctggtgtgaggaggagtgcaccgtctggcgagaaagacagtcgtcggaaatagttggtaaatgactcatccccgaaaagcgtgttggatataccttgccttggagtaggggtagaggtagatggaccggagcctccagtcaccgttgctgtcggtccgccactgcctcctggtcggactgccggaagaggggagggagaccgaccgtatctcggcatacctccattcatcctctccatggcagaatacatagggggtggggaagcggccacagaacttgagaaagaatctcgacatgaaggaggtttcattgaggcgttcgctagaggagtgcccggttgggaaattgtactcgaaggcgtaggcgggccaggaagactgggtgcactcgagaatgtagcagccatgacggcggtcgtatcggtggtggtgttaatagcagtagatatttcattacatccatactcagacccctctgtgtcggacacagcagtggagcctcttcgatgaaagtttgggcgagtggatgaggatgacgaagaggagaaggagggtgttcgagaatggtgaacatccatcttctgagtccggctgtatggatgaaactccaatccgttctttgtttgttggatccgatggatatgaaccgttctacagatataggacaaacgattaattctcgttcttctcccctacatgctataaagcggatgtcaaatagactcacctgtcgctgctttgagttgctatgtattcgttcaaaggatcccacgctacaccctggacgtagtgagaatgctcggcgatcaccttgatgcagctccctgttcacatacgaatcagcacgtattgatacgttctgtatgatgagattaagactcgatttgaatcaagacataccagtagtggcatcataaatctttgcgctgttgtcagtgcagccgacgatgaaatgagacccatcgggactccaagcgagatcatagatctccttagaggtaaccctatatcaaggatattggaagagcagtgacagtcgaatgtgacagtcaggaacagtctcgatttcttcctctcagacgggggccagcctatgcagtagacaaacctgatctctaacttccgcttccagaactccttttggccaacctccattccaggagtctctccaaagatggttggcacagctgtgtcgtttcctacgtttgtcttaggaacccagaggagcacaactccatctgagcaaaatcaagtaagaggagtatgtttcagtccaagatcgttcaacatcaatatatagccgtataaacttgctcaaagatctcattcagttcttgtatgcgtaaccatagaaataacttaccatcgcctgccgacgcaaggatctcctctatagttagccaccagaatgttttaattgacacagattgatcaaaagaacaagtttcaatatgctacaatcttattcccttcaggaacgctagaaatgaaagctacagacctttaggactccatcggaccacgttaacagcggcgctgtgtctctgcagggtcgctaagaactcggctcgaggaggcgggaaggttgctgagccagacgtatgctgtagcgtagagctcgagttgattagcgaagcatcagggatgttgggatgaatgagccagagctagacatgttgataaacaaagcacggccaatggtgaattatcggttcgcttgatcatcatggaaagtaaatgtactaactcgaacgtggttatcggctcctgcagtagcgagcttgtagcttcttccaccagcaacaacctgttctttttctttctgtttcccgtttgactgagccgagtttgcactgatgaatcgtttgaattgctgaggtgggaaaggttgaaagtcggaagagtagatggcgttaagatcgtgccatctgatctcgattgttttggatcgcattggttgttatagacggtcctatgcgcggatgagtgtttgtgtgaactatatatgtatatatgagggtgatcagagagatggatgacgatacaaagagtcaagaatgctgttccggatgagaaggaagaaagagagaaggaggtgaaattggttgacttatagaggaacgatccactcaactctcaaccatctctcaaatctaacgtctctgtaagaatgatcgctttttcttggttgatcttctctatgcgaataggtgtagatctcatctgattgtcatgtatcatcctcgctgatctgtttatatccatgaacagacctattgaaaaccatggctcctactgctgattcacttcccaaggcctacacggcccaaggtgctggactccgagtctgtatccttcgagcccgatggaacgatgccatcattcaggctctcgtcaaaggatgcagagacagacttcttgctgccggggttaaagaggaggacattgtcgaggagactgttcctggaagctacgaactcccttttgctgctaaggcgtgagttctttcctatttttttccttttatcatctaaagaaacacagatagatgactcgtcttgatggatctgtagcatcatcaatggatctaacactctttcgcccacgacccttcttggcggagcaaccgatctcctgacctctggatcgagcacctctctctcctcgctcatcaacccgtcgaccccttcagcctcacccaagccgactaagccttatgatgttctgattgccatcggtgtgctggttaagggctcgaccatgcatttcgaatacattgccgagtctgtctcgcacggactgatgaacgtccagattgagactggaacgcccgtcgtgttcggtgtgttgacctgtttgacggacgagcaagcattccaaagagcgggaatcagcaccgagaatgttgacaagaaccacaaccatggggatgtaagccaattgagttcttctggctgaattcttatttctaggtgcatccatatctttctgtgcttcctactaaactttggactgtttcctcttgcttgctctaccaggactggggaaatgcagcagtggaacttgctttcaagagctcgcagtggaagactggccgggtcgtcggcgtctaaaaactcgctttccccgcttcctatagacatgctcatttgatttctcatactcctgaaagggatgggattgaacagttcgttgaactgttgctgggtcacacctggtttctttgacccaggctatacttggccaggatttggccaaaccaggcgtgcgtgatggtatacacgtacagggtcgatcgggtgattaaccggcatgtgtgtatgcatatgtttcacttatttttctagctatgcttccattctctcctttcctatccgactgggcggtgacctaaccaggctctcctcaatatgaaggatcacccgctgcctccctcttgttctgtttgtctctattcttcaccctttactcttcagactgactaagtgttggcgtatggactccgtgcatcctcttactaaccgagttgcgtccaaccacttacactgacgtctccctcaaactgtaccccagccaatgtgcacattttcctcatgcttgatacctcatacctccaagattgactgagtatgtcttttctgtctccagacccctccgatttgggtttaaaaggatggcctcttcatgcattcgttgttcttcattctcccctcatcctctcttctcttccctgccttcaacactctcactctcgctctcactcacattctctctcgattaacagtttactactcttctctgtatcatgctctttcctgccgcctttaccgtagcttgtctggctttggtgaatacccttgtcgatgcttcacctaccgtaacgtcgagttcgagcttcattcatgcgcctcgatctgaggtagaggctcaccagaagaagtccagtcgaatgattcctcttcccagatggttgcaagaccccaaggaggctagttcttacttacctagggacaaagttgtccgaagggcaggtgagcgaccgtgctctattcgcttttgtatatagctgtatcaccttgagatacatgtcacgctaatcacggggtttctatcctgggaacttgcttttgatctttttctcggatgttggaacaagctgcccaaccctcggtctccgctgttccgaagacctacaagggacagatttatgttgactttgtcgataagagttccactgataagtctggttatctttcgtcatacttggacacctttggtaggtctcgatgactcaacctcacaccaaagctttgtgctgatggctagtgtctgggttctcatcatcaggccaatatggtacgattgtcgacaacaagaccactcctctcatagttgacttcaagtaatatgcaattccttttattctgttcagttttgatcgagtgctgagacgtggcttctttggtctgtatgcagatacgggaagaacgagtctaccaacatcgagatcaagaacggcgaaaaagattacactgatcttggttcgtttcgacctcagatgtttggcttcttctatctccagttcacggcgcttattcattttctttctacttcttctgtaggtttggttttggcttatggcttaaagggagcagactttggtcccaagaatcccaagcacgtctctccttttgtctttcaaactcgttctgattattacagactaaccgttactctctgttctcgattgatatctagcgttctggttttggctggagtatctcagcgaacggtccctatcaccggtggatctggagataccctcaagagcactgttgggttgtctactggattcaacctccctgctcaatcaaaagtttgggtgggtgataatgttgttttcaagaagtgtgaaggagacatcttgattccctactggatcgacttggctggtggtccgtttcccttttatctattctttttctcttgtggacaggccaatttcacgatctcacaaaacttctctttctatgtatacagaggccatcaaaggaaaactttactacgtcgagtttgatgacggggagaagcctaccatcatcgttaccagtatgttcaaatcttgcttctcattcttcctcaaataagtgacctttccaacaataatgctctatcttttctggttgaatcagccgatgtcaccctgcttcccaaggaccacgtcaaattcttcgagattgttagcccttttcctcttgatcatctcttctgccgaaagcctaagctgattgcaattcaccttcctcttcaaatccgcaggttctcctttatgtctccaagccggacgtctgctaccctaaggattacttctcaggtttgaattaagcttggaagcaagcattccatagcctatggacgacacgtatctgcttgatctgtctatatcgacttaatatatctctggtggatgaaacttttgcctcctttccgtctgttcgacctctttgtaactttctgtagatcatcttctgttgtgtgatcgtttgatgaccggacagttccctctttcctttatcttctcgttttctctcttgctcttcttactctgtcctttctcgttctccgtatgccttgtctcaagccttcagcgtacactgccctgtcggtggtatggtccgtgttgttctattctggcttgctgtgtatctgtctcttctccgctacctccttccccctccgacctgtatttcctcttcagttgtctcaatgtattggtcaagaccgggccttcgctcttcttcactttccgtctcgacctctttttcatcataagaaagagagaaatgaacaattgagatgaataaactcgaagtaagatgagacgatacagaaaggttatagtaagcacgaaactcgatcgaggaacgatggatggaagaaaggaagaaaagaatcaagggtggagaggaaaagagaggacacggagagaaaaaattggatatctgacaagacggaaagaagagttgggggaggggctatcgaaatagaagaggaggtgaatgagggacgtgaagaagggagaagggaaaggaagggcaagagagcgtccaaggaatggaagctgatctacgtcgaatcgaacccgaactgagaaccaaacccatacctgaaaagaaaccggacccgcaaagaaacaaaagaaacggcgacagaggagtttataaatggaaatgacagaaataacaccttcttgactatatctctctactttatacatcgacttccgacttggcatagaacagaagggagaagagaagaaaaagagaagaagggaaagcattgtccttctctgtctctcctatcatctcccggttcctgatcccccgatccatctacgtctctactccttgctctctccctcaacagccgccaaagtctcgtcctttccatcctcagccatggtctgatcctcaccactcgccggaattccatctacagcaaacgaaccttcggcaggcgcagaattggaaggagccgttgtcgtctcggttcgtgatctacctgaacccccgttgttgtttgcccgaggagggttcgcgcaacgatcttttccgtatgagatcttgagggacgagtactctggtttctggcggatggctttgtgagagagagagagagcgcgcgcgcgagatgtttccgaaaaaataaaaaccgagaactgcgtcagaacaagggaaaattgctatgaaacgttaaggaggaaaagaaagaagcaaaaagaacagaccttctagagctttgatggcgttctgaagagacgtgaagttgacgaatgtgcaccctttatctttgaggttattgataagctcgatcctaatttcgaggacagacgcggttcagagaatagaaatcagccgaccgcctaccttgcttgataacgaaagaacacgggaagggaaggatttgaacttactctccgtactccgagaagtccctacgcagtcgttcctccgagaatgcatcccaatccgtgatgtttccaacatctgatcggaccatatcgacgcgcccagataagccattaggatctccattcataccagatagacggacgaacagactattagaagagaacaaaaggaaaactaacagatgttccgactagctccagcctgaactgcagccagtgtaggtccgtttaacggtcccgagtgctttccccatccgaccttgagtcttctcgagttgatctgcagcccttggagagtcgcccactggaaaaacgaggcggcgctcgatggatcaacgaacgtcacgaactagtttattgtatgtcgagggtcatgtagttcatcagcatccttccagaacaacaagttgaatgtaaggagatatgaagagacacaacagtagtacttacagcaatgtgtttatcgggcatgtatcgaatcctatgatccacgaggaaaaacttcaaattcagtatcccaacggaggaagactgagacgagggaaggagaaaagtagaaaggacgcactgagcaatcattccacccctaatagcattacaaagctcctcggctgttgtttctgggtgaaggttacccatgtaaatctatggggagaatgtcctaggttaatcccggacgcactgtagaccaagaagtaatcatgaagagggagacgggaaacgaaccgtcctgtttccggcttgagaatgtagcaatcccaactgtccaacgtcgccaccctgtccaaatgcggcagctccaccggctccgacgccaatcggtccaaatccgggaggactaggaccaaacatgaatggcgagttgttgatgggcaggccgacggccgcttgggcgtgtgcctgggcggcttgaacagctgcctgctgagctttcggactgttcagacgaaaacgaatgtgtaggcaatgagttcgacggacaggttccatgagattaaaggaaacgcgcgagatggagactaacacgtaggcacatcgatcttttccgtagttaactcgcttgccctgccaggccggctcagtgggaagcgtgttgacgacctaagaaaagttcccatcaacccaatatgcgtgaattagtatacttcgcaaatctccgacggtgcacgaaaaaaccaagaaagatggaaaggcaagaccttaccttcatagcagtggcaatcgagaggaaatgaacaaagccgatgttcttatctctaacaatcttgacctgatcgatgggtccgaaccgtccgaggtcatccctgagcgagctctcgtccacgcttccctcgagtccaccgacgtagacgtttctggtagcctggctctgaacaatggccatagcgacctgacctggcagactgcttggcttaccccacccgatcttgagttcttgaccgtgaagggcgagcttcttgaccgaagcatcggcgtggaaagcagcggcggtggcaccatcgaggaacgagataaacacgcaagacttttcggggagtaatctgacgcattcgatcggaccgaatcgaacgaggttgagaagctcgtcgaccgaagcatctagagagcagggatgtaaaatagaacgttaatcatcagaagacaaatagagatggacgagcgaggacaaaccagcaggaaggcttccaacatagacggttcgacctgtttgattgttggcagcagcagctgatgatcggaaagaagggggtaaacagatgtcagactatgtttgtctccatatgagatctggtacaacaaccgaagacataccagcagcggcagcagcagcggcagccgggcctatccgaagttttcaagtccatcaatagaaagtttaaattagctatgctgcacgtgtgcgctctggcaccatggccatgaagttgagcggcgggacgaaccgtagtttccagtcatctgtacacatcgaccgagattttttccgaatgagtatctgtttgaagcttcatggggagaaaacaagataacgagacgaagagtaaactcacctgggctggattcattcctcctagtcttggctgcccaggctgaccattagcggctgctccgggtccaaacaccgggccaccattggacgcggctgccagtccattcgggttgacgccgacacccatgcctgcggccattccgaggatttgctgattctgttgttgttgaatggcctgaatctgggcctgcatttgctgttgtagctggagttgctgctgttgttgttgctgttgaacttgttgctgctgttggggaatggaagatggtccaaaagggcttaggccggatccagctaagccaacggaggatagcgaatcaaacgcaggaaaagaatgcggggcggagggagaggtagacatatgggaatattgttgttggtgaggatagagatgggtcgatggaatagagggtgaggtctggttggtccagcggggtttcttcgaatcttgattaagggtttgatcgagaagcgttctctgaagaacgtgatggaagagaatgtataggcttcagttttggttaaaatcaaggtatctcaaacttgaggatgagtttgagagagcaggcagttgaaccgcaaaaaagacatagcagaaacagagatggagatggacgtgcacagagagagaagggagaaacaggagaactctagacagaccttcatactatcgttgttgtcaaaacccggagcgtgggtcaggtggaaaccgtttcctccttgaaggccaacaggagtcgggtagacgtgttcaggcgagagttgagaagaaggtagcggtgatcgttggatgtgaaaagggttcatggtcggacaaacggtgtagattgtcggagatggaggaagaccaggttcgaacgcaaaagatggaaggagcagaatgagagagatggggagagaacgaagaagggaacgaaggcggacggaagaaacaacggccggatagtagatgtgttcacacgcacagaaagcaagaaaggagagaagggagaacaaaaaaaaaccgaagaatataagccaaacgaaaaggaagatcaaggagagaaggtcaagagaagaaagaagagaaggccgagaggtgagatggaaagcaaagacgacggcgacgaagacgatgacaacgacaacgacaacgacaacgacaacgacaacgacaacgggtgctgaagcgaagagacagagatgtctggaccaaggctgaaccgtgagaaggtgaaggagatctcggaaggattgagtaggagagatgtccaggctcggatgaccagcaggcagcgagtcgactgaccgatggataaagatgagggacaacggatgggcagatacacacagagcacagagaacagacacacagatatacacacacgcaaacgcagagcacactcccaaagagatcgcacagggagagcgatggaaccagatgaaaaagaagggagagatagaagagaagagagaaaaaaagggagagagaagaagaagaagatagagaagagaaaagaaacggatttcggagcaaaacgccttacaaagatttgaagggaacgagtacgaggatgtgcaagaagactcgctatccgacagagaacagtctacaaggataacgacttgctggtgttgaagacgaagggaaaggttcgacgagctcgatgaacgatggggtgtatccgatgggaaggaaactcgaccgctcgtccaggcggaaggcgagagaaaatcggtgagatggcgattggcaacggccgagcgtattggaatttctaatcgttctaatacgcgcccagtttgatttttgtagtcttttgctggcctgccgtccatctggtcgatagcatgcaatccgttgatcttggatggcatacctgtcctggtggtcaatctccggcctctttgtacgtatagatcgctcttcggaagatcctctgggtttgggtgttgtatttttcggcgtgtcttctctggccatcgcatggctcagccagaccatcacacaaagcctatctggcatttagatgtgtcagagattcggccatctgtaatatattttagacaaggcctacatcatggaaacccttttctttgcccttcttgctacaaaactctgtttgtcttgttcataccgttctcccaaccctgggaacgatgagaataacggacgaactctcagagatccaggcttgaccctgtggggacgcgaacgcgtcgagttcacatcacgcgctgagacgcgtcgtgcatctctcactctccgaggccacgtaggagtcttcatacacccagcaccaagctgatcagactcagaacacagtgtccgctcaaatgaacatgtatgagacgtgttctgcgcatctttcatgcttgttctgtctgggttgtggccggaagcttgactggttgatcacttacaactgagatcaacctatgtgattctgaccaatagtcttctttgtagttactgtattctttatagtctgtgtagtgaaccgttgtagtcctttcggtcaattgagatatctcaattcgactacaaacattttctgatcccaactaccgacaaatcctaatgattttttttgtctcagttcggattcgctccatctctcttttccgcctttttacatattcatctcccctcggacaacaccatttttgtctcatcttgtcgtacatccccattccgcgtctttttcccgtatacaagcacctcactaaatggatctcttctcgaggtccttcctcacaaacgccacggccgcttactcggctctccagggaaaccttgcggcgacacagacaccaaatgatactattacaaagctcgtcgaccggcttgcaaacgcaacactcgccgaagaccgtcgggccagtttgctcgccctaaaggcgcttgctagagatctcaaacaagacgttggcttccaggcattcgatcagatcaaacaagtcctcacttctcctgacgtccatcaagatattgagatcgccaaggcctgtcttgaaacactaaccctgctctgcgagtcggacgacgtgcaggccacggctgccgaccaccccaaccctccccagagatcggtatgctcttttacttctctatctagtataacccggttctctcgtgtttcttattttctttcatctgtctcatcttctgtcctcttctctcaacaccggtctgctattcaatccgttcacctgccctccctttctccctccctccttagcaaaatcaacaggatgtcggtctcgtcctgaccgtccaattcttggccgaaccagaaccgctccatgcgctccttgctctgctctccgttcaacacttctatgttcggttcttcactcttcaactcattcaggtccttctccagaacagtccggagaaagtccaagagtacgtgctcacctctcccggaggcgtccgaaccgtgatggagtgcctggaggaacgaagggaggtccttcgaaacgaagctcttcttcttcttcataatctcattgtcaccaacgctgaccttcagaagatcgtcgcgtttgaaggcgcgttcgagagactgtttgacattgtcgacaacgaaggtgggatcgaaggaggtgtcgtcgtccaagactgtctcgctgcgatcggcacattacttaggtttaacagttccaaccaggtttgtcctcatgtctctttcacgtgaaactgtctctggatcaacatatttggtggtctaatcacctctttcgtgcactctctctctctctctccctgcctcatcggcctttggctagaactatttccgagaactctcccagattgctcgccttccgcctctactcatgtttccttcgcccaatccttccctttcatccccagcgccagataactttgcgctccagttctggccggaacaaaagcttgtaaacgccagccttgtcgttggtctcgtcaaactcatcctcggctccggtggctccggcctcggaacaaatcagcttgcaatgctcaactcgggcatgactaggtgtttgatcgaattgggcatggcaagtaacgcgccgatcttgctcaaagctcaggtaaatacagatgaaattcctacgagagtctatatgcgtgcgtcctggaaggaagaagaaggcaactaaacttttgggttgtttcatcacgttcccttcttaggctttctccgcattgtctgccatccttcaccactcccctcccaaccaagcactgctctccgctctccggaccaccccattgctaacccttccgcctgaagatcctactcaatctgtcggctacaccagactctcccttcgaccggcgacgtctatcctgatctcactcgctatcaatggagaagaagacccggccgaagaagttggtctcactaccaccggcagcgtcggtggaggctggaaagggccagggttgaagctcagaaaagcagccgtggccgtctggacagcttatctcagcggagggcttgatggaagcagagacacaaaagaacagatcctccgcggtctacagaccgtcggatcccaacctcagacaactctcggtagtcaggatcttcccccacctccgaaagctgggagtgagtaccacgaacagacttccggagaggccaacgaggaagaggaagaatctgcagaatcattgttgttggccgctctgtccgaatttccggcggacggcgagttttacgatccgtaccgacctacgttcgcttcgttgatctggcaacggctgttgacaaactcggagatcgccaagaaggtcgcgagggagatctcgttctcttcaactccaccttctgagcgacctcccccgccaccgccctcggtgcaggcagctcaagaaaagactgacgatgaggatgaggacgatagagtcagcttggtccaggtggtcgtcggtaacttgatgatggctcttcgagaacacgccgaggctttgaacagggaggcagccgcacatgccgctgccagagctcacagtaaatcgaaatccagaccaatccatagaagattgtcctcgattggggatggagaatcggctgccaatggggacgatgccggggcgaacgatgcggcagcaaggaacggggccgagggcgaaaatcaggtaatgaaggccagagattgggatagggccatggtcggctggttgagtctgcttagcgtttggttgtgggatagtccgggtactgtcagagagttccttagtgaaggtgctagcgtccaggtcgtgcgttcattttttttttcaaatcgattgatacacccgagatcactgccaacccctttcttcttcctttttacatccctcccctctgtcttacagctcatccaaccgataactcaaccatcagggatcgatcccctccttcagggtctagcagcattcctccttggggtctgctatgaattcaatcgagacccgggcgagatcacccgatccacccttcatcctattcttcacggtagaatcggaccagatcagttcgtctcccgaatggctcggttccgggaggatcccaggtttagagctatcggtccgacagacagcgtggacgaggacgagatgctggttggtgtggaggtcgatacgtcagccgctgtaggcggcctcggattggaaaaagaagacataggtgattggtggttcgattgggaatttgttgaattttggaagaacaattactgtccgttgtttctcttctacttcttcttcctactatccttcatgtcttgctttctttcctttggagagtcttttggacccctgacagatcgtttccaatacattgaacagatacaattcagagatcaatcaactctgcgcctgaatcaggctcgaaacaaaatgagttagatgccgacacggccagtctcatcgcttcactccgaaaccaactgagtatccaacagaccgagctggcagatgctcaaaatgaattagctactgctcgaaaggagattgaacatgaggtgagaagatgatcttccaccttctctcttttccgcgctcatcattccttgctgacgagttatcccctacctctcacgcattcatagcgaacggtcacccaagaagagattgcctcgctatcgttatccgtctcaactctgactgcttctctccgtgctgcagatgagaagaacacagaaaacacgaaggaacaagaggatctcctcgtgctgttagaggagcttagtgtgaagaggaagaaggataaagagagattgaagactttaggcgagaccgtcagtgaggacgacgatgaggatgaggacgacgatgacgaggaggatttagatggagagcaggaagaggaagagtgatctgatgatccatctgtttcttggatgctctctatcgattgggcttctattatagattctgtaactatgtcctactctgaccacaaacggaagagagcacaagagatgtgcctgtagagacgcgtgttagatgacgcgtcgaaagcaaaatgacgcgcgacgcgacgggaaatcaaaggaaaataaagaaaaataaaatatagagaaactcgatcaacgcccaggacttatctctgtttgaactcctgacacaccgacaaccttcttgcttctaaaccgactcttatcataccttctaattggttttacaagatggacagtcagtacctttgttaagtttaacacctgatatatagtccgcttaactctttgaaccaccttctttcggacggacgttcgcctttcgtgcgcttcctcggttttgatgttgatgttgatgttgatgttgatgttgatgttgacgttgtcggcattgaagacattgggagtgatcttcctctagtaagtctctcttcttctggttcatcctcttttcaaaaagttttctatttggtacaaatcggacgcgctgtgctgatgtacaaagctgatgtggaacgcgattgtagctgcaagatgatctgacgaaagaccggatcagagtctttcaagagtttctcgaagatgaggttcgtcctttgttcttccctcttttctctatttcttttccttcgctgactctgaattatccactcgatcgatggaaaatttaagaacccaaattataattatcgagatgaagttctaaggatgcttaggttggaacaggtccgactgattgtcaatcttgacgatctacgagattacaaccgggagtacgcggatgggttcgttttactcctcatccctcttcgtgtctgccgtttaggaagacgcgtcttcaacaaaggaggtatcacgtataaacgcaaaaagcttacggtgtttgggtttgatagtcttttgatgcaaccctcggctttctcagcagcattcgatcaggcgttgctttcgctcgtccaggccgttcacgaccctctaaaagatgagatttctggaaaacaatgtatgtatatcaaacgaaactgacttcttgtccttaagatttttatattgaccctgtccgaaatacttttgtcttttttcagtctacgtcggtcttcgaggaagtttcggagagaaccacgtgaacccaaggacattaaggagtgctcagttgggcaaaatggtcagcttggaaggaatcgttacacggtgtaggtccttatcatttctgttgatctgaaggatctcttgttatgctctgtactgatcctaacaatcggtctgtccatgggcatatatcactacgtgtgtgcgcgtttccaggctctcttgtccgaccaaagatgcttcgttcgattcatttctgcgaagacacatccttgtttcacacccgaacctatcatgactccaccacccctggcgccccagccggtcaagcgtcttcagtgacaattcctaaagacgatggagatggtcatgccgtcacaatggagtacggtctctcaacctttagagatcatcagagtgtgagcattcaggagatgccggagagagcgccggcaggtcagttgccgaggagtgtagaagtcgtattagcagacgacatggttgacaagtgcaagcctggagatcggattcagttggtgggaatttacaaaagtatgggtggaggtggtggtaccagagggttcacgtacgtttccttcgttatagtcttctctcttcattttcgatgtaaatcttcatgggttctaatacaatctttccactccaatcttcagaacatctttgttagccaacaacgttatcctcctttcttccaagtctggaggtggtattgctcaaaccccaatcacggataccgatatccgacaaatcaacaagctctctcgaaagaagaatatctttgagcttctctcgcaatcgcttgcgccttcaatttacgggcacgactatatcaagaagtctattcttcttctacttctcggcggaatggagaagaatttggcgaacggaactcatattcgaggagacatcaacatcctgatggttggtgacccatcgacggcaaagagtcaaatgttgagatttgtgttgaatacagcgcctttggccatcgcaactaccggaagaggaagttccggtgttggtttgacagcagcagtgacaacggacaaggatactggtgagcatgctcctcctcactgttttgatcttcggtacaaacgtttctgaggacatcttgcaactcgtctgcgattcaggtgaacgacgacttgaggccggagccatggtcttggctgatcgaggagtggtttgtatcgacgagtttgacaagatgtcagacgtcgacagagtagccattcacgaggtgatggaacagcaaacagtgaccatcgctaaagcaggaattcatacatcactcaatgctagatgcagcgtggttgctgctgccaatcctatctatggacaagtaagcgctctttcatatttggcggtaaccagttcttgcactgtgcgcaaaagttgcccgggtttctgattcaatatatctgttccttcagtatgatgtgcacaaagaccctcacaggaacatcgcccttcctgattctcttctctctcgattcgatctgctgtttgttgtgacggatgatgtagatgaacagagagatcggatgatttcggagcacgttctcagaatgcatcgatacttgcagccgggagtcgaagaaggtcggtttctgatatatattctcgctccaattcttgaacactgacatttgagattatatctttcgtgtataggtacccccgcgatggataatctcgagcagcatctagatgtcggaggggagtatgaagaatctcgtttagaaactccagtatttgaaaaatactctgctctccttcatggaggagtcaccactacatccggccgagggtccaacaagaaaaaggaggtcctctcgatcgccttcgtcaaaaaatacattcagtacgcgaagaaccgaatcttacctgttctaacgaagggagcggcagatcacattgtctctgtctatgcgtcattgaggaacgatgacctagcgagcaacactaaacgagtaagatctcttcttgttcacagattgtatctgtttccataaattagagttagaagactcagactgaataattggctctggctgaaataatttgtagactgctcctctcaccgcccgaacgctcgagacactcatccgtctcgctaccgcccatgctaaagcccgactatctcagaaagttgaggagcgggacgccgtagccgccgaggagattcttcggttcgcgctcttcaaagaggttgtcaagcctgttaagaggaaaaagcgaaagctcgatcctgctgcgatggctgttgattccgattctgatgacgatgaggatgagtcaggagacgaaacaggtggaaggccaagagatggaaaaaggatggagcttcgtggatcaactcgacaagcttcggtaatacccgaaccctcaacatcatcgtcagtcgcgactcgggccgaggggagagaaacatcacctgcgaaggatgcggatcttgttagagaagaagacgaagaggatgaggttaatgtagatgaaatcatcgcagagaatgaggatgaagaagaagccttggcggaagcagaagctgctgaagagaaggctgccgctgtcgtcgcctcccagaagcaatcaccgatgagctcagcgaatgaatctcaggggggcgtggtgtctcctgaacggttcgtctccgccactttctctctttgatctccttttacattgaataggtatattaacaattggtcttatctatccatgcagactggcgctcttccgaagtcgactcggagcattattctccagtcaatacgctgatgaagagttcgtacaattcgacgatcttcttccggaactgaacaccggtctgccgccgagtgactcttttggaacgtctgaggccagagctatgattgatacaatggccaaggacaatgaagtgatgttttcgggagagtgagttctgtttttgagattcgattactctcctcgaattttgtttcgctctggaaaagacaactgatcgtgactttgaaatcttactctcatagcattgtatacaaaatctaaagcaactcactcatttcttccttgcgtctgcatccagttttctcccttcctctgatagctgttacccctttatgcctcgtgcattagataccttcctgttctgcttatctcttcttgattatactggttcagtcttctcatttgtatatttagtatcttcgatccttctctcttatgtgcagtgttattccatctttattccaaagccgaaggattagtgcaaagaagtatcaaacatatatatatatatatatcaatcgatcgatggctcgttacaaaaggaagatccgatatctatcagcaatattacattaaacgaaatcatttggaagaaacaatggcagtcgccgtcgccttcgccgtaggagatcctgctggtgcctcgatgaaccattcaaccgtgggcttcacctccaagggagaaaaaatcgcagtatcttcatcagatccgacaggaagtgtatctttgtccaatcgggtcgaattagaggacgccttattgacgcgcgcgataggagcggacatggacgattgtcgtgggtgtttggatttccgtttattgcacgctttggttgaccgttgaggatcttgagaagagacagttgcagattcagaggggataggcgagttatccattctctcgacgcctgttggggaaggataggacgattcgctagaatcaggcgtcgatgactcagaaggaaggggttcgaattcgtacggttgatcgctcgatgtaggcgagggtgtaggaggatcaactagagttgggttagcaacgacttcagtgaagttcaaaggggtgaaaactaggaccacagcgtcttgatcttctccaatgagagtctcggaagtgaccttcacatctcgtttcgagccttggctatgatacatcccgtcatcataagttggatcaggatggtacatcccatcgtcataaggctccgatgcatcagaatcagaatcagagtcggagtcggagggggttgaagagggagcttctggggagtccgtcggcaatattgtagagtttgagacaggactagccggaagaagatcaggcgatgtcgagttgaatatgtcagtcgagttgaatacatcagtcgagttaaacacatcagtcgaattgaataagtcagtcgagttggagatgttggtgaggtttggtaaatcaacagaatccgccagggacgtgctgttgttcgactgaatttcgaccctcgattggtctagcgtatcatccacccatttaggagaaactacacctgacatggtgttgtatgtgaacgtctggcatgacacatccgagttgggatctctacatttctcgaccgagatagatgtagatgcggctaaagattttggatcgaatgtcgcacagtaagcgacctaagaaataaccagcccatgatttgtttatgatgaaaccgatagtcagaatgtgttcagtttcggagtttcgataacatgcgctgagaaacgtaccgtatttgcagactgagcatcaaagataggaaacttgagaaacacttcgagaaccgactcatctgaattttctgaatgcagcgaagtagacggagatgagtttgacgtcaccaaatagactctagtccggattgtgttggaagcattgaggatgaaggaaggagacttttcgtcatcatcattgtccatagccgtcgtgttggatgctgaaagaacgatggacgcgactcgttctgaggcggaagattcagtcacaggcatctggatcgatcacacatcaaggatgttagcgcgaagcgggagtgaaagatgaattagtaaaagctcaaactcgtaccatgatgtcaatgaagcctgctgagccttcagacatccaactctgatctgtacgccttgacattcggattgacgccggagagtgacgaggactatcatcctgataagcagatgtcagtgtagtgtagaagatgtgaggaaaaaataagagaacgaactgagacggtttgagttgacacagcatcttgtcgaggtacaggaaccgctcgagcaagagataaaagcgcccagaatacgatagcaggatgcatatctggttaattgataaacgatggaagggtagaaagttcgattaaagagagtgattaaagagtgggttgattaaggaaggtaaagatcgagaggtccagcctgtcgagagaataaaaaaaataaaaaggaaaggatagatgatgagagaataacgaagagcttgaaagagaaggtatcggtcagcataacgctcttcttatatcgttccctgaagtcttcccgtcttttgagcctaagtaccccgaacttcagccaaacagcgggtagagataaaaggatgtgaacgttcagagcgggagaagactcgtcaatacgtcagtcatatccgcatttgagtttaacatcatcattatcatcgcctcttcccgtttttcagtgaaaatgcccgatgtaatggaaagaagtatcgaatcagtcagcagggtcctgctaaaattaagtgtatgaagcatggtcaagtctacgactcaaagtaagtgtatccaaagtttgataggttagtcgcttgggtgatagtaacaaaatgaacactggaggctgcatccgcattcgaatagcctgagaacctcgactgcgaactctgccgaaatcgcttgataaacgatgagatgccagccgctgcttttggccttcttcaaggcttttctcgtgtgggacatcgaccccggaatttgatctgaaactatgatatctctggccaataaaactatatcaatacacagacatacagaatcgattaaaggtaatcttcttcatcgcagaggctgtataacgcggcatgccattatatgttgagaaatacaatatttacaaagcaacagcaatcagatacacaattaggcacacagagaaggaaaacagtttaaaagacagatatagattcgtggtatctgaccgatattatagaatatggccttcgtaccaaaaaaaaaccagactgctgtgaaaggttgagacaaccgaggactactccactctaaaaagcttcccactatgggccaaaaacgttgcgcaaagctcaacttgtccttgaatctgttgctctaccattgacttcgtccccgatatcgatcctccttcgtcgctccccggtccctgagattcccctccagatattatctgacctgcttctttagccctctgagcgcgctctttaaggaggtctaatgcaaattgaacaggcacgtcgatcaaagggctgatcgccgctagacggagatgatgaagggatgagattgtttctagtgttgtcgagatggatgtcgttgccgaactagaacggtgggacagaagtgcaaaatgaatcaagattcgagagttgagctttgcgagccaggtacaaaggaagaaccacttacagagcaacttcgctggcgtggtcgtcgggcaaaatgctaggaggtaacagatcctccgaattcaagagagcactgccgaaccggaagaaaggaaatttccttcagtttgtcgtctgctcctcattgcacgattggaggatattgagacatgaaacaggaaatgaagcaaacacttacaagaccccttgaacccatgtttctaacaaaactttcttcccatacctcacgctttcaatcttctctctcttcccgcctgcctggctttggtccgtgctcaaactcaacataccaccttcagccttcatctctccccaaaagtcatagacccctttcaagacagcccctaccgtcttgctagcttcgttcggaacgtccgatcttgtctttgcagcgtgtaagattggtaagagcggagtgaggagggaaaggagatgagatatcgcttgaagtggatcctgcgcgggtgcaggatgtgaggctggaagaatgggaagaagtgtaatcggaaatatcgatggtcgacaatgtcggagggagagaagagttgagaggatgaaaagggaggcaatgagagatctggcgcgtggactagactcaaaattctattaagagacagccggttcagtaggcgatcccttataagagttttaaagacaaaccagggacgaactatcgagtatatttcaagattctctgctaatcgtagtgctagatcacaccagatccaagcgctctcgttgtcttctgaaaagctctcgctccctgttcgcgtaaagaaacaaacattccgaccaaagagcttgatgtcagtcttcttgacttgtttcttagaggtagacggaaaacttgtacgaatgaaaaggatttgggtgaatggacgactgacaggcgatcaaacaactagtctcgagacctttgatcccctcctcatttttaccagcaaagaacgactcgattgctactctcgctttgacaagatgtagatatcgtttcgagagagctattagattaccgttcgaagatgatctaccttcgtcgtcccatcggatcaacctcgcgctgtttttccatcaaagaggaagcaaaaagaaaagagaaacagtaacggtcaatcgaaacaacctcttttttgtgggaaattgaatgggaggcatactgaactcacccaagagaccaaaccaccgctctcgcgttctctcccagcgagtctagattgtccgaggcccaaggcaagatccaacctaccgacttcttgaatgtatcttcgaattttgaccggtcttcatccttcccctgtgccgggattttcaacaaatcgatgatcggtccggtagaatattcgttatacacaccttgaagatgttgtctccgatgcagaggcacaggtggaggatccatgggaccgatgttcttccctcctgcgttgtaggcaggctttacagatgtcgttgaggatgaagacagagcgggtgaagttgaacctggtactgacaaagggcttctagactttggcattattttatcgttggatgggctccatggttgaaggaggaacgctaggctcgagattgtggactttttattataaggtggtttcttaccagacagggtcgaagagctctgcagtattctagattgggacgctccgattaaatcttttcctcctcctatttgtgttgagctgtcaatgatagagcccgagctagagttggaactagactcatggctggctaaatttagtcgagatgtctgattttcgggcaaatttagagctcgacctcttgacctatctgtcaagttcgtcaggagcggattttggaaggtcgtttcagaaaaataaccaacattgggagagaaatggctcggaagatcatctcttaggatcgaatatgatgattcaggcatccggcttttggacacaaagtgaggcggcgcggttgaggagtggacttgagagtatgtgaacgctgatccagatggattgtctcgatggattgatgagagttcctcagaatgaggtgtgatgtagacagacggtttgtcggaagacacgatatgatcgactaatgtcgagcgagaggtggagacgaatggttcagaggcgctactgattgagttgaaatttccccttatagaagcatagggcaaacttgccctgatgctaggatatcgctgttgatattcctgctgttttgtggagttcgacatgtttggaaatgataacgctcgccccttctcgctcgatattttgcttgaaagtagaccgtctacgcctgcttgaaacaacgatcttgagttcagctcttcaatcgccgaagacgagtttcttctactatcaattgctcctggtactccaacctggaacttcgtttcaacgtcagttgcacctccggacccgaactgagtgtggtagtgagcaagatggttactcgtcatgcttcctgtcgacctagatctcttccgactgtaagctctttcagcccctaccgaatctacctcctccatgacagcttgctcgtcctcgcgtgaccctgtaggtgaggacgatcctggcgagggcgaatgtaagaaggacgcttcatgactgaaactagctcgtttccgtcgctgtgtagttggtggtaggttatcgtgtgtgtttgggtgagtaagtcgcccagaagatgggcctgaggtggtgttatgctgagtcgtatttggatatagatgagagaggtacggtatccctcgagtttccgaactttgccatggttgttgatccagacgttgagatcgagggtaagaattcaaaacttgaggtgaacttcgtcgttgttgttgctgattatgaatgacagcagatggatgaggttgtccatttagttggctcgtgggttggataggtttggttgaactggaggtacccgatactggcgacaacgacactgttcttgttgacacatcaagatcagacttccgtggtcgtttcttgggaggaatagtggtgtcgatcatgatatcattttctatcttttctcctcgggcgttgggtttcagtccagttgaagccgtccgaccttgtgagcttgcttctacttctatctctttggtcttccttggtttcgtctttcttggctctggcggtttctttacgccagacgtcatgtccggaggcaataacgagcatctggacagatgaaaggaacggggagaaagcgtctatccgtgtcaaactcctatatcctttgggaatatcttccttgaaagatactcactcttccccatagagaatacaaggctcgcatggtagtgtcgcattcgcgcaaccgatctttcgctgaagtaaccgaagtgtttacaaaacacgaggcacattaaagtgatgtcaatggaatttttgatagaagaatttatggagaaaagatggttaaacgtacccttcgacatgaatcacaggaggtaatcggacggggcttccgttttcttcgatttcatcattccaacagatcgaagcgatcgttctacaggtcaaacacacttctgcggctatgatcggccgaatgaaaacttacttctttctgttgatgtcgactttagtgtttccgcctgtggatcaataccaagaggaggatactcagtgacaaatgataccgggagaagaattaaggggagaagatggaaaaaggggtataaccttcatcaaaagtaacctgagatttaagaggatgcattcaaagtatgatattcagattcgttgggtatgtcaattccgtttcagtcgtgcaaatgtatgttcgtgcgtatttttgtcatcagtgtttccaagagagagggacgttgtgcatcccatccaacaatcgtcgtgtttttcccgggaaaaaatgtgatccaattggatatcagtcattctattcgtatgaattccaagaccatggacaattataccaagcggagatcacaggcccgtgtcagaggaggaaatagaaaattccggacaaaacggacaagacttacgttgacaaacttgaagttattcactctggaactggtctggttggctctgtccaggagattgtccacagatgtgctactctcactcatttaataagatgagaggatgatgggataacgggatgatgggataacgggatgatgggataacgggatgatgggatgatgatgggtctaagtgtgactgagtcgtccgtccgggatacaagtgctgggctaaacatatagttctgccttgccggatgagccgggccggaattgatccggacgttatagttgtatctctggctggagtttactgcgattatgaccgaagattccaaccaatctgtatccacacatcttgacgtccagtacctccctctgtccatctttcggttgtttagccttactctacccctggctttcagaacaaaggagcgtcgcgggagaaagatgagaacaaattgtcgatgagagactgggcgatcgggtggcatgaagctgtttgataatagttgatgcatcagttgttggaggtgcactatcgttcaaccacagctattctagactaatctgcttcgtatgaatcatcagttacactatacccattctgtgcatcacgaaggaggaccagtacgtgggctcggcttatgaggctttctgaaaacacgaaatagcaaaatatctacaatttggttccaccagaacgcaccactatcatcgagcgagggagaaactatactctcagttcgtttcttctctcattctacatacgtcagcttgattcatccgaacaagtgaagatcggttggatgggaaggagaaaacgaaaggaatcaggactacctgggcttcttcgatttttatcttatctcatgccttgatgagaagaagctcttgcttacttaatcctgacctcaatcacttacgtaatcaggccacgtatgcttacctaatatattcatcatctcggtgtcgattcttgtgggcgttcccaacgtcttgaccttagccttcacatactctctcgatgatacaacctcgttctactcatctcgttctctcccatatgtgggccagatcagcaacgtctctcctcgctaccaagggctcgctctcttgctcctcatctgctttccagtccttccttcgtcgaccacctccgccggctatccgccagttctctcttactccttccctgttcaatagactcagtcgaccactcaaaccgtcccggtatgcttcccgtcaaccacacccgatccaacaacccttaggttctgtgggggcttctcctgcagctgatagaactcctattggaaggattacgcccacaagagtcagtgctgccgaggcgatcgacggaggcggccgtcatacccgggagggaagcctcttgaccgagcatgaattcgatgggtttgacgaagaaggcgcgagaagctccagagaccgaaacgtctttcgaccgttgattgtgagctctctttccttctctcgttttcgtcgataccagaagaacaacttcttatgcgtgtcggtacgtgcatgcaagaattaaggaaactaactgatgaaccaatcaatcgaaccattgctatcgtcaccctgtcgcctgatttgtaaacccgattgcagtggtcactcgcagtagtaggcggtgtctacgtgggcgctgctctcctcaccaatgcggacaccgatctttgggcagaaaaactcggagctggctctttttggagacgaaatcttcccagtcagaaagaaatgatggacgcaaaacggctggaactcatgagggtttgttttcttctgcctttcttacccccttgctgtctttgctgtatgctaataccatctgttcctttgcacaaacaaacttacagagccttcaatcgacagttcaatcactccaacgccaagtggcttcctttccagatgtcttcaagacactcattcttcagacatacgtctccgtagccgagtattggctcaacacatctgaagccaagcggttcgctaccgtcgtcgtcggagtcaacggcttaattttccttgggtttaggtcacctaggctcaaacataagatgatggaagctttcaggcatacgccatcctctggaaagagctacactttgctcacctcggctttcgcgtgcgtatcttgcctgattcaacagtgtcttctttcttatgcataagcgctgtggtactgattgagcttgaacctgtttctttctaactgtagccactctgagttttggcactttgggttcaacatgtttgcgctatggtcatttagtaagagtttttcttttctgaaggatttgtcatttggccgagcaagaccataatctcgatctcttttctacttccaacagtgccatcatgctacgcgttcctcgtgcatggagatcgacatgcgctctcgagcttccctgggatggcagaatccacagcaatttatcatctagccgctttctacgtcgctggtaaagtcctttttctttccttcaaaagcacgatgtaaactcaaaggaactgaacgttctttctctttgaaccgatatcttctctacaaagctggaatatttgcctcgctaggttctcatctctacgtcaacctgttcacccttcctcgattcctctcatccctccgacaatcagccctgcttcatacacctctcccccgtttatcccttctggcgttagcccgtcaaacaggcaacgtcccaactctaggggcatccggtgcattatacgccatctttgctcttagcgcgctttctttcccccatgccagtgttggagtcatctttttaccattcgtctcgctgccaatcacctggggtttcggagccatgatcggattcgatatccttggactcatcagagggtggaagatgtttaaccatgtggcccatctgagtggagcgatcttcggagcggtctattggcgatacggcgttagttcctatctattctttctcctctgtctttccccttgtttcgttagccctctggctctttggataatgaaccattctaactttggtctccgtctatgttttctccaaagtgcgacctttgggactggctaaggatgacgctctcaaaccgaccggctaagcgaccggccgtttgaaaatgatgattcatagacactaatcgacgacagagtagtatgtaggcatataaatatattaaatgatcaacccccactcgttcaggaagcagtcatccatgcgtgttttgctcaagagagaaaaaagaaagaacatcaatatcgtggcttgtatagaggaggacttcataacacaaatctggacacgagctatgggtggactcaagaaaatgaaaaaaagacaagaaaatatctcaaagagcctatcgagctcggcgacgagaatagttggttctgcctttgacctaatggaagttgataaacttcgactcagcaagtgacaatagattcgcatcatttggatataaacacaaacagttgaggtggccgaggtatctgtagatgttgcagggccaggttgaccggttgtcttacattgacaagatgttgatgcaaatttgaagttctgccctgagtttctttggatcaagctttcaaaaaaaagaaaacaggctaaccttggcccgcttcggccgactctctaaggttctgttagtttctaactctgcccgctttccactctgaaggccggcggatgttagcatgttgtcagctgtaccgacggccgttcgatccaaggggcttgtatcagtagcggtgaagaggtcaagactcttgcctgcggaggcagggaacaaatgagcgtgatgtgtttggatcccatcctgatcgtcttcgacatcgttctcgctatgttaggtatcagagcgtaaattcacatcagttaaggatctaatggttcaattatatggtgcgttgggcgtacaggtcagatagtcgcttaaaatttggtgctggaggagggagcatctgacagatcggttgaatagctcgtccatcagccttcgagtaggcttcggtgagaatgtgatgctccgtagattcgtcttgatgagattttacgagtacctgtcatcaaaccaactctcttagcctgttgaaacgcacagatttgatgtataaagggaggcgcgcaagacaaacatctacttccaagctagtgccttcccaagaatcagagctggaaccattattagaagacatctgttggaaaacgataggatccaccaagcttcggggctttgtcgctagaagggagcgatttctaaacacaacagttttctagtcaacttatgatcgatatcgaaaaacaattagctgggtaaggcgtactgaaacttcagatccttcaattcgatctcgagctccatgcgtcgtttctcaagatccttcgcatgattttcactctgcaaactcaaacgatagaccaattagaagaaaacaatataaccaagtttcgactctggagatagcccagtactcacacgtttgaccgagttttccagatctactatacgcttctctgttgtgcctatagtattcagaaaatcagattaagaacatctacaaatcgggggagaggagcataccttcagtgacacgagtaatactaaaatcgtttgagtaggacatgctctgtcagttacgccttgttataacaatatatgatgaaaacggggcgtacacttgaacaagtttagtttcctcggcatctaatctctccacgcctaaagcgcctctggccttaagtcggtcaggaagagacttccgcttctgttctgactctcccaatcgttgctgaagtgacgaatttttatctttcacctcatcgatctcgctagacagcattgccttcgacttgcgcaaccctgtaatttgttctttaagagacttgacgtcagcttcggcggtggtctggagctgttggttggtagagacgctctcattgagttcatcgaggcagcctctagtactgttaagctgagcactcatatccttgagttctttatctttggctagcatttgggtctcaagaagttgaatcctctcctaaaccatccaagaatgactatcaggtgtgagacttgagacaagctgaactattgaaaaaacctacttcggctaactccgacttgttgctctcatttaaggagagaatttgagaactcatgctctcgatctgtttaaaagcctgtaatcataatcgatcgagagtcattcgattagcccagcagcctagaatcaacaatgaagcgcctacatcttcagtttgtttgtgcagagtttcctccaaagtacgcttttgagaacgaagactctcatgttctgctcggacgctctgtatagcttctctgtgctctacctgagatacacggttgaaacaaaacgaaataatcagcttatatggaactatatgatatattggacttcacatcacctcaagccgggaccgggcagcatgttgatcattctttatggtctgttaaagcgattgtcttttagttatgtctacgcctatgttgcacatgaatgatactcacgtccatctgatgttgaagggatgatatactgcatccagaatcgatatatttaacatcacagcacaattgatgaaatagttttatcatgatcgggaaacttacagctcctcagcttggttgacctttaatcgtagttcttgattattcttctcagacatctccttggcttcgtcgtaagaaacttgctgtgcagtcctcaaggcaataccagacacgagctgggcttgcagatctgtcaattggcagcgaagtgcttggtgttgtaagccagcaccttccacccgcgagagcgcctcttctttctcggaaatcgctgtgttgaggctgtgagatgcgcatagacaagtatgaggttgtacatatggaagactagtctgaagcatcgaataaagagtatgatgcttcaactgacctgctttgatagatggcttctttttccttcagattcgaaatctccgccgatagtgtgaccaaggcagcatctttatcctgcaaatacgtctgtgtgagagagagctcatcctttagtatagcaaaatcttcaggggttgtaaattccgtcaatttggtctgaaggagctgaatgtctatctccttcaactctaaacaacgctgcgcttcctcaagagactttcgaacagagccaagtctacagaatcgatacaagatcagtcttagcgaggactgagaatattagaagcttgtcactcactgattattaagaacttccacttgtcccaaatccttgtttgtttgagttatttctttcttcatctcttctcgagtcgtcctgtttgaagataaaattttgttcagtattcccccttcgctctgagccggatgggaaatgttttgtactccaaggtttgaatccgttcatctaagaaaagatatgttagtctagtgcggcgcgcaatgcctcggaggaaagagatgaatgaaatctctgcggctaacttttctgattaacttcaagcaaccttctctcgtcgagcgcttcgagatcagatatcctacatgtcttctctgcaagctgtcctgtggcttctctaagttcgtctttgagaagcgtgattacttgtctttgattttccgtgatcgtctcgagcttctcttgggcttgctcgatcgccacccggtgttgggaaacccaggatgcatcggaacccagtagcccaattgtatctgaagcgtgtgtttgcacaaaattgattttaggcagtgtcacatagtcaggcgagcaatattcaacaggatccaccgaccgtctttacagacctgagactggttcttcagactgatgaatttgtcccagagctctgattgttcagtcttcaagtcctgctgccttctgtttacttcgtcttgcaaagattgacttgatcgacaagaacaatagatagtaaatcagatgttcgtggcatcagtttgagctttactcgaagacttacgttatcttctcgttatgatcgctcctatatagcatgagcgatgaacccatctgtgagctcttgataatctaaacggtcgcatagctcaacacatactttgacttgatatctttcacgtatgcccgcacgagtagcatcttcttgtccttcgcatcgataccttgcttcagatgttcgatctctcgttgctaggttaccattccgaaaggcgcccaacaaagatacaagagtatatgcgatgagtcgcatcaaagatcaaagataagatgagccgaaggaccatacctgcttatccaacaaagcgctcttgtctctcaattctttctgaatcttgacgattgaagagaccaactcggacgggtgctgttccgggattactctttgatcagattcttctctatcgccggtttcctgtgctctagagcgcttcttgatcggtcgaggcggttggtccgatcgatgtccttggtagttgtcatcatctccacgaccataatcgtcatcacgtacttgatcatgcttaaatcttgcttgaggctgcttcggcaagaatctagataggtcatcttcatgaagagaatggtgtcgatgagtttctttggtaggaaggctgccagatcgagagagagggagggccggtcgctgggactcgagggctgaatcaagctgaataggcacagtaggaaagtgtccaccccggtcgacctccccagagagggcggtgtgacgactaacgggtggatctaggaccctatcattagcataaccctcagtatcttcccacaccgggtcgcctgcctgagtgatgactcccggtgaagccttgtccaaaggagacccgtctgatgctcgagtgttggggtgtctggccgctgaagcttttgagttttgagacggctgattcagaggcgaagacatctgatcgcttgaagagctttcagcttcaggacccatcatcctcttgagctcgttcactgctttcgtgagatcctggtttccttctaagggatgagaacttgatcgtcgttctcccggagttttcaactcggaaggactccccactttgagatgagcgcgcgaacggtgatcagatacagaggaaagagggtttcttagagaaagagatgagtaaatgcgctctcaaacctaatcgaggacgagtatatgcgccttagaattgaaaaaggatagaaacaagacctacccggttgttgcaaaaagagtcgctgacgcctactctttgcaaaggtattgatatcttggctaggtgaccatcgacctaccccatcgacttgtgccgaatggatcgtcgatcgctgaatccctactccagtcgtgtccacaggtaccttcccaccggtcaccttcgcactaataggaaaaaatgctctaggctccgagacctgaaatctagagcccatcagctttgagggtttaaatctgttgtttgggtaggatgaggtatttgaaggggaaggggaagatttaggtttaggtaccgagaacttgaaggtggtggaaacttcatctcggacatcaagagaaccacctggtctgggcggaggctgaacagggtcagacacgaatgtaggttgggatctctggtcaatggtcagttctctttgtgtatgcatcgagcagataagatggcatcagtctacagaatgtcaggaagaatgagggcaaagtatgatttccacgtacgaggtgtccttcgttgaatcttccgtaatatgcgagtcgctgctcatgacgatgacaagaaatccaagttgtgtgataagatggccagacagttagctccacggtaagctgatacaacgagggatctttcttctatcggatgttggaaaacgcaacgccagaaatgagaggtggtgagttagagggagaaggaagagttgataaaaagaagaaaagcgcaagaaggtataaaatccaatcggggatgaactttttgatcatatcaggggtaaatcaaggcacaatcgggaaattaagaaaagttgggagaaaaacctgtcagtttgatcaattagcagaagtcttctccttatttaaactctaatcgccttgtcggcatggtcaattcagccaaatcacggatggcacgagtgatacaagaaaataagcatcacagatatgttcgtgtattgagaaaagggcaagaaataggaagggaaggaaggaagaaaaaaggtagagaaagagataagagataaaagaagatggatcctctcaggttgatcattttgattgggactctagtagcttctccatctttttcattctgctctcgagttgaacctattcgctcgagcatacatggacaaaaacaagaaactccctgttcagaaaaaaaacagatataatggacggattcagagggcagagatacgtacgatatggttcacgatcgtagcttgatctccaagggtagtattcgggaaattttctgtcaactcttcaaacgaccaggcagagattttcgttccgtcctcttcgtcttcaggatcttccatagctgaggtaactgtttatttatattcacaaaatggatcagtacaaatagtcacgtttctgtcagagaaccacgatggatcgaagcaccaagaagataacttactgtctccatccacatcgttctccgggaacatcgcagcaaaccgtttagatggtgcaatctgagactcgtacactgcgatgacggtcaaggggatgaagaacaggaacctcatgatccacaggttgatcttttcatacgtctttttcgagacgaaccacctgttgttcaaagaggataagacagcaaatttaagctctacatcctcgtatcccaaatagtagattgagagcattcattctcgaggacgtactctataggggcgataaagaagaactcgacaatgttaaaaggcgagggataaacaaaagaatccggggctagagaaaattaaatgagcacatgaatgatatgaacatcggtcgtgaagggaaaagggaagaaacaacccaggacactgacctcgaatcatcgagatagtcttgtatgagtaggcgcataggtactcgttcatagcgttttcgctgatatcagagtatgccgtccctgtagaaggaagacgggagcatcgttgttaaacctcgagtgagtccagagcgttctctcttttgtcaagttttttttaatcgagaaagaaccaagacgaaccgaacaaggcgatcaagatattcaacaggatcaacagcgtgaggaaactccagaagtagtagatgaccattccgaacggaggactgaagccttcttcatattggtcaaacccaggagaacccaacagggcttggatgagaagattgataatcgcccagaaactgtcgattttggagtcagcggcgtccaaggcaaggagactctggatgaagccgagtgccatgactaaagataaagggtgagacgcagtgacatgagtcgtttttgatctctcaagaagaaaggagaacgacggatgactgactgccgagtaggatgaaaaagatggcactttctctaagcattcgagaaacgataatctgcatcgttccgacgactctgtacagctcaaacacggtgattaatctgatccacagaagtggagctgatggtttccaaggagcaataacgaaaggagttagcatactttttcaaagctagacttacttccttccctcagaaatcaagatagagactaaccgacgcaagcgaggacctggaacgacttcatgcggagttgcatggatagatcctgtttggatagagccgtgagacgagaggattatttgttgagcatcttgaaggaatcaaaaaggacaataaagggaatgggagagcaaggaggagtaaggaatgtatacaaacagtatctttattacagattccctcaattcggagaccaagagcggacaacaagaggacatcggtagtaacggtgacgaccgtccaaaagtcaacggcagagaacaaggaggaggagagtctgatggatttaacaagcttgacgcattcttcgagcatctgagagaacgcaaaaaggtagagaacatattcccattgatcaagctttgatatcgaagagacaggagagagagaggggggaggaatgaaaatcgggtcagcctgttatagatcaataaagaacttgcgccgagaacaaaataaggaaatacgtacactgttcaatggatccgatctccagagaggactggctacagcctgtgaatacacgacgaggaaggtgatccagacgatctgacggaagatgttctggtatcttggaacaccaagtcgctgtgggttgacatgtccccaaaaggtatgtatcttgctggcgtcgtatcggatgtaatcaatgtcatccgctaagatgggcaaaaaaaggctcttgttagatggacaatttgtgttctctgggctgattaaggaagaaatggagaaagaacggagcacaagcaaagaacaagagagagtagtaaaaatgacaggacgggatatagagacaaaccttcattgttctgctggatccactctccgttccaaagagaagtcaccacatgttgagcttctgtcgaactcaagaattggatggcatggccatctatagctgcttccagcgcggatgtcggtgcggatcgatcaccgtcatcctctcgataacggtatcgagtacttttgtcgcagacaccggagagagagcgcaaacccaaaaagaaagggaccaccaaggtctgcaatcagacgcgcgttcaccgaaaggaaaaggaagaagatgagaagactgacgacatgacggtctgtaaagtctccatgggcaacgcatgaacgatccttcttgccaagacctcacaagccaacgctctcccaatgttctcgtcatagtccgtcggaaactttttagaatcgtgaaggaacgcacgcctcgaagcgagcagacagaacgggacggcgttcgcgtaatctcctcctgctctggtgaacgatatgatgacttggggcgtgattattggtgatgtggccgcagagatgagctgcattatgtgggaaataaacaaagacccagagaacgagagagagagagcgcgcgtgcgcgagaaggaaagagcaaacagaattagagagatcgatcgtttgatcaaatataacgggcaaactaaagtgaacgggaacttgcatccaactcgacttcaacaggtaacagcttaagaatcatcgctcgaagtcttttgatgagctctgtgatatgaacgtagcgcgatcggcagagatgtgcatgaagacgaacagacgggatagaacacagagattagttggaagataggcaagagaaagagaaaggaggcgagactttactagtcattgtgtctggctgagggacaagtgaatgagaagagagcaagctccccatatcggattgatcttctgccatcgcttctacaggttcgaccagggtttggagattctggattggaagtaggtgagcgttggtgttgtgaacggagtggaataagaaccaaggatggatggtcagtcgacaaaaaaactttcttctttttttcctgcctccaattcagttttggtaagaagacgcgtcattggattcgcacacacctgttagggttatccacctccttttgatagtccgccggttcctattcacagttgaggttgttttgatttccctggcgttggcttggcttggctttaagattaggtttgaacatggactgatttacctacatccttacctttctacctttctatctttctcttctacctacaacccccatatacccctcctttctctttgtgatacctcctctttcttttctgtccgttttttttctcatctgtctatctcgacaagcccacactctttcacaataaacaagaaaaacaataaaatattcatcatgatgcacctatcccaactcgttgcgctcacactcacgctcacgctctctctccaagcgtctcttgtctcggccggtccttctctatcgactggctttgggttcaagctggatcgacgggtgagcgtggtggacccagggacggatgttgatttcaagtcgatctctgagaaagagccgacatgcaaggtcccttgtaaggggttgatcaatctgtctgtacgtccttcatgtctttcgatcggcgaagagagaggagaagaaaaggaaggacagaagagagaaaggaagaggaggaggaggaggatgagaaaaagagaagagaagaaagaagggcgaggaccggagagaagagacgaaaagaaaaagagagaaagagataggctgacgagacgtgttctgtgttcgctttgtaaacgaaattcaggattgcgcctctacagagtaggtcttccgaaacacgataaaaccacaagaaagagactctggttgttaaactctttctctccttttgaaaactcgatggtgcttgaacagctatgactgcacgtataaagcgttatgcacggaatcaggactcaacgcgctcgtcacctggtacgcgcgctctctctctccttctgcctatctctcgtctgagatgtgtatttgaaggcaggcaggctgacaggatttcaaaaaaacaaacaaacaaacaaactaaacttgtgtgaccgaaacaagtaataactgcatactccaggtggccaacaggacaacaggcgtgtcgactgctctgtatgataatgtgacggctattgatcaaaagatggacgagaaatgcgaggaaatatctcaacctgcgaatgctacggtcaccgttctttcttgggctgatttttatcctcacgggaacgccagtacgactgttgccagtacggctgatgccagcacgtcggcgacggcgacagatcgatctgggatagcagccgctgcttcttcccaggctgcttcctctggagcgagtcaaaggttggggctgccgactgtgtcaggcgtaggtttggcagggttaatagctctctttatggcctttgtgtaggtggtggtggtggtggttggtggtgatgatgatggcgatgatggcgatgataatgataaatatgttgtttccatctatacgagtgtatgtacgtgtccgtattcgctgcacgcgcgtacgcgaatgcaagtacgtgttttctttggatgcatatacatgtatcatgatagcaggaaagaaaccgagcgagcgagagagcgagagagagcgcgggtacaaactcaagaggcagagagagcgctcgctgttaatcagctcaagagaaaacacgcacgcaaatacacatacacgacgcccgtccgttcactcaagggcactcacgcagagaccgatgacgcagtcgagagttgtgcgtgtatatgcgtgtgacgctggctaacgatctgacaaagtgtttacttggtctgtagttcaatccggaccaaaggacgcacagttggaaggatcttccttagagctaacgcaagaggccagggcaaaaaaggcaaaaagagagagagacagactacacacagtcacaaggcttgtccgcgggtctcggctttcggctgatcccgatcgaattttttcacaccgccaatcgctagagcaatatgtcacgccacaattggttccttgtgggggtgcctgtatgtatgtgtgggtgtgtgcctttggggccttggccttctctctcaccgttttcccccctctgtcccctttcttctgtcttccattgtgtctcttcccttgtctctcgctcgtcccttttcgtccccccctttccctgcccccagcctggattcgcttccttctccgttcgctctgccttttctcctttcccccccttttgcactcttttccgctcgtctcccctcgtcttttgccttctctcgccttttctatctttcgccttccggaccccagccgattgttagtgtctgttgtgttgtgcccttttcgttcgttctcccgtgctctcatgtgccctgcctcagtgtgattccctcaagtctgatcagtgtgccttcgttctcccttcggccaatcactccacctgtgtcccgatcgattccatccatcgccttccgttctctgtcctccgttctctcgctcgtcttccctcccgctcccgcctatctgcccctcgtgtgtgtgcgtatgttccgttcgatcgatcacgtcttgtatctgtgcctgtgcctgtaccctttcactcttgtactaatctctctctgccctctcgttctcgtttacttttcctacctgtccctgtccctgttcctccctctctgtgttctgctctctctttctgcggattgaatccctccgtcgcgtcctcaacgcgtcttgtcgctcgtcgcgtacacacacacacacatccacgcatccaacacgttcaatctatcccacgctcccttcgcccctcccccgtcgttctccatctggcggcggccctggttttagtcgcgtacaaacacagcacacgcgtcactcgctctcacctctagtacacatccctcctgctcggcccacagatggacaccgacaattcatcccctcgtcatcttccctcgttggcgccgttaaactttcctggtgggcagcctcatcatccacagcaaggacagcagcaacggtctcagcagcagcagcagcagcagcagcagcagcagcaacagcagcaacaagggcaacacatccaacatcctcaacatcattcacatcacccattgagcgcttcgttcgctaccggtccagccggaagaagaaatcatccagaggatgctatccatcctcaccagcatcagggcggccagcacgtgcccggtggttcctcatccgtcgttccctcgtccttcaacccagcaggcgcgcctccaggctactggcaaccgatgtttgatgtcccccagaggtaagtctgtctcgcgtgtactgccacgcgcgatctcgacgcgtcaagctgatcttgcttccttgctacttatccgcacgcgtccaaagctactctccttacgggcatggaaatcccaatccggcagcttactctccctggacatcgctccatccatcgtccgccaatgctgccgctgctggcgccggtggcgccggtccaaattccggcccaggtggcaaccgtccccaggaaaacccggaccaaccgtcctcggcctatggcgtccaggcataccaactaggaggacatccatcgttgcagcagcaacagactccttacggctcttaccagaatagcccatactatccgtcctacgaccaacaggcctggccatccagaccatcacctcagcaaccaccaggccagaagagatcggcagacaaggagacagataacgacggccgacagaccgatccctcttctgcatccgaccatcaccaggacggagagtcaggatcgagagccagacagggaaccttccagaaccccaactcgctccctttcccgcctccatcctccggtgccgccggcgcgtcctcctccggccagccacaccatttcccgccgactttcaacccgaacgatccttacggtccatatggttatcctccctcctcctcccaacccggtcaaccgcaagccggcccgtccttgccgtcgatgaactttggaccaggcggtcagaaccagccatacggccagcagcctaatgggtattattacccacctcaacctcagttgccccctccttccgcccttggtggcgtcaacggcggcaataacaatggcggggtcgacatgtccatggtcaccggctcctatccccctttcgacgtggagagcggagactggcaaggaatccatccggccgggaaaaaacagaaactctccggaccgtcctccgctgctgctgccgctgcatttgctgccttcaccgccggacccgctggggccggggccaaacccggacatcacgctcaaaccggggagggcccgacgggaaaaccaaagaaggaaaagattccaaaagcaccaaaggagccaaagccgccgaaagctccgaaggagccaaaggtgaaaatcccgaaagagccaaaagagccaaagctaaaggaaccaaaagaaccaaaggagccaaaggcaaagaaggaaaagactggcaccgccaaagatgccgccgatggtaagtctctttcttttgtgtctgttgtcgtggtcgtgtgtctgatcgttcatgctttccttttcctccttctagccagcgtgccgacaaagtcacatctaaagccccctaggaaaccactctccgcctggcagatctacttcaaccaagtccttgccgcgagaaagaccctgatcaaaccgggcgagaggttcaacgtcgcggagatcgcgaaggaggcgggcaaggtctaccaggacctaccagagtccgagaaagctgtaagcaatatcgcctttgtttttcttcttctttctccttccctcgcccgttttaacaacattctctcctcgtccgcttgattggcattctcttccttcccaggtctacatcgcaaaggcaaaggaggtcaaggcagagtatctagcggctatggcatcctacaccgccaccctgacaccatcagacatccgacaggaaaacttgttccgagcatcccaacgaaaagccggaaagtccagagcggctaacctaaaggatccaaatgcgccaaagccgccgttgagtccttactttttgtacctccgagccatccgagcaagcgaggagatgacgcgagagatcttcagaggcgagaaggagacgacaaagcagagcatcaaagcggccgaacggtggaaaactttaaccgaggatgaaaagagggtaagtttctggatcagatcttctcctcttatgtcttttccccttgatctcgccttctcgcgtacctttcttgctgacgactgcatggtgctctgccgaaacctacgcccttttcctagccctacacctcggcagccgaggcagagaaacggtcgttcgagatcgctcagagacaatacatgatcgataccggtggaccggttcccccgatccatcccccccggacacacaaaccaaaatcgacgtcttctcaggctgccgccgccgctgctgtcgcatcggcctcggcctctggcacgtatcaagaatctaattcggtaccactcgtcccggaatcgatccagtcgttcaagcctcaacaacatcatctccagccacaccaactccatccgaccgttcctctctccgtcgggttcaacccgaactcgtcatcctcaccatcccgttcgtcaggcgaacacaacggaccagactctacgatctctccttcccatccaggattcgacgacccacatgatctctcgactggctatcatcaccaccaccatctttcagccgtcggttctggatccggaccggaagatcatcttggagagttcgacccgatttttgcaggcgtcgacgtcgacgtggccgatcatgctcacgacgaaggggatgactcgggcccaggtggctttggaggttggtcgattggagcttctgaacctggacgcccgacagactccaggttggaaggtaacaagcgacagaggcaggacgacgacgatgacgaagacgatcggggcgaccgcgaagatgacgatgaggacgacgacgacgaagatgacgatgatgaggacgaggaagaggcgagcggaagtggcggtagttcacatggtaacaaatgagataacctggggatgtcttctttctttctttcttctccttcttctgatctttctctcttctgtgtatgcgtctcttcttattctcatgtcgggttgggtcgagctgagttggcttgcataccttcccttttctattccctttggcttgtttatatagtcctcaacgaaggaaattgacctctcgtctcttctatcactacgtctttatctcgactttttaataattctcctgtcttttcattttctatataaccggtaccatttccgaattatgtatctattatcctttcttttcttttcttttcttttcttttcgtgattctttcctttttcctttctcctttcgatccttctctcttttcgtcctttctggtttctcttctcgctcggtcatgtgtctttaggatctattcaaccgccttttcttgcacatcctgcttgtgtccgtccgccttggtctgagtcgagaaggaggagtatgatgagaacgataggaaaaggcagagtggacaacatgacgcgcatgcgcacgtgcagttcggactatcatcatacgttttgccgtatctttctgttcacccgttcatctttcattctcgcctgcactttcgtcgtcggactcaactgcactagacagactcgctctttcatcaacccaatctaccggctagcttgtcgacggctcttacgggtctttgtctgaagccggttctggtatacgatagatggcaaccgaacacgttgatgggtttcatctatcgctttcaccttcacccttaccttcttcgtcgacaacgacaacgacggccacaggctcgaatacgccagacgaacgaaacgcagaaggaacaatagagccattatctcttataaaccaacggatacggaatctcaagttgaatgagcttggtggtgttgatgacattgaggtcgatgttgacgaagagcttggttcgttctttccatcccttctcgaagcgtttctcttcgggcgctcctcgtgatatcaaccaagtgtatagaaggcttacctccgtgttcttctctattacccttgttcttgtctcccttgaatctgtagaccaggaagcaagaaagcgcattcatggcgtctcagacagaaacgaattggtagatagatatgtcttgctcgtgagcctctttcgcactctcattcctctgcgtctactctttcctctatgacctcggacggcaaagagagtcgttgcttaactcttgtgttcttgtttgtacgatccgggtccgatgatgctcttcgtgacctgactctgatcgtgtttgtgtttcgtcccggggaaacgggtatggggttggtagtataaagagttcaagaaacagagtaggttgtccacaaaggacagggcgcatatcatcaacgaacgggtccgccacttcctttccttcctcttttctttgcctatcagccattctcgttcacctgtcgccgacaagttggtttgtatccttttcccccccttccttgatcctttggatcgtcggagttgattatagaacgaatgtacgtctttctctggtatagagggaacgatccccctcctaagacgcctttttgaaaagaaaaaaagccataaactgagtggctcgctactatgtcacgtaaacgaacgatctagacgaacgcgcgctttcgaaaacgaatgcgatgaggtcaaagatcgaatcaagtgctcgagatttagcaaaagtttgtccgaccctcttgatttatatctctcctttttatgtacagcgtgaacgaacaggcggtgaactgtccacttgttttcctttctttccttccctggcacataaaaccgtataggagtcaaagcggttgatggtaagttttcgatcgtaggtcagaccttttatagaaagtataatctgatcgtatggtctcttcggtcattgacgtataccgcgcgatatgctcaaatgacgaatgagttgataggcagagaatagaaagtatgtgtctcttcctcatgtttctgtttgtctgatgatttattcgtcctgcgctggaacgacgtgctctcttcgacgactgaaggcttgactttcttgattttaatttatagattgaagttaatgtccgagatcgctcgacaagaagtacgtttcgttattctttacgttaaatgcgctggatcatgaccagaacaatttcttgatcctgtttattttccaactctcctagatcgatacctgcaaaacggaattgaggtctgctttctcagaagcccgcagttctccattttccattccaacagcggcaggtgcaccttcaggtccagaggcaattcatgttaggatcttttgtgagagccgtaaacacgttagtattctttctcttctcttcatctctggtgcagatcgacctcagcccaaattaaacatatcctttctcgacttgactagcaactctatttcaaagtgcttcgacatcggcctctcaaacggatgttcgccgcctggaccgaccgagttcaagacatgtcacactccactgccaatctcgactctgacgtccttccgccttcttcaagctcatcagctcgaaccagaggaaaaagtcgagcagacaccaaaagggctagactcttaaaaaccacatcggaagaagcggcagcgaccatcctgaccaatgtttcgctggaacagcccggtccgaaattcatattctgttatgcaggaaaagtcataggtgatgaaatgacaccagatgggattgggttggatgatggtgattcgatcttggcgatcgaggtggttgatctcgctagtgatagagacgacgtatgcttttcccttttctattctctccaagtcttgtttcttgattttaacatcaaaaacaggggaacgttcgaccgtcaagactgaattgcgtcggatatcgcgtgttttgaaatacaggacggtgtaccgaccgttccaggcaatccactaacgaaagctgctaagaaaagtctcaacgcgtaagtattcaccctctcttcgtttcttctcgactaagcatacgttgaacacacaagcagacctggccttcactaccttcttcgttcaattcctttcttggccgtttaatgttgcagactaaaatctcatctggaagatacgtttgattctatgtatgtgtagaactcattctttttctggatacactctcgctccttttgtatgtgttctgagtttgctaatcaccactccatcgatgaacttgtatgcgcgcgccatccatctgaatatacgaaccaatggatatacaaatagaatacaagaacgtctgaaagacgtattgcgccaatacgaagttagagagcaacaattcgatgccatcctcaagtcaaaagagcttgaaattctattagcaaaagctagatcggaagagtgcgttctcccttaatcccctttcccttcccctccagatggggagttaacttttcgtggactctgtctcgttgtgaatagatcgaaacgattggtactagaagctaagaaattaatgaagcagcaagaacaactcaacatgaaaaccgtcagagcgctggatgaactgaaacagagccatcatcgtgtaagtctggctcagattccagtgaaaaagaaaggaaaaaccgattcaaccgttcaccttttctctattttctaatcttgtttgatgatctttcaccctaatatcttgaaaacagctgttggataaattattagatagaattttgcccgtcgctcggaatccatcacccgagaatacggcacaccttctagtatgtgtcaaagaagagattgatcgaaagggtctgttagtcgaggagatcataaaaggcggaaaccagattgatttatgatcgtgctcctatgtctcgtctgatgggtttgagaagagattgggcttctctgatcataggcatcgtatgagaatatttctataactacaaagaaaggagaaagtagcaagtagatcccaactttgaggggcatcatcctcgtttccagactttcccccgctctattcgacctctctttttggtattatagaaatccaaggaacaactaaagagaagaatttgtggacccgttcttctttcaagaaagtacttccactctatttataacactcgtcccttgtcggccaacccaattccagtcttgggcgcgttatcaaacatcttcgccttctttgcgccaatgttgacggtacgaacactagtggttgccttggatagtctgatcggtcggtttccgacgtattttccatccatttgtttccaggcgagtactgagggagatagagaaggaacagaagaataaaaagaaagatcagttggccaggacaacagaggatacacaaaagagcaagaatggagacacacagaagtcctcaggatcggagaaggctaggaatgcgtatttagactgagaacaagatgccgtagcgttcgtgaagcaagagtgcatcaagaaatgccatatcagacaagcacagacatgtatggatagtaaagcgattccaaatcgaaagacacaccttgttgcttagacgatccttgacgaccctagccttttgaaagcttttgtacttgtcaaaggcctcagtcaagactttttctgtgcaatcgtttgacacatcagacacaaacagccggaaccatttaggatcccactctgccaaggttgggctttggtacaagagaaaggctaaggtcaaacgacgtgccagacaacatctgcatgtgacaatttagggacagatgaatgccagaacagaacactcactcatcccacatctttcctcctccctttcggattactgtggtccgttttcctttgatctttccggtttcttgttcaggagcagcagcatttggatcgggtgctgaataggccgattgctgttgagcagcctcaggatcccacgaattagctaccgtattgtaggcagtggagttgtactgtcaatcatgatcataaacagtgccaaaaatttgttgtcgtgacgagaaacagttagtacatgatcgaaatcagggtgaggaacaaaacgaaagaaagacgaacccaatcagtggaaccactagcgacggagctgtccgcgtatcctccataagctgcaccgctggtacctgctaacggagcagaagacgctgcaagagcctgctggtaggcatagtaagcgtatgaggctgctgtagttgtgtcatagccctggctctcgtagtactgaacagaagagagagatgatgttcgtgtggccacataaagtgacaaaacaagaacgtcagcagagaactcgagtgaagttggacaatgatcaggaaagtccaaagaccatgaagcaaggagcccataagaacacaccgtctgccaagcctttagatcgtatcctgatgtattcatgactgatgtatgagagtgttccgatggatgaagaggttggcagtcgatagtcgacgtggttgattgaggtaaagatgaagagagaaggaaaacgcgagaaaagttcgaaagtgcaagttgaccgtcaaccatctcatccacaacgacgacgacgacaatagcaacggccgtaaccaagccatgaacattgacaaactcttcaaggtggggtttgaatcatctccgctcatgctgttttcttcatcctgttttcccacatgatttttgacgtccgctgcctccggatatgtcctctaggtcccagccctcccctcttcaagcaacaagcgaaagtttggtgatcttccttcagctggttggtctttggtttcaaggctgttatcttaatccgacgcgctctgaacagacacagggctgactagttcattaaactcatctacgcgtacaactgacagaggagctcaagcggttcaagccggcagaagaagaacctactgcttcaaacctagccaaagggaaacaacgagcaacagtagaagactatgacgaggacgaagaaaaccaagacccctacggtaagtcaactccttgaatctacccatattcaagaatcgtgcccagattttctaatggagagctctggttgtaggtacagggcttatagaggattttggagacgaagatgacgaaggaaggatgtttggaggtggtctgaatgaggatcagaggactattctagatatgtctgtctctcctcctctttccttcgtgcttacgaaccctactcttctgaactgtctcactgatcttcctattcggtgctcctttgctccactaggttcgaccgagctggtgacgacgaggatgatgagccgacggtggtgaccttgcccacgctccggaagcagctcgttcaatttgagcgaactgtcaagaagaaccaagagatgcgtgtgaagtttccagatgaacctgaaaagtaagaatatcatgtcttctctctcgactcgttattggccaccgtacactgatcaaccccttcatcatacggttggtcggtcatcagatttattgattcggaatccaacctggatactgctcttcatgcgcttacggccaccttgccgcaaaaccctaagctgttttacccagagttagtcaaacagggtaccgtcaaagtgctttccgagttgctcagtcacgaaaatgcggacatcgcgcttgatgtcgtacaagtgttgcaagaattgacagaggaggatgttgaggcgccggatgatgatggtgatgatgatgatggtgaagaagacgatgcccaagtgacgagtggaatgagggttctgatcgatgctttggtgagtttctcgtcggtttcaaacttgtcctcaggattttcatgaaccaaacatgtctaaccttttaatgaatggaatagcttgaagttgatatcttccagctcttgattgagaacttgggacgactgaacgagaaggaggatactgatcgacaaggagtcttccagacactgggtacatctatttctttatgtgttttgattcactgaagactcatttgataccatgccacctttctgttctcctaggtattttcgagaacctgctctcattcaatcctactctagccgaaacactcgtcaactcgacaacagcgctcaagtggctgctctctcgaataacagtggaagagtacgattcgaataagcaatacgcaagcgaggtatcttttatttttatttttatttttatttatttatcgaagtcatgctttttcctccctcat

SEQ ID NO: 1206 - DNA, 17915 bp, Xanthophyllomyces dendrorhous
tcgagctcattcgtcgcgaacactctgggcttcttactgttggttaggtcctcgccatcttgcttcagcaaagccgatcaaatcggctgaaactcggcgagctagaaggaattgacgcgcttcttcgcgtcctcgctgtacgtggctgatctacgcatctttgccgtaattttacatcaactttctgctaatcacgcagccaaaaacaatctcgcgtttcatctatgggtgatcacagcgatatcgaaaatcagatccaagtgacccagaggaagaagagtttatggagaactcatttgacgctctttgctcggcactagcagaacctgaattgaaacagcttttcttggaagccgagggggttgagttgatggtaatttgtatgaaagagaaaaagctggcgagagcaagatctatcaaggttcgtggaggcatcttcaactcactcaggagttctttgagtaaggttttcagagagcacaaagtgtactcacgccattgtttcatgatgccatgctctattaggtcttggaccacgctctcagtggttcggagggatcagacaattgcgagcgattcgtcgaaaacctcgggttgaaaactctatttgcagctttcgtaagccatgaatcctgaatctttactcttgttttactcaaactgactgaaccctgtactgtcaaatgcatcgatgtcacctcttcagatgggtaaaggatccaaaaaatcacacgtttcggcagaagacaatgagcacattctcggcattcttgtttcccttttcaccaatctggcttctgaatctcaatcccgaatgaggttgctcgccaagtttatcgaaggcgattacgagaaggtagatcgacttttagagttgagagaggaggcagagggaaggctcactgtagtcgagagagagatcgagaaggaaaagcaggttcgttcgtcgatatggtttcgaaagattgctctaaagtcatatgatgtctcaaattggattcttgtatgggctttgtatccacacagtcgacttacaacgcaggtcaggaggttgatgttgaagatgaagtaatgttctaccttcgaaggctagagggcggcttgttcacgttacaaaacatcgactacatcttggcttggctcattatggaggatgacggggtacgtctttctttctttctcctctgttcactttcttcgtactgttccgattcaatgtccatagattgagaagagccgctaatttctgaatgacgtttctggtttctcatctacacacaggctaaggatcaagctaaactcttactttcaagaaaagatcaaaccttccaggagatagtagacgtccttcaaggtaagcgttctctttcaagcctactgattttatccctattggaggaaagaaatattgttctgatgattcgtatccacgttctacagagcaatcggacaatgttggagatctcactccagacggtaagcttgacccaaaagcggagagtcaaaaaatcatcttggacgctctcatgaactacctcaaaggatcgatgtgatgcacgctttcttcctttctcatgacgatcgttcctaaactcatgggtcatggaccacacagacaaggttctagattaaagtctgcaggatatgttcaataacctaccaacgcagtgcgtggtgatgtcggtgaacaacaggtaaaacagtattcgaagagcatttagttcacgtagcgaaaatcgagcaaacagtatctcatttcaaagaaggagacaggacagaaagaaaatggcaacaggaaaacagagcattgaagcgcgaacgaacagaacacaacttcacatagccactttagcgtctagagaagaactctatttgccttcgttcaatgagctcatcgaacttgtactggataacctaggtttcggaacacgaattcctagtcctaatatcggctctaggctcgatcttggacttgggctaggtctccttcccgggttatttctgggagttgaaggactcagttcgcccggattgtacctggttatcacgctgagcgacacgagaggtgaaccgggactacttggatgtgctgggctggactgatcttctccgttgagactggacgaggacacggatgctacaatcgtccgaggtgtgacaaatgtaggcggatgtggggagagtgaactttcccgtcgatcacgcagattacgctgaggggtatgcggaggaagggaaggagagagcgtcatgaattggcgagagcttgggagaggtagcgactgcctatcaggtcttctaggggttgagaccaagggtggggataaaggagtctggttccctttaggccatgcatcttcaagaagagcaggtgataaaggttgtaaatcaccagaagggagctcgtagccaaaatgatcttgcaaaaatctgataagtcagcaaacaaacgaacagatgatgagcggatttgatcaacaacggcggctttccatctctcgtcgtttgtcaataaagaggtttgaacaacccacttgctgagctcaacccaaccacctccgacctataaataagaaaatggatcagaatgttgtcgataatttcattagaacgatgacgttgactgagtgttctacccactcgaaccatgactgttttactcctaaggattctacagaagcatagcttgggaggaattccaatccaatattttccggcctcggtcacgccatcactacgtacgtgtggttcgataggaatctcgacctagatggtgatataaaagaggaaagaggggattgtaaatcgactcttcgtaattacccgagagggacaagaatacgcactttcatatcgtttacgattttgttgatcgcgcggtctaatgtgtcatccttcttgggtacagaaggtttccgccgagcagtgggaaccctaccttcagctttatcattcgtcggtttattctgatgaccagaatagctctcaaacggcatttgtcggtccgccggagtgattgatgctgtcgacctgcgtaatctgtactgactagaggcaacagggcctgcatcagcaggagacaacggtttgttcagctgggaggttggagatttgtatctgctagctacaggaagcgacgagttgattcggtttggcggtggactgagttgatgaacaggagatagagggggagatatgatagatgggccaagcgacctgcgtgaggaagctggggtatgttttacaacaggggtgcttcgcagctgtcgacgagagttggatactggaagtggggactggccatttgctcgagattttgacgctgaggatagtgtaggcgagagagcatggctatcgagtgagatgaaggaagaagcgctactgcttcttgaaattcgagctttggaggtaaacaggtccggaaattcagatgacgaggaatccgagggtaattgtgatcgtggaacgctaagctttgcatgtgtgagggaaaatcgactcgagttacgagagttggatctgctagatcttgaggaagcaacggagtgcacgctcgctactgagcaagatcgagacagactagcgtaggtgcggatatcgttttcagagtcggggtcttcgcgtatggacattctagaagttcgaccactcgtcatggtagaggtttctatctttgcatctatgatgtcccgcatctcctccatggcagtagtcaaccgcttgacctcaaaagtaacccgacggtcttcgcctaatgttttggaagctgacaaaactgactggaaggcaacattcgcattggaaaaggtcacctcaagagagtcgagggagacatttgagggactcgaagctcttgaaacagaatgctcgaacggcgacctatgttgaatcaggtcgatggagtccagaagagcactgagagagtcatcgcagcaagtcaccgccttcttgaattctgacatggtttcgatattcgtcgaagttcggctctggctgataagtgattcggaagtgggcttgagcgatattgagaaagtcgatgaagatcgacgggataacttctttaaatgtcgttcgatatccaatatctcgtcctccatagtggcaagagtagtagaaggaaagcgcttcgaagaggacattgcctgcgaagaggaatgttgcggttcttctgagttgatcagcccttttgattgaggaagaggaggggctacagcctctacaagtctgaccagatgcttttcaacatcataagtaacactcgtgagccttgcagccaaggtattagcatcggctcgaacaagacgatcgatatcagaagtatccaagggcctctctgtagtatcttgcgctgtagaggaaccagtaaaggatatagtgatgtctacaggctgtaaatcagaaaattgaagtggcggtgaagatgtgatggtttcgcatgtgatgctaccagctcgattgctaggggtaagtgtaaatcttggggaagaaataagagggatccgttgtggtatagaagaaacaaggctcttagttctaccaacaaaggatgtaacatctcttgacaagagggtcagaggatcgtctaacgaagaggagtccaagactagatctgatgcagacgacatccgctcgctcaacgatgaggcttccttgaaaagcatctgagcctcctcgtttacagcgttcatctccttggtctgatctgctattatagatagcaaacgaaacagattccgaagagacctcaacttggcgcagagtgattcaaaaacagacgatatgtgatgaatgaccttctccagtgggtggcctgcaggtgaaaaagatgaagccaatccagccaaagaggcagctaaagatccagaaagagttgaatgcagatccagaatacgggactcaaaggaagcaataggagattcatccccaaggctatcgccaatgttatcaaggccactccactgaattcgcttcagagcatccgatagttgcttctggagatcttcgaacgtacacgctgtagagcttaaatggccattcagctctctacagtgagctagcagctcagtagcattactgatagtctctcttatacgagaagcagtcgacgaagactcctgaaagctgtccaacgtggcttcaaccgacaatcggaaggtcgcatcgatcccgatatgttgcttcaggacaagaagcaagatagtaatttccttaagataaggagtagactgtaagcgaatatggtcgatgctagcccagatgcgcggaagttgggcaatatatactgcgtaggatccaggctgtaagcaggataggttcgagaagtctactgaactccctttgtcttgatctgatccctcaagcaaatattgggtgtcttgtttcagggtcagagtaaattcttctatccgatccttcgctgtgttcaacctgtcgacctgctcagccgccttgctgaactcatcaactagcttccgagctctagaaagctcttccttattcttgtcaagctctgcatctagcagagagacaacatgggagtggttctcttcctgatcgggaaatgcagggtgcgataggcaaagaaaagaaggatcgtcacggagggaaacgaattcgaatagctctgacgatataacggatgccctatcgctatactgtttcgaggtttcgatggatgggtgtgaggagaccgattgcaagacctcgctggataagttgatggtttccataaggatctttcgtaaagaatggtaggacttgtcgacactggtccgtagaaaaggttgaataccatttgtagaggtcggctcggacagatatcatttgaagagagaccatatctgactcactgtttccattgttgaatacatgcccgtaaaaatgactcccactccgtcaaaacatctactcggtcctccaggatatcttgctcgtcaaggaaaaagtttggaaccgctccttgactctgaacttctttctctgaagttttgtccaaagcgtatccttctcgaattggtccgtcggtgctccgctgagaagaatttagtgaggtgcttttcagacagacattatacgattgaagtcgggccgcctggtcgatcatgcctgtcaaacttttgtcgagttgaggtatggatacatgacggaggttggcaatccgattccgaaacgactgaaagtctagctccaaggtttgggcgaacactgtatgattggagtacaaatatttgtcgttcagtattttccgttctctctactcttttcttcgtcaatcattgtacataggaacgtacagattctttgagatctacttgctcctcttcctattgccgcaggtgctcgaacagattcatcggtcaactgcctactcctacttgactcgcctgttgtttcgtttcctatactcggcgcatcgtacgccttgatcgaccacctcaccttttcactgacgaattttttcatctcacgctcgagcgcaataaactctttcgctagcgcgaaacgcatggtgtcccattccagtcggtaagatagaaggtcaatcgtatccgctcggactcgcaggaggtgcattagcgtatcgagcagacatagagtggacagcgtgattgaaagaaggtcggtgtcctctcttgacaaagatttcttcgaggcagctatctcgagtaacgaaaaacgtatcttacgacgcgtggttagctccccaagataaggaggacaagtcagtcgttcgagtaggcagctgttcaaaagcagactaacctctcgccatctgtcttaactgaacaagctctccggcgtcgaaaattaccgcttcctcctctatccgatcctgctcatcgtacatgttctccagatcctcgtatgaaggtagttcgttatgttctactaaatcttgagttgagatcggctgagtatctggaaagctagggatcattgctatgaagcaatctatgtgacgtagtccccgtagaaactagacccaaacgtaatagtattgaatccaagaaagcctttcagtctctttgaatctggagttctaggctctagaaggtgaagagccaatgaagctcggaaagacaaataggagaacattcggatctatccgacatacctctattttctcttctatccaattcttcttttctacaaaggcggagagttctagcacatctctagagtccaacgcaacattcccagagggagatgctggagggagattcacgtcggctacacttaaaggggagtcggtaggtatcgcggtcgccattgttttgtctcgagcggcaatctcagaggtgaagtcgaccgagcccataacgggagaccaaagatccagtactagaatccaggccaagaaatcacaatgtattccagtctccttctctgttccttcaggttgctctttcctttatgtgaacgcggcccggtggtcttgtttcagccgaagaggcttctgacgtttgctctaactagatgggaatgatgttgaccagtcaagacatttatgtagcgcgctttaacgtttgcgagtaaagcggtgctcgcacatgatcgtcacgtgatgaagttccaaacttaattctcctcattacctgctaaaccgagagacaaacatgctatgtgattatgtggtacagacatacaaataccattaaagatatcgtttctaaataaattccggtttgcatatttacaaaaatctcgaagagaagagggaaaacatgcaaaaaagcctaaggtttagaagaggaaagcgaaactagcaaagagagcaccagcagtcagagcaaggttggtatcaacaccaaaggtcgaggcgtggcttgagccggtagaagaggaagtagtcgtgttcgagctggacgcaggagcagcatccttggcggaaacgttgaggaaagaaggaggaacaccgacaacaggctcgtatgaagcaggagtgctctcatccaccgttccgttcctacaatgagaagatagaagggagcaaggtgcccagaatgttaaatcaagtaaattcaagtggaaaacatgggtagcacaccacataagcccgacaacatcaattatgggatcacgcaccagcaccacgtagagaagcaatcgatgcatttagtagatcggttgtttcctcctcgggcgacagctcggtcggccatggcgcaagccaagcaggtggaccagtcctcgatcgtgttgttcaacgtcaaagttcgggctccgttggcgatcatctccagtgcggcgtcaacctcaaactccaaagtgaatgtactcgagttggaataggaactgctccagggatagttctagtataattgaccaattaggttaacatcgtctctcgtgatttgtccatgagaggcaaaaacagaggacttggaagactaagttgaataaataagagactagacgtacaggtacgtagataaccaaaggggaagtagtgttaggagtagggtttgcatcacatccgaagaaggtaggatgttggttgagtccaaggttgacgactaacgatgcgaatgaaatgttaatgagaagagtaagaaacagaggcacaaacaaggctattaatggggaagaaattacaataaacttggagactcacaggtgttcatgctggggacgtaagggaaaagaggctctacatcaagctcagtggttaaagagataagtcgcatagcagttgttcggatagcagttccgttgggctggattgatagagacaaggacaaataaaatcaaatgaaacttttcagcattgagaccgtctgatatcacgtacattaaaagcaagaaaaaatacaccagacatacccagtagtaagtcgtatcagccgagttatcgaaggcgaagatagcatcgattttccgggcaggaacggtcaaaggctccaacggaatgttttggttactctctcctccatcaacaagagaaatagtggaccagtttgcagtcttcagaagaaacattgagagcgctagtgtcagtcgccaggaagtgaggagcagaggattaaggaatgaagaaagtataacttgagaggaaactgacagggttggtatcagcggaccatcctatgaaagggttgggaaccgtagctacatcgtttccgtaggatccaatctcggcaaggatggccttggcggcattagtgagcaagctatcggaacttgatgagttcaactgaaggaaggcctggttgaagagcgtgctgctcacaccagtcacccagccaagattgtcgaaccctttgacacattgatcggtgtttgttgaattgggcacaccgttgttgagtgatgtgccgaggtactcgatgagagtgaaagcacctgcatgacgagcttcttttacgtcaactcctcctccgaaacccctgtttaaacgaaacacagccatattacaatcgtgtagaggtcgtcagcgtacatgatctttcataaacatgaggatgcgcagaagagcagaaagtagaggaacgaaccaggtcccgaactcgttgtaagagaattcccaaagagtagcgttctcgctgatcgaagcggtgttaggaagtctttcaacggcgatgatgagaggataaggcacgttctctgcaggaaggtttttcaagtcggcaatagtcaagtttggagtgttggaagctcggtactgatcagggaatagatgatcggatagagcaagggcccaaacgtccgtctgtatttcacacgagagagagacagagcatacgacaaatcagcatgcgtgcgcgaagtacgtctttagagaaatatgagggattgaggaaccaaatacgaacgatttgaatatcgtagccagcatcctttttatcataagcctgttcggtgatatcagtgtagactagtgtgtcgaagcatacagactcatcagctgaatacccaatcaaaggaaggaaggaaggagaacaaaagagaatgtacattctatggtgtcaaagaacccatcggtaggaaggaccaggttagaggagatgttccagacatattgagccagatagggaggcgtattgttcgagttcgcatagtacgaggtcaacatccaacttccgccactgtccaaatggaaattgaggaaataagagatggttctactggctgatagaaagaaatgaaagctttcgaaaaatttgacttacgagagaccagccatatatgaagctacctgtccaatctgaccagttccagcatctaccgcttcagtgtgtctcgaatcggttccccaaagccctccggctccgttaatcatagcccggtaaccacctccagagctgaatgaccgcgacagaggttggaaagaaaagaacgcataatgggatgttagctaagcttttcatgcttgcggcgcaatatatagaaacaaggcaagcacttactaagcgagagccacgttgggcgaggctgacgtgttcgaggaagtggtcaagttgagattcagatcagacgctgttatatttatagaagccaagtagttcaggaatcgatcaggctggagtcgagtttggatgtgttctgattcgacgtcagagataccctattttgtcggcaataggggattgttagcgtttgacggaagcgaaagaaatatgacgtgagaaaatgcgcgacgaaccgtagcttctcggatgaatgtgacattagatccgcacgcgacgttgtagggagcatacgacgttcctgttatccagaatgagtaagaggtgaagaaatcaaaggttgatgtcagacaaataatgatgtcgatctgccctttgacaaatgaaaaacaaagtccatacccttcccgtcatcgtcgtcgtcatcgtctccaaaaccgaacagtcgcttctccccaatgatctggatcatctctgatcgtagggcagtcttgtcgatgtcagaactctcgtaatctccgagagctccccgcctagcaaggacttcagcagcaaggtttcgagcgagagcatctcgtttcggagcgctaagcgagcgaaggtattccgagttcaaaggttggttggcaggaagggcaaacacttgggtggacagagccgagagaacgactgtcgcctgaaggacggccgggaaaatcattatctgtctaaagtgatgaacggtattgctgttggatgttgctctctttctggatgaaggtttttgtcaggaccaaactagagaaaaagacgggaggtgaagaagaagaagaagaagaagaacgaaacgtcgagttcttaaagtttcgaggaaagtaggcaagacagatagcacaagcacagggtttgtaacccgtattacgtactcctcaacgaccgatccggagctcgaccggcgagtcctgtccgccggcggttccttaacaccaatgcttgtcactgatgacgtatgtgcgctcgattgccaagaagtcacgtgattttgcattgattgatgtcaggaatgtttcctgagtgttacatcctgacatatcggctgtcaggaatacgggttaagtatcacgtgttctcttacgtgggttacccctacaggctattcgttccctccatcccttatgcctcttcgcccattttccatcatgctctagtttgcatggttcatgcttcatctttttagttctcgtgatctcgagcctctctaggctcgtcatatgtatatcttcagtggcagaccaaatgcgcgaggggtcctgatataaaacggggacgccctcgcgccttcttggataagagttttcttcaagctgagattcttgttgaaacctcttatccaaagtatattgttaatagtttggtctgcttcagatatattaatcgccagagcctaagtgtcaccccgcgaaccaagtgattacacttggttaccttcttaacaaccgagccttacatcggcatagctcgttcttgtaaccaccgttacagttcgctctcggaaagaagcagttaccggcccgtatgttgggcaagagctcgagtgattgtgtgttctttggttgatctacatcaatcatcaacggcgataccgacgacgacgacgacagcagcatcattattgttaaaagaagctcaacgacattcacataggatacggagtgttgaagtatatctgtagtgaagttgttgctatcggtttccttacctactctgcctcgaccatggaccctcaggatgtcccttctcctcttactaccgcgttcgtccgatataaccaccctcaaccgacggtttctctactaagagagttgatagaccaccactcaccgtgttcctactttgcagtcagttcgatcgtgccgtccaggtcatacagtctctgcccaaagtgggtccaattcaatccagttacgaagagaagctagccatgtgtgagtactcttcaacaagtagagagcaaggttaattactggcaactacagaccgctgtttctaatgacctggttgtttacatctcaatttcagacagtctatataagcaaggtaggtctcgactcaacctcgtcacgcatggctctgcaatccctatgctgtcttgcctaatcttggtctatcatcatacaacaattataacaacatacagtcacgatcgggaacgtcgttggcacacgtccaggcatttttgatatgttgaagcgctcgaagtggtatgtcggacgaccaataagtcagtctgcctattcaacatggacaactgattgctaatgtgactcttgggattatagggatgcatggaaatccaaggaagatatgacgactgaagccgccatgaaggcatatgttaggacacttatgacagtgagtactcctgataaacatactccatgtttgttatatagaccgatcgcttaaacttttctaacatgttgatatttgaaagatgctcaaacgatataaagatcgtaagcgagcaagagatcttatcagagaattcaacatgtactcttctatcagcctgaatgatagaccagaggggtcatccaataaggagtcgattagagacttcggtgctcattcatctagtgcgcaaactctcttttataattccgttggccttcatgatttttactctagatctcaatctcccactgttctagatacatacccaaccgactcttcatccgttcattccgactcgaattctaattcatctgcatccacttcttccacggacggatccgctctctcctacccatcatctattcccgcgcctgttcctgcacatattccatcattgtattcaaacacatcttctcaaatcaattttcaaccgctatcgtcttcctcaggtgtccttgtaatgcctccagacccacattcgccagcccctgatgttagtcctaggttgatgaacctctcccttcccaagtccggaaaggagctctctcaacagataggcctattcgatgatgagggatctcatctgttgggatcatcatctttacctcttcctatgccagccccaaagccagaaatcccctcgtcctcagctacgcccactatcaggggggcgccaacctctttcacccaccgaagcgatcggcaatatcaacgccacgcgtcgttggatcgacatcgccctgttcgtcaggttctcgactcaatagacaaaccctccactcaacccacccctccggcggaatcgacattgttacctccaccaccacctcctttaccgaatgccccagatcctcagtctctttcattagctcttgaaaaaattcaaacctctctttctgccctgcatgaacggctttcaacactcgaagatgcctcaacgatccaatatcaacaagctcacccactcataacccttctcctctatccgttcaaccgaatactctctccgatactcaacacccacacccatactgaatcatggacactgtctagactgacatcaggatctaatcgcgccaaggtttggacgcttgtctggagcctcatcaagaagctctttggggacgcgctgttccttggtatatgttttaccctctacgtcgctcttcaggccgggaagggcaaaggcttgctcggcagaagagaggccgttcgattgttttggaaggcgttttggcgttcgctgagaaatcaacagggattgagtgcgttgggtgctggggttaccgggttaggattgagggcgggcgctagagagcttcagcagaatgctttaggaggtagatcgttaattgggcctggtcgactggcaaacggtttgcgacaaactggagtttcatcgacctgaggatcgtcgagatctcacattgaagcggttttcataatttcctttggtctctctctcttcatcgctttactgcttcctacctctctctattaattttgaaaatggtggaatgtccatgagaacgctcctctcaaagttttcttctgatcttcgtttattgagggttataaggatgaacggcttgaactagatcaatgatctcgatcccatcaggaaacgaaaaagcagtagaccgaattgagggatagagatcatcgcagatatgcccacatgaaatacgtcatacgccgatcatacagcaaccgagatttcggtccatctctcataattcattctgggccttcttctacaagcgtaccgtctcggtttacaaactgatccgactgaacttattcgaccatattcatattcgcatataccagctgaactcacggacatggcatcatcatcatcatcgtcgtcgacatcctctggactcattcgagcgacggtagcgttcgatattttggggacgtgtttctcacttgatgctgtcatccaggtgaatgtttcgctaatgattttcacaacagagtagctcagaaattatacagggtgtatgtcttttactttgtgaaattgctcatcaggttctttctttccatctgggttgtatcatcttttctcatctggatatatgctccaaacaggcagtcaaggagaggtacgcagacgtgttggagtcggacgaagtaaacgccgagtcgttcgttctagactgggtaagcctttctcattcttgacatcgtgggtcttgatcggaatgaacttggactccaaatcatctgaactctatgaaaaattttgttgggatcttatagtggcattctgtacagagagattacgtatgtattcagtcatctctatctgttcgaggttacgtgatgttgactcccatccgatgatcaccgccatctagacatacctctctctcgtctctaaacacaccccgatcgctcagatagctaaatctacgttccctcgggcgctcgcttgtcattttccatccttaaaagtatcctctgagagtgacccgagcggagaagacgtcgattatgtgatgggaaaactgaagagcttgactccggttgatggactgaaggaagctctgaaggtgttgaaggatggtggggtggaggtatgggctgtatcaaacggtgggacttcagtttcttggttctatatcagcaggggttcgatagtttggtctatcactaactatttggtaggaaatcacatgatacaggagccaaggcaaccaccgagagctacctagatcaagcatcccttctttctctcttcacaggagggatcatctcttgtgacgagattccttcgcccttttcgtcttcttccgcgcaagggatcgcgaaacctcatccgacggtttaccaacatgcgcgaactcagctccttgcttctcagcctgctaaaccgacttggttcatagcagcgcatgcatgggatctactgggtgctcgagaggaagggttccgttgtggatggtcaaagagtcacgagaaagtttggccatatgacggatttgatgttgggggacgattcgatgttgagggagcgaccgttgaggaagttgccaagggtttggttaggtgtcttgaccaaatgtaatcttctattccgttgttcagcctctcgatgaatgtgccagtcagccagttagccagtcagtcaaccatccaagatgtctatcagccaactctaacgcactctgttctggcagtatgtttatccgactgcttctcttgatttacgagtccatctggtggggaacaggcaaccacgaccgtaaccatacttgtgatattcaccgtggccacgtgtgtaaccatgaccagcggttgtataccgttccctcactctctcaccatctcttcttccataagaccatcctccttccagtgcattcatacagcagtgcatcccagaggtatacacgcacgcatacatacatacccttcgtcctttgccggttgaaatactaggaagacccattcaaatcctggttggcatcttgaattggataccgtgagaagcgtcttggtcgtgcccgatggtatctcgtcctccttcaccaacatcgtcatcaactctgtcttcagtcgatacattgcctgtttcttcccagacatcctcccggccaccctctccaccgtcgccgacgacaaagagaccttttcagaagaatccaaatgaggcaagttcgagccaggccggtcttccttcgaggtccagccctctcgatcaatccctgtcaccttcttctgatttccagcagtcgagagtggggttcaaaccccaacggcctctcccggagtctgctacaacgtcatcttttatgaatagaagaagatcctcgggaagagttaaccctatgtcgagcacgatctcagcggacctcaacggcaaccgtcctagagaacacgagaagcatgggtttgtctctgagagagatgttcatacctcccatggactgagcgaaggcagcagtagaacggctttcggatcagaaggctggtcagccgacgctacatcgtcgaacacaaaccgaaagaaatcttctgggtttctaggccggttgggaggaaactcttcttctgattctttgcccccttcacatccgtcatcctctgcttctggatcgtcgccatatacccgacattctagtaatcctcctccagttccatcaaccattccataccgagatcagtctccgtcttttcgatcggtttctcagactctgcaacctccgattgccttgcctacctcttccctcaacggtcggttttctatccctttccagtcaacccctatgcgttcttacaacccaccaccccgtcagtcatctcttcctgtgggacttaatatggaaaccctgccctacaagagagcatccaatcctgaaagctatggaaccacaagtagcccttatatgatctatcaacctgggcggacaaatagggcaggcaaggacatcgagagaactttagaagaatggtcgttcaattcaaacgaactggatgagacgaacggcggcaatagagaaggttagtatcgttcatctgtttactcacgatcaaggctttctgtccctgtcaaaattgcccatcctcattcagctcggctttgttcattctgtttccttgccacgattcagataacagggtcaggaagtcttcagctcatggatctgacatcagttctcatcgaaccggcggtacatatagtgatcaatccaattcagaacttagtagaagaccatcctggtcttcttttgtcaacaccacgtccacacatgcacttccatctctcctcgattcatcaccgttcattgacatcaacgagcttcgcgctccctcaccatcgtcaacgaatccatcttcttcgaccatgacgtccgggtcgtccggttctaatccagcatcccgcacctcgctttacggtcctctcctgggctcaacagaggcttcggctagtccaggtgcgtattctcccgcagctacaccatctctctactcaacacatcaattgtcttcatcaaagacgtctccatccaaaagcaaaaaggctcctgcgcctctcgcgattcttgttcctgtatcaaaaga

SEQ ID NO: 1207 - DNA, 37865 bp, Xanthophyllomyces dendrorhous
ctcccgccctaaactattcacgctttcctcttcctcatcttccattcaccatgtttcgactccatcagatgtgacgcccccttcgggctctagcccgtcgacaaatcttcacagacgggtcatgtccacaggatcaactccaccggctgtccctgccaagaacccactccgtcatcgaagtgtatccggaacaagcgtatcaactcgagactctcctgttataggatacccgagctcgccgagcgctgggtcggtcgagtctttctcaaacagtctaatcgaatcctcaactgaagaaaagccgcaatatgagcgcactggagaggaaaatgaggacacgatcagacagaagcttcagagaacggacgcggcggaccagagctcaggtgcgcaatggaaacctcggggagatctagagcggacgagatctcagatcctggcaaaggattcattctggctagatgaagaagatcaatccgcgacagatgggcaaaagaagcaacgaagagtgggactgcttgagggggctcacattcttaatggactgaccaaacaggtacgaaatcatctttcctcattctcttggccttgtgatgtccgattcggtcctaacacgaatgcatttcctttcttcgattagacgccacctgtgcgactcgaggttgaacctgatcagactcgtcgcttaccttcagcttctgcctctttaccacaatctcgctcgcctagcacaacggctgtaaatggtgattacacatttcggtccatttgtcccttctgctcgtttgttgcgtccgtcgttgcatatatctcatcatcttgttcattccactctcacagatcatgtggtttcttcgccaactcgttctcgctcttctagatcgcagacagcttctgtatattctacaaactccgaaaacatctctcctcctccttcttcgtacaaccgctacgtctttcaacctcttcattctcctgttcttccatttacgtctgaaaaggactcggcccccacctcaaaacgggctcatttactcagcgagattcgtacgactgaaagatcttatgctcaagatttagcggttgtcagggatgtctatatttatcaactccagccttccactatttcgttgactcagaatcctcatccagaagatgttgctgcctcggagagtcagacaaccttcccttcggtaggaggaagcagacggagctctatggctacatttgaaactggtcaaacctctctcatggatatcgtagggagctcggtcgatgatggaggctcttcagcggataagactagtaaacactcgttctcgttactgcttatgcgtcctgtatcttcctctggggtgtctctgtcaacaaacggagggtacgcgtcgccccaaccgctcagatcgcccgcctctcaaagaagcatgagatccaatacatcttcctcatactttccctccctgacatcacccaagactccgataaaaccagcttcatcgccttcgccttcgacgatgacggcctcattcaaaggcgacgctacggcgagaccaccttcgacagcagagttgaggacgatctttttgaaccttgatgcgttggcggtgttagcagacgagtttgcatctctgttagaggatgtctgcgggacgactgcccagacagaggggtgggacatggtcggagaagcttttctcaacatggttaatttttccaatttgtttcttcgtttattcaaacatgtctgactgtgtactaaatactcgtctcaactgttttcttctcttcttgacagatgccccgaatcaagcaagcgtttacctcatactgcccccggcaagcggctgccaactcccggttgctcgagattcaatccaacaaacgatacatcccgtactttactgaatgctgggcgcttgtccaaccattcacttcctcctgggaccttccatcgatgctgatcaagcctgttcaacgattactgaaatacccactccttttggacgatctcctcaaatgcactccttcatctcatcctgattattccaagatcaaacaagcttcatccgatattcgacacctggctgatgagatcaacgagatcaaacgacgaaaggatactgtcagcagtgtgatgagaaaggataaggagtctgcggtgatcagtgcgagtcatcctcactcttcggttcttaaagaccatggcggaaagttcaagaaaggaggggttatgactgctttcagaaaagacaaggtttctgttccgaccactacaggggcgacctcaacctcactctttacagtcgccttccatgaacaactccgaaggacggaaaaagagtatgctgggctagtcaataagttgatatcagctgagacagctgggaagcggatgagtgggttgatgaatgggttggcgtctagaaccaaggatacctggcttgctcagatgcaaataattgaggattggagacgaatgatcaatctgcaagggatcgaatcattagaagatatcagagtcgaggcatatacagatacggttgttcagatcttagatggtccctatcggaagtttgtaagtatcttcacgtccattgattacactagtctgtcatatagttggttcaccgaccgttgttgactttttcccgttattcgttatgcttggttatataggaatcggaactacgaagatccatctcgcctgctgtgagcaaattatctaagatgtgtgagggacctcgcacaatcatccttaaacgaaatgcaaagcatgaaggtaggtcacatctgttttctgcagtcacatcgtcaatgattaatagtttattgaacgcgttttttgatctgtctctggttggaacttcctcgttacagactacaataaagttactactgccaaagctcgtggaagtgacattgacaaattccctcaggatatcgtcaatggcgctgagatctttatcgctcttcatcaacaactcctaattgagctccccttgcttctcgagggtttcgccgccattctgcatatggtcgttcggtcgttgatggaatgtcaagctcgatattatcgaggcgtacatgctctattatcttgtttctgggcagaatatccacctgtgacccctgatcctgaaggagttggtatcatcagtgggggtttggccatcatccaagcttgggaagaggcatctgctcgtcctagtgaaatgatggaggcgctaaacatcaccaagaagagtgagtgtctttctcttggttcttcgcctggatacgcaccaatcttgtcgcgagatatgctgattcatatcttaccttctatttcagtttcggttcgcttgctggatgcaccagtccgtatagctacaagctctcatcaatcgaatctacgcaggaaacagagctacccctcgtcgcgcagttccaatttttcgtcttccgccatctctactccaaactcggtctcttctaatcgagcaagatcgtcatctctcagtacgatcgctcgcccgaatccagcaacgacggatcaccctccaatgccaaacacatccgaggagatacttgccaggaacggcatgtccaaccttcgtaagaaaccaagtcagcgaggcgagtctgaccgaaccgaaagcgagaaaggatcttctacgagcctcggaatattttcagccaccaatacaccatcctgcgccataaacaggtcagatagctctatgcaattgaactcggatcgtcgatcggtttcttcggccaactcgattgggcctgctctgtctgcgatgagtttcgaagggtccgagtcgtctcattttggagagtctgtcatccagaagataacaaatgttcatgctaccccgtctccgaagaaacgcgcgtcgcttcctcatttgtcacctgcttcactcagatcgatcgatccaaggtcaccctcgtttgcagagaggagtttcgatcagactgagggagaggagggtccgggtgagactcctaccaagttgaatctgatgaaatcctcaagatctgccggaggcgagagggaagaggtcctttacaggtgccagtgtgtggcagagtttgatcttcaaggggtcgagctgtcattcatgggcaacccattcttgagaatgtaagctccttgaaaagttgaggcagctcgtagcgatatattgctaaatctttttgtctttttttatttatttagcaaacggggtgagattatcgatatcgttgaggaagtcggtcgagtcgacgagttgcccgatcattttcctcttgatgttggacgtaagtgttacagtctttttttaaaataataaaataaaaaaatgtacttcgtcctcacacgttccttggtactttcacgtctatctacagtcgaggatgatggcttgctattaggaataacatctgctggtcaaaaaggtttcgtcctttgctcgttccttgtaagtcccatgtctcctccgtgtttttcttgtctgttatgagagactgatcatacttcgacattcgggatctttttattgatctttctggggttgaacagaaccctctcttctaaaccttcttcagtgtcagtccgctattgctcgtctgctctttatcccctccccgctttgaaatcaagatgtttcctttataccgaacgtgatatacaacgacctgcttagcttacatgtttctgtacgtatatgcctgcccgcttccagaagaaagacaaaagttctttttatgtatctgccaatttatctggctcatcctttcctcatttacgaaaagttatctcatcacaatctcatcgttcttctctactttgactactacagtttcctgtgtcttttttttttttccttgttgttttatgtctgcccctccttctttccttcccttttcattcatcttcttatcctctacattttcaaacctcataaacatatctatcattgctcgatctgtaccaaccgacccaccaatcaatcaatcaatcaacaaacacaacttcactctgcttcattatcttcatgttcttcttgcaccagaagaaagacaacaaataactctataacattctgctctatactttttccatttatacatctgtctctgtttctatctctatctctatctctatccgatacgacacgatacgatagatcatacatgttagaactgaacatgaaaactcgctctcgtgaacggaaaaaagaacatattctatgtaacaacatcttttgccctctgcgtgcactgtcgatcgtgctcccgtttcaagcttgtcatgtaccttgcgttcgttctacttgatctcaagaaattccatccagagaatgtttcgtttagtctctctagaaggaaacgacgaacaaagagagaatggaaaaagagagagtctagagtcaacccatctagtatgacatgtagttggaaaagaggagaacagaatacaaaaaaaacaaaaaaacaaaaaacaaaaagcgcatgacgccataaggcgagaccgggggagagagaaaagtacgtagaatagcgagaccgagtggtgaatggggtatggtaggaaaatacatcaggcagacagagtactcaagaagagcaaggcagacaaaaaaaagaacaaaccgaactctatgcaaaaacagaagaaagacaaagcgagaagaacaatccgatgataagaaaagagagagaaaaaaaaggacagaaacacagtcggacccggcaagactagtccaactctctcacatggatgccacctttcgcgtcgacctcacactcgatcctaagaccgtcgaaggctggtctgacagacacagctctcttttttgcctcttcccaaacctcgcccgccaagctcttagctgtctggacgatcgcctcttcttttccttgctctctagtaccgtcgagatcttggccgagcgcggtccattcctcgtgagacaatgcgtgggagaaacccatgaggtacgtcctggttggttgaagacggagaatggtggtaagggcgtgtaggattccaaagtgagacggatgctcctgaaggaagagacagtcgaggaaaaggacaggccaggcaggagagtcggatgcagacatgccgagaggagtggccggtggggaggcaggaggagttaattgatccataggagccggagagaacatcggcgcgttcgtggatgcagaggaagtgagcgcatccagcgacagcggcgtcaaaaggagtttcgaccattcagattccgggatgtatgacacatctgagagataaacgatggacggatggaagatgaaacctaggcagaagaatggacgaataggggccggacccggcggaggagcgatcgcatcggacagagagtcagagcatgtcggaaggttgggagaagagttagtgggtgcggcaggcggtgggtcaaagaaccttccatggtggactgaaggaaggcaagtgagcgatggacatggagacagtgagcgcaaagttcgagaggaaatgacgtggccaactttggccgaggagaaagttggacagagagggagacataccattcaagggggttacccggattccctccacaaagaaatctcggttctcgtcaatcacgatccattcctgtatggtggttgaatggatgagaagcctgataagtagccgcttcgtcttataggggaccaagcgagtcatgatagcttacaaatgcaggaacatctcctccgccggtcgctttgctggactctaccatgtagggccacgatcgagcaatctcggacaatgtgtgcgcgctctgatgaaggagaggaatcgattacataagtatgttgaggagtagatcgatccaagctttgtttcggagaggagtgagctgctcaccacgtaaactttgacaaaaggctgaataactcccttgagggtccacccgcgaaggtcgtctagtccgttgatggctacaaggaaagcagagaatgattgtaagctgataggatacatgaagggagatggaaagctatggagaagaggatcataccatcagcgtgagcgtgagtgagcaagacggcgtctgtggaggagaaagaaagggagatgaagggtaagcgtaatgaacatctatccgttcaacgaaatttttcttgcagaaggattcgaaaacgccggcatatgtacgaaccaatctttcggagtccaaacttgggaaagaactcgagagccgagctcaagaaactctttccgcaatcgatcaggatcagcctgtgttgaaggaaagggaggagaggccgagggaggaggaagcaggagggagaagggaaaggaagagagaaaagaggaagaaccagaagcatattagatcagtactggtcgtccacatctaagccgatgagtagtagattttccgatcgatcgatccggcgcgtaatgactggacctgcacgaggcgagatgcgggatgggacaaggctcttggtggaaagacgggaagagtaaagaacaggaggactgtacgatttcgagccatctggacgtttccctctgacgaccgcgctagtgtttctgcggatgttgttcttgccttcggctgtcgttgtcgaaagacaagtcctacacgccggtcttgggtttggatcgagatgattcgtcagacatgatacgttcggtagctggccagatgtacctatcgacggagggagagcgggtaaggtgcaaggctgagctgcttgtcccgttgactgatccacaaaaatcaccgaacaaagcagcgagactcacctgttccgagcaagatgatctccagatcctgattgtccatctgatggttgagcgaacgagcgagcgagtgaagacgtcgaaagagggaagaagagaaagaagctgaacgagtgagtgagcgtttgaaagagaaagagaaggaggacgagcaaactaccaggcacggtcgctctcgcgccctgagtggagattttctggcgcggtctgtgcgcgatagttcctgaccggccggtcgatcgatcgcacacgcagcagggcgtgcctgtgacgacgtggcctggccggcagatcggatggcccatcgatcgggcgttgatgaggtaagcccgggaacatcgaaccggatctggaaccggcacgaaccaggacggttggcggcaagtgtcaaatttcagtgatttttgaaaatccaactttcatggcaaatctcccccttgaatttcacccccgaatttcaccgtctctttttgcctgctaggaaacattctccccgctcatcctcaaacgctcagaacacccagaccatacctccgaccatcctcaatcagccatgcccaccatctctgtagacaaggccgagctctacaagcgactcgagaaggagtacagtcagtcttgtccttccgttcccgtttggtggtgtttgaaacgctgttgatcctcggtcaccaacccggtctcttcttttctcttctttttttacatacgacttctcgttcgcttctccatctctgcaattcagcccaagtcgagtttgatcagctctgcttcgactttggaatcgagttagacgaagacgtgagcccgttgtttttttgttctcctctcttcacctgttcgcctaatcgaatctcatcttcttcctcctcttccttgtcttctccctgctggatagactaccgaggaggtcgccgctgccaaaaaggccggactaccgaccgaggagccggtaagtatagcctctatctctgcatctgggcccatagctacttgagaacctagacactagaactcactcccatcgcaacgttcggccatccctcaaacaggtcctcaaaatcgagattccggccaaccggtaggtcttccagtcaaacgctcaaacttaccaccaagtaaacccgtgctcagccatttcctttctcttctccttactctccctcacttcctaaacagatacgaccttctgtgcatcgagggacttgctcgagctctccgaatcttcctcaaccttcagtctccccctgactacaagctctccacaccgagctcccttctcgaggtcactatctcctcctcgacctctcccatcaggccctactttgccggtgccatcctcagactcaaggagcctctcaccgaggccagctacaagagcttcatcgaccttcaggacaaacttcactccaacttatgccgtaaccgaaagtttgttgctatcggaacccatgatctcgacaagttgacccctcctttcaggttagtctatctactcgttcgtttggaccactccgtagagagtatatcatgcggtcttcgtgtaggacaccgtgaagctcaatatctgacctaatcttctttccctccctatccccctctcagatacgaggctcaagctcctaaggacatcaagttcgttcctctcaacaaggacaaagagtacactgccgaggagcttatgacgctctacgaggtcagtcatccctcttgtttcctctctgatcgatgacttcgaccgctgaatcagaaaacgctctatacgcacgctctacagaccgatcgacacctcggaaagtacctgcccatcatcaaagactctcccgtctaccctatcatctatgacgcagaggacagagtgttgagcatgcctcctatcatcaactctgaacgttggtgctgacttttgccctacaatgcattggaacatcgcattcaaaccgttaacctctatccctcttcttcgcataccagactcaaagatcacgctcaacacgcgaaacgtcttcattgatatggccgctgctgatcctaccaagctgtgagtcgcgcacagagttttctgttactctctatccggactggccccaagagaacagatagagatgctgacgcactcgaccgggcttggcgcaacctcaaacagtgaaatcgtagcatccatcatgtccaccatgttctccgagtattgcgagactccttacacgtaagcacatctctttactctctgacatgttgaactatctttttctcatcactcgacatctctgtctttctggaacgatatacgcttggactcgtaggatcgagcccgtcaagatcatttctcccgacggatcctcccgaatcacccctaacttgaccccccggtcgacaactgcacaggcatcctatatcaactctgccaccggtttcgcccctgcgctctctccatcatcaatctccgagcttctcatccgaatgtctcttaacgcttcggtctctccctcggacgaggacgtgctgattgttcaggtcccgccgactcgacccgacattcttcacgagtgtgatatcatggaggacgcagcggttgcctatgggttcaacaacttgccaaagacgttccctaggacaaacacgatcgccaggccattgcctatcaacaagctgtcggatctgatcaggaaggagtgcgctatggccggttggaccgaggtcctgccttacatcttggtgagtttaatctgctgagcgcaagagcctcaatccgtcttgagtgcatcgacatagagagacgtctcgtacttacaccctttgcttcccattcagtgcgcgcacgacgagaactttgcttggctcaaccagaaggaccctggaaactacgcgatttccctgtcgaatcctaaaacggttgaataccagatcgtccgaacctctctccttcccggtcttctcaaaactcttcgagagaataagcaactacctcttcctgttcagatctttgaggtatccgacgttgccatccaggacgcttccgaggagagaaagagtagaaacatcaggaaggtcgccggtctgtggagtaacaagtcggctggtttcgagattgtccatggtttgttggatcgattgatgcagatcttgggcgtggcgttcatcggaagcgagaggagtgaggctaagagtggatactacatcaaggagacctccagtatgttccctctctgtatcccttctctcttttgcctcttcataaggccacctctatgtgatatctgattgaaaatctctggcttttttttttgctcctagacccaacctatttccctggtcgagccgcttcgatcttctacagaccggtcgaacacacctcccagcctgctcctccccaagcccacctagccgctgacccagccccgacctcgacctcctcgagctcgaccgaaggaccactcgacacattgaaaggcgctttgagctcggtccttccttccgtctcgtcaggttcaaaggatatcgagatcggtgtgctcggtatccttcacccggaagtcttgggcaagtttgagatcgagtacccttgttctggtttggagtttgatttggagcacttcctttagaagttctcttttctttctctttctctttttctctcctcttatagagaacgaaagaagatcggttaaaattgaagctgaagtttcaggaacatcttcttggaatagatatgatcttttttttgtctttcgtacattctcgtttcctctttcctatgcttcacgcctatcgcaagaaagaggatgaaaataaatcgacagaaaaaggctcatgttgatagatgtataccgtgagccatcatatgaacaaccaatgccttcgggggtaaagaaaagaagaaaacagataaactcccgcatggtcagcacggcttttcttcaattctccaaaaggagagaagaaacaacaatcgtcacccgggactcacctctctagaaggagccaatatgtcacaagattccccatcgactgtctgccattgacactggaacaccttgtcaggcaacggctctctctcgccatggtcccgtccgacagtcgatcctccgacttgaccgtcgtcgtctacctcgacaggtactacaggggggagcccacctagaaattctggttcgagtgactcggtctcgtctctggcattcaccacgggcgagatcgatcgagttggcaggcgatggggatgaggatggcttcgttgaaggaaaagtgggttgatcgatcccggagcgataaattccagaccaggcgaaggaggaagagattctgaaggtggtcggttaaactcggcagatggatcgtttagcgtggccgtcgttaggtccagaacggaagaagcgggtgacggaggggatgtcgggatggttcgttcagcaggaagtaaatgatgcgccaacgtctgaacggttccattcgacgtggccggataactggtggactggatgacattgttagtgacagcggcagcggcagctgctgccgcagtccgccgcgtacctatccgagaaggtctatccggaagggaacttcttcctctgtaggactcgtcgtcaggctcatccacaggaagataatccatattcccctcactctccgcctcggagggcacatcgtccggcgagatttgcctgttcagcgctcgcaaccttctgacttctagctgtaatgcctcgaccgaatcttcagcttcctcggccgcttgccttgtctcttccaactccgtcttcaagagttctacttcccgctccagcaccggtgctctcgcagctcgttctctcactcctccgtccgtgagagccgcttgctcgagaaggagttccttctgagctcgaagctgagtcacctgtttcgtcaacacgttcacctgagattggaacatcaggttcatctgttggactcccaacttgacctgactttccaacttggcgatcgttgattctgcctgttggagttccctagcagcgctcacagctcggtctgaagacgttcggtattgatcttttataaactcattgtcgtcctccgttgacttcaaccggttccgaagcacagtgttctgttcctcgagcaccgcattcgccttgttgatcgccgagagttcgctcttgagcagccggatctgagtagacgactctggggagggaactgcagccggaacaattggtgcagaaacgttgggttcagcctgaatgaaaagacgagagattgcggaattagcgccatcaaacggccaatacacgattctgacaaacacggagagatgcttacctcaggcttcttataggacggggcatcaacagttttagactcgtcggctgaatcagcgtggaaaacgatatgagcatgatgttcaaaacgaaagcgagttcagaaaagaagagtatagcaaactcaccgtcctcgatcgagatgaccgacattcggtcttcctcatcgaccgatgggcctagtacttgtgagtccttcacgattgactcgtctactgctattttttcgtctataaaggattgctccagtcaacaagtagaacgaacatgtcttcatgtcgatagagttgagacgacgataagcgtacctggttcttgacttgttgaagcagttgatgcggctgcagttgtgttcgtaagatttttctgtggaaccggtaaagtctgcggataagaaatagggactgaagtggctattgtcggtaccgttgtcgtaacagatgggctgttccctgtcacgagcgtcttgtttatgaccgaagtggtcgcttgaggtctaaatgtaggcggtggttgatgagatgatgttttggactgtgggacggataagatcgaatgcggcacatctgacggcttggaatcgattggttgggaaggtttatccacagctgattgtgtattaagggatggttggtttggtaacacggaagaatggacatctgaggatgtagaatcagagatgctttccgactgactggtcgtcgacgccttctcagatttgggttcatgagcagagggtgtgggctgagacgactcttgatgatttggtggagtgaattcctcaatttggcttgacatgggctctctcccctgttctttcgattgacccgtaacagaggcagctgtcagggtgatatctgaagtagatgtggaatctactgatgctgtcgaaggagcggtaacagtagtatcaagtgcaagtgcagatgaaggaaagcttgtcgaaggattcgatacagacgcgaataattgcgaataaggagccgttttatctgcagatggttggcttcgaatggacgacgttgcctgggagtcgggtacgatcgtgcctttgcttgagttgccttgagaagactcttgattcggtctctgagtcacggatgcgaacacactattcgcctttggtgcagcgacagagaaggggaatgatggaacgttcggaggaacggcggtacttcctttggcagaaaatctagcggttggactggctataggttttgagacgagaggtagtttggttatgggatcggagggtgtaggcttgtcggaaggaggttttagctgtggtgaaggtgacgaaggaagtcgatcggcagctatggctaccgagagattgtcgctagcagaatgtggcgcattctctgaaacaaaaggttgaatttgatcggtggcctcgagtatcgtatgaatgtgggtttccgagcttgtcgaactcgatgcaggcaggttaacaaggggcctactgactgagggttgggaattcaaaggttcagaagtttgttctggaaggtctgcttcgtcgatgatgatgacttcatcctctaccctttgagctgtggtctggttattgttgggtggagagggtcttagtttcttctttgaagattgtttgaccgacgaaggctgagcgagtcgcgtggtctttggagtagaagcaagagagttggatgaaacaggcttggaagaaatgacactcgagttagatttgctggtcgatctttgacctattttagacggagactgatcaaagaaatctctgatgctggatgaagacgaggtcggttttgattgcggcgaaagctgagacgtgctagccgttggaagagatgtccgagttcgttttggcggaacagtgcttgtggtagacgatgtagactctgacatggacgcgcatcaaaaggtaggtagtcaggtgcaggtataatctcgccgaaggcatgagagtcgcgttcgaacttgagcatacctcgtttccgtttgtccttcaatgatttgccttcgtgcgcttccttcttcttcttctcttcttcggctttggaggcctttagtagctcccactcttccatgagtagcacattgcaatgatcatagggttcccaagtcggctcccatggcttgttcgttctcggatcgatgcctctgatggtcgcattcgaaagagagaacccagaagggtgaatagaggtcagcatatgacgagagcgaaacactcagtaggccaatttgatcagagacgtatcagatggaaagaataattgaaactgtatacatacgcccactcgaccaagaacttgttccgcttctgcttgataatccgaacggcctgaaacatatcgccttggtcgctgttgtcttcctctgcctctgcttcctcttcctctacaatgccgatgtcgtcaatctcatcgatctcatcaatctcatcgacctcatcgtcgttatctgatcttttgatcgttgcgagtgtctttctcttttgagatcctctcggtcttgcataggaacccgctacagatgtgattgaacggccctttggcttctcgactgtctttgtttcgtggtcgtcactgccaaatcagaacagcctggtgagcgtcgcgtgtctatttcactctctttgaaagtgtccgaccagatagactcacgatgagaacggcagggtgtttcggaatgacatcagttccgaccttgagcgagattcttgattcgaataatgtctggacggatgatagttggagtgatggaagttatgaaggtagatgatcagaagcaggacgaacaaagaagagagtatgcctatggggaaggatgtagccggaaagagactacaaacatttgtagtatgttttgtagtgatcgccgtttatttccttatccgccggtctcattagtcttttttcaaccgtctattcagtctactacgaactttctctaataccactctgccctatttttcctaatactcttgcgtagtgatatccttgattctgcctattgtctcttctagtctctgtccacactacaaattctcctagtgcaaatacatttcttcctaatcaaccgcgtagtcggcctgttctcgaacggccccgcgtttctctcaatcatcgagacgtctctccttcccatcacatccatctatcaacctcatcaaatccagccttctttcgtcctttggtatcctcatctagcccaatatgcctgttccagtatgtcttttaagatcggtatcatacccttctggtgctcatgctcgctaaactgttgattctatccgatttcagtgggaaatgctcatcccgttcggtctcatcaccggtccgtccctcttgtccttttagcgttcttcctatttgttcctccggaaagagcttaccgtctttgtctttctctcctctttgttgtcttgctcatcgatcaacattcacctctccttctttttttcctataccctccaactaatgtcatctttgaatagcaatgtttactgttaccggtatcggtatggaaacttccttcaggtgggacgaggattggaaggtccgttgtcttccttctttcgtctctaattttccttcctcatgggcccactccactttcggaaccttttgatcatgtctcttcgtggcctccgaaagttttgtagatactgacgacagacggatcctcggattggatttatcttggttttgtatatctagcctaagcgatacctgcttgacccatgggagatccaaatgatggaacgagaccgacgattgaccgggtccaaacgaggtcaacgggtatgtctttcacttgcctctgttttttgaagctatcttcctggctgtcgccgatatcttgatctctatgagatctgttggagagaaacatacgacctgataatcggatcaactgacgtatcttcattgcggtcatctctctgcttatttctcctcccttccatttacgcgaccgaacgaaaacaggacgatcctatagcacctccgaactttgacacaagctcgatcgttgacgtccgtggaaagatctagttctcggagcctaaaccgaacagtgtgttgtagcttgtatgtgtgtaagaaacgtcaggtcaagggatttgtatgcgtttatttgtttgtttagttctctttgccttctgctcctatcttcgttgttgttattcttttgttcaagtgtgattgggtatacatatacacacagaagagaagagagattgagtggtgcccctctgtctgtttaccgtctctcttgttagaatcaagcatgggcgtgcgaatagagcaaccagtccatagacacgcaagacgatcgtcacgttcaatgcagacgagcccatgactctgatttcttaccaccgtcctcgtaaggtcatccctgaaatcatatattcctcataaaataggagaaagagagagtctagcctgtgtctcccaaatcgattctaaagggaggcctctagccaaacgcccatggatatttcaaccatgagctattagtcgtccgctttgtcaagtttggcacccagtgcaacagttaaaacaaaacatgatgaagaaactcacatatacccgagactagaattcatctcttggctatcctgaacttctatcgacccagtcacaaccgtgatcgtcgttgtcgccgtcgtatcttcttctctgtcagagctactatacgttgggtcgtcagcgatcaacgaagacaccgcgctttcactttcactgtccctaccaccggccgaaaatgaactatctaggatctcagagtcaaatgctgaggaagatgtggttagactggtagattgctcgagagaaccagctcgtcctccctgcgtaaagacacgtagttgattgtctgggtttttctcctccactttcaagtcgagccgttgaattttcatttggtttctcagccggaaacgctcttccccatcctcactctcttcgctctcgtccttgatggtgtccctctttcgttttgatatcacctcggcctgtcgggttatctggccgattgagttcgtcccggatgcacgaacgattgtcctgtgattcagaccgaccagatcgtcctggctgtcatcatcactcgagtccgagattggatctgagtcagaacctgatgaagaagaatatatgccatggtgattaggtagatataacaaggaccgatgggcacgtttcattcttggcgacaagtctggaaatgagaatgcggtcgcggcttttctgggaagtgaacgagcaggggaaattgagactgagtcgaggtactgttcgtttgcaggtttatcatcgataatctcttgagaatctgcaacaggcaatgactcgtcgtcctccgcctcgtcgtcgataggactagatgagatgagctcgatggctctttgctgtcctctcggcagtgtatctttatgatcaaccggaggtcgagcatctctgatagcgctgacagtgttgactggcagtcccttagaagaactgtcagcggttccttcagggtacaagcgaggcttcacgttggactgaggttcaggaggtatgaccgagagatcgaagtctggttcaaacgataatctcggtcttcctcccgactttcgtctggatcccaaggtcctggcatctttcaaagattttcggtgggccgccgccgtttgttgttgtggtggtggtggtggtggtggtgcgcgtggggaatggaataattctcttgagcgcgagtcagagtgaaccaagtatgacgttgaaggaggagatgagatgaggggctttacaggctgaacgcgacttgttgcacgaggtgatattatctcgatatcggaaatattctccagagagatatcggtggtgtttgtcttcttgaaggaatatgatggtggtaaagaatcaaacggttgagaatctgctacaaaatcgtctaaagatgccgtcgcttgcggtttgatgaaaggggatattgataaagatgagctagatgggaaatgccgggatcttgattcaaggtctgatatagactcagcatgcgcggtgatgatatcattcgaacgaataggaagaggggatgttttggtcgaggtagtaggtaacgatagatgcgttgatggagtatacgttgagtcgttcgtgtgaggataaccactcctttgttgcggtggaatggaatggtcaggtgttgagaatgaaagaatcgtagagtctgagatcaccctatgtggtacagatactgatgtgtgtatcggtatgttctttacttcttctctgtgaggagatgtcttcgagagagcttcctcaggcaacgagggaaacagccggtccatcagcatccaaagctgaacgaccttctttgcccagtttgatagaccagtgctttctgactcccattgaagacgaagatcgaaccggagaaaagaggtggtaggcgcctcggcttctcctcttaaggccttcgccaggctgagagtttgaacacagaaagccttaatacccgcatatagtcggcatttgacgtccaatttaaccgataagaaaagcctcacctctctacagagccttcggtcctgttgataatctttctaacgccttgtactttgaccaaggcgtttgtccgaaattttgcaaacttagtgttggtcgcatggacggtcttcggatccagaactgacggctcgccaataaagtatgacgatggtagaggtgaaggagggaaccacaggttgaccagtctcaaagagtgctgatgtgcgcgaggatttgtcattaaatggtgttgtatatgctagagccaagagaagacatttggttttggttttggttttgcatttgatgagatgtgtcacgattgaagacgggaggaggctcactaacccaagaagccaggatcaggaggaatgcctcccccttttcatcaagatctttctcacatcgaacatttgacattctctttagtatccttctatccttttcttccaacttctcccattgtatcgactttgctcgacttgctcttcttatctctgagcagagatgggcattccaatatcgaaggagcgacacaagaccttggagtttgggtaacagatgaagaggggccgaggtggatggggctgtaggaagtagctgatcgatgagttcctggatgatgataggcgaaggaacagacataggatctctgtctcgtcctggaattactgagtcttgtatccagcgtgttcttgtctcgaagaagccttcaagatcgatgtaagataagacaggcaatgaggacggacgaacgaacgaacgaaaagaacagaagagctggtaagtcagtcagtcagtcagtcagtcaatcaaacactggtgtctagggttatagctcgacgcgacgcgacgcgttgagacgcgatatgcttacgtaatacctggcgtcatccccccagccgaggcaagagccgagccgctcgtgaacgacaaaattcaaaaggctttctccatcttaagctcattctcatctaaccgactcatctcgttcccatcattcccatcattctaccgccatccatgtctgttcgagcatccctctcttccgtgtctagacagactttcgtcgctcctgctgctttccagatcagggcaaagcataccctgcctgagcttccttacgcttacgatgtaagacttttccgtgttctcctattcgtcgctttcttggtttttttcgtcttcgccctctagctcttcttcgtcctttctgtcctgctctttgttgttgatattcagctcgatagactaacccatctcatctcctggacattcttttactggaaacgtatcttgtccttggtttttcttggctttggttgaaaattcctctccactcaggccctggagccctccatctccaaggagatcatgacccttcaccacaccaagcaccatcagacttatgttaacggcctcaacgctgccgaggagagctactcggccgctgtgggcaaggaggatgtgcttacccaggttaagcttcagtctgtacgtctgaccgtttttttatcgaccggaacgcctggtgaggagggagatgaagtttgatgagcgctcatcgtctagcacgttgacccgatcatacaggctctcaagttcaacggaggaggacacatcaatcgtcagtgatattcttcaaactcttgctgagcaagtcaggtcaagctgactgtttcgctttgtttctgcggatctatctcatccttgatttggcatgatgaaacagactctctgttctggaagaacttggctccctatggatccgaggaggctaccctctctgaaggacctctcaagaaggctatcgaggaatcttttggttctttcgagggtccgtccatctatcttcctattcagttgtgtttggttccggtatactcatctgttttgtttccccacaaaataaaaataaaaatcttgtcctctccgggggttcgactgcacgttcatagccttcaagaagaagttcaacgctgacaccgctgctgtccaaggatccggatggggctggcttgtatgtatcatatcctttccatctcaaactcttctcagagtctttttccttgagacttcaaactgactatacatgtttctacaacaaacaacagggcttgaacccgcttactaagaagctggaagtcaccacgaccgccaaccaggaccctctgcttagtaagttgtttctacatgattttctatctcaacgcgatctgcatgattcgtcactgattcactggattctcttgtttcgtttttctcgggatgatttcataaacagctcacattcctatcatcggagttgacgtgcgtatctttcttgaatagtcgtagcgtctgatctcgttttattgactgacgtgttgcttctgtccaaatcattaaaaaaaatgaaaacaaataatcgattgaccgacgaaaacagatctgggagcacgctttctaccttcagtacaagaacgtcaagcctgactatctcgctgctgtttggtccgttatcaactacaaggaggcagaggcccgattgcaggctgctctctaagcgggacgaaaagtaacgacatatgaagggaggatcaaatatcgtttcttcataaacaactttcgaggcagatgggagagtacgtacaagagaggtttgtatggagaattgagtttgttgacggttagcaggttatgatatatgtagctatagtctagtctaaatctgaaagaagagaacaagatggtttgtccgaagagattgagagatcaagcccggtcatctgatgtcgaacaaacatgccctggtctgccaacagtttctagcacattatgaccatgttcatgtgtaaattgggaaatgagccagaaaggtttattatctaattcattgattcatgcgactatggatacatatgggatttccagaacaaacagatgcaacaaagcacggcattttccaaagatcgagtcctcccacaagtatgcggcaaggtttgttgttaagagatataaaagcagacgacaaaacaaatcgtttatcgaccctgtgcaccaacaccgtgaccgtttgacgagttggtagagttgtagttgttgctgttcaaaggagctccagactggacgcttccaagcttcaacaacttctcggcagcgtcgctgttcgggaaaagaaaaggcaaaaaggaacagagcgataagcatatgtgattctctacttcttataggctcttagctcaagtcaactcacatgtctttggcggtaccgaagacgttctcaagctgctgcttggaagcttttccgagcttgccagtaggtccctggttggagaagaagatgtcgaaggctaagggcgatgaaaagcatgaagatattagctatcggcgcgataaaagtgtgacgagatgaaaatggagaaaagatgattcgcaccatcgacgacctcgaccaaaggaatggaggtgtcaccggccttccacttcttgtactcctcaacgttgacgaagatgacgaagcagtcggtggccttagcctcgggctcgtagatgctgatgaaacacaataggtagtaggagaggagaaagagaagatgatgagatgtcaggatgcttgcttcactgtagatggaggaagaagatatgcgaagcaagacatacactttggaaagagcttgaaccattgtagaagatgagtgtttaagtaagatgtttttagtttgtgtgtgtgtgtggctgagagatgagatgagatgagatgggatgaagaggaagaaaaaaaagggcagaaattcttggacgattccactttatactcctcctacgaagcctccgtctggacggggtcccagaccgtctagtgacgtaacccgggtcttgttctgtcacgggttttcttccgatgacggcggatgtttttatgatcacgtgacatgagcctcagatggttctatcttgttccaccagatgcaatgaaatttccaagaggccagaggacatcaaattgatagcatgggtattgagagtcaagggaccgaagctggtctagggtacagccatgatctcagtcagaccatattgatgacagttcaagcagtaaggacaactagaggacgcttgtcggtgatagaaaaacgaggagctttgggttttacgctcagcccctctcagcgcattcacattgatagctgtccattcatcctctaccccatcatctccgatttccatttctcggatatacagatgagactgtggatcactaccaggttttgttgtacttggatggtgtgagaggaggcagggctgaaggcagcttacgtaaaactatcagcttattcaatatatttgaatacaccttattcgagagcctctaacgcctagagcaatctcaagtcggttcgctcgaaaactccattgaaccctctcggccagtcagacaatcaatagtacgtctgtcgtcccatacatcctgatcttttgcttccaatctcagaagggatctgatcatatctccctgtacatcgcggtataatcaatctatctagctgctctttgaagagaatacaccggcatgatcattttaggcaagaacttagtcgagaaaaagtcggtccgagtaagtcttcgtttcttgactattctccatcgaatcccctgttcttaatttccatacacatcaccggcctacatgtttatctccatactaatgctcttcctctgattttcgtctctctttcttgatgtgtgccagatcggactgacccagttttttggaatcaaccacgctaccgccccaagaatccttcaacgattctcaatccctaaccgagcgcttgtctccgacctcaccgagccccaagtcgctgcattgactgctttcctttcatcaactaccactgccgagcttcctcctcgaacacccgttgtcgatccgctaggtaaccgagagcttttgaagggagagcctgagaaaccgctggcagagcaacacagagcagcggctgattggggacgaaacatgttggttgagcaagagctgaagacaaagtacaacaccgatatccagttcctatacagaataggaacttaccgaggaaaacggtcagtcgatctttttcccatcttcttagtctttatcgtattaggaatctctgtgacacttgatcaacgagctaattctctcttcctctgctctctgcgcctctcttctttatcgatcgatcaacctcagacacgccattcacaaaccaatcaagaccagaaaccacaacggtggaaccgcccgtcgactcaacagactcaagcgatacttttccacgtacgtcttgtcttttcgttcttgcgatcctatgctcaggatggaagtgttctttgatcgaacacattggctgaccgcgttttcctctttcttgcattcatctgttttaaaataggtcgactgcttcagtctcgacgactccttccccctctccgatgtcatacgctgggcttttctctagacgtttccgttcacctctcttctgataaacatatatgaattcatcatcttccatctttctctcttgaacattcacgagtttcgtcatctcttcaggtcggctacattgaaacgaaatcacactctttcttgctcgaacggcgaattatttgttatcgatcgactctttagatcacgtagcaaacgttaatgctgtctcccggattctcaatcgagccgacctttctcctggccactcaaaccgaacccactcgagagaagcagctgttgtcatattacctttttcgttttcaacgcaccgatcagatcaagggtttcataacaaatattagccaaattatgaaagaagtcaatcgatggacctaaagacgagatcggcgagataaatttaccttcatctccgatattgaagttgtacgtcttgtaaggtccaccaggaacatcaccaccctgtttagggggaacaccgactttgaacatgctcgagaatgatattccgaccttccatacagatactttgctttcttccagtgagaccgtcacccttttttccaatttgacaatacatccgaaagattagcaagagtaagcatatgtatgattgaggattaaatagaagaaaagaaaggaaactgacaatctgcggccatctggggagaaactgagagcagtaatattgtggttatggttgtccagtacatacagtcgagtggcagttttgaggtcgtatacaaccctgtttcccagaacgaaaagaaatcaaaacgcaaagatccaaggaaaaggttgaatgagtaaagagatgtcgtatcccaaagcctcttgcaaatcagttacttacgtcgcgccttccagagtaccaacagctaatttctgggactggccatggaaggatatcgaagggaaactgcgttggatcaagagcgtgtcaatccgtgcagcacatgataacaaacattgtgagctttccacctcatcaatgtctataccctcaaccttttgagaattctgctctaaaagaaaccgtggacttacgtgttgaccaaagaatccaagatgactgttgccgtctgctgaactgcatccctcatagtcgacaaattaggatccagagacttgaccactgcttccacgatctttccaagcccaccaaacagaactagcggtctcttctttgcgagcacagcaacgagtttcattgatgcattcctctgatcaggtgattccgcgttcagaatatcatacgatacggtcgtcatgaacaaaggcgtgtttgtcgaggcgatctgaagtgtggctgttctagcaagttgggacaagaattgagctgaagaggtcgagcttgtcaacgtactcgtcgaaggagaagacttccggatagataaacggaaaagagatctgagaatctccatcgagtcaacgtaatgttgccatacttggaatccggatgaacagagctcgatagcaatctgacggtatggggagtgttcatcgtttagatacagaacgatcgaattcgatatctctttcaagaatctagacacatgccacaagaagaacaggaccgagagaaactatcagcttattgtatgaagttacagtgaacagtatagatatcttactgcggagccaaaagactatggttctcaacagaaatatgcccaataagcacaagtgcctgtgccgctataggtttgtcatggtctgaggtcgtttgatgcacaggaactacaccgtactcaaatcaaacagataagaaaggtaagctcgagtagaacagtaccaaaagagaggtgtcacagaaggaagacagaacgacgaacgcttgtgtctccaactctctgcaatttctacgatagactcgtcgactgtccgcgcgagaagagatgcgaacagcagtttagccgcctgttgtatctccactagatatacgtagagttcaaacgcgggaagaagaaaattgagtgttagaatataacatccaagctgccagatgaaaggcgcatacctattggatgtaaccagtactggacgtagaaatccaaagtagctctctggtagccttccccaactgcttcttgcagtcgcatagtgtaaaatgttgtgatttcgttcgctgctgattcgaagcctggcatcgagagaggagaacggttgaaagaaatagaaggagcaacggtctcaatcgtgagaggagctatcaaaatctgccaagctatggagagcgatactaactttctaaggaaacgtatagctggaggatgctgacaatagtcaacaaacgtctacctgtgtatatcgaggagatcttccaaacatccgcagattctgcagactcctcgaatatcgtgaagctttgactcgcactattcgtcctccatcagtacagaaccgttagtatttgttcagttctccgtcaacatataccatagataacaaacaaaggaagggcatacccttgtagtccaacttttggccaatccaagtcgtctggctcaggtctccttaatcgaagtcgactttcacagcagtcatccacctctggatcaaggccccaggtcaagaagattgagagcagtccaccaagcttggtcactctattgctgaccgtctcttcgagcctatcttgagataaaattgtagcagaagattcggcagttttggagcggttgcggtctagtctttgagtccaagtggtgatcagagtaggaatatcaagtatgatggtcgatgctgtagagaagaagggaaaaagctacgttagcatacatcggtattatcggttggtatatggtacagtcacgatacagtcatgatacttacgatcaacgctaagtggagtcagcgttctgatatcttttgtatacgaaagagatttatccaaggacctaagtatgtgtgtatgaagaaaaacagacttggagttagaatcagcgacgcagcttctttttgttcatgccagcaacaaaagaggaaaatgagaatgaaaaggaaaacgatagacgaacacttcataccatcctccttcactggtcatctttattgcttgcgcctcgtccaccgatctcaacagctccagtgtgtttccatcccatattcgagcaattccttgcgcgtagacaagaagaatattttgtccttctccaaaggccaccttagttatgaccgagaacgaacctggaatgatgtaaaggctagaagaaggtgccccaaacacgcattcaaggatgagtcgatgatatgataactatcttccaagatatactttataagcatacgaagactcacaagctgaggccttccacatcgatcacaccgaccgtcccatctttagctacacacaaaacacagccctgtaactttccagctcgttcgtcgttcagatagactaattggatgacctcgcatgtgaacagaatccaagatttacgaagtgtacatgatctgtaggggggcaacagtttgattgtatcagtccacttattgggaaaaatactcaaggcgaagatcggacaagttctctgagtagcaaaggaagaacataagcggagaaggagtagcttctttgaactaactttgaatcccagactccaacagaaccatcgtcagcacctcccacaactagccctaaatcttcgatcaccttcaaacacgttagtccccctccaagccctgccttctgttctacctcatcattcttcgtagggctaacgtcgaatacatcttgtctggtcacttgcccggttcctgtttggtcgaacgtgatgcacatgtcgtatcatcaatcatactttactcgctcgattcgaagatcgaaaagagagaacgaaccgtgtcccatccaaacatccagctccccgttcttggagacgtccaatacacttcttcttccttgtggaggtcctagtacgtacaacccaggcaaaacgcctagatcttttacctctcccggtgtcgttgaagtccaagacgccatgtgcagaccatcgagcttcatcgacaagagcaggacgaggcctttctccggaaagaatcgtatgtggaaaggaggctcatcagtcattgggattgagtggattttatccaatctgaccaacaaatagcgaggatagaatttaacggagggaggaggcgagcgaagtatgtcagtcagatacattgctgattcaagatgaggagagggacaagacagactacctaccgatatattgtctttgaatggggctcagcgggttgtttagctccattcatattcgacgagatcaacttgtacacgcctatctccgtctagtcgtatcgaaacatgtgacgtagacatatgaggatgcattgacagcgataaccacaagaatggtcaaattgggaggaagagataaagaccatacatcagagtttggcttgaatagacacagttgataagagacttaccgaagtgccacagactaagatatcttccataggtgttacccatagatcctcttcaacttctaatttcaacgacgtcaagagtgctactgatgaatcttcgcctgtggacgaatccggtagtgcgtaaagctaccctcaccatcccaaatgttgtacaggaagagttagtctcaatggctctcgtgtttattttccctcgttttactcaaacacaatatttaggcctagcgcagagagacatgctagacgtacctcgactgtgtttcctgtgacccgaacgagcatgtctttactccaagcaaaaattgctctttcaaacccagtcggcttttcccatcttgtcttcctttccttaccccactcccaaccgacggtctttccaagtccaccgagaccatctgatccagttccgacatgatccttctctcgaccgctagaatctctcaactttgatcggaatagattgctgagtttcgatgcgctggccggatgattgaaacctgccgttcgatgggcgctgcttgtcgagggtgtaggcgagctgggacgagtctctaatcctagagcggatgctgaagattgaatctggagatggtaaggataaacagagactgtaccaggagaaattgtcatctcacatctttctgacggagatggcggagagaaagaatacggagagcattgagaagatatgcaattgatcggggaacctgccaaggtctgccaaggtgtcgataatgacaggatgatttccggtgtagataaacctggtgtatcctctctgacatagctttgaagagtaaagattcctgtgaaatgttcacgaggggtgtcttcggaggccatatcgaaacctgagcagggattctcgctcgaaaagttgttggacgaagctccagcactgatcgtgaatgatagcgtggtggaaggtgaagtcgacgaagtcgaaaactttgtcagaggtggaaggaaaccttcgaaggagtattccacttgagaggatgttaaaacagaaggaggaggaggaaccaaggcggtgaacaagcatacatcatctgttaatgagataattgatagttgcctagtatgcgtcatcgagatatgtggttaagttatgatgtctcacgacacagaggatgaagcgacggtgttaaaggttaagatatgagacgaaccctccagcctgtagacagattatccaaccacgatccttccaaacttctaatccagaaatcattcgctcaacagcctttcctcccagaatgatcttcctgaatggaccccgcttcctaacctctccgccttcaatattctcatgtactccatctaatcgcgttgactgaaatggaactccctccaaagaaggcgagatttctgaggtcagtgatctgggagatggtatgccttgaacgccagttgttgctctattagcgtaattgagtaaagcactagaagaaagcggcgaagttgccaatggcttgaacgacggatctgaagctaatgtcgggcgagcaggatccaatgtcttaacggagcgactagagagagacggagtggatgtccgtcgcatattggaaggtcgagaggacgatcctatttcatcttcggacgatcggcgggttccggagaatcctcccaagacagtggagatagatgaagacgaagtattcgggtgtttccccgcaaggatctcgcgtagatcctcctttcgctccgctacggtttcatctcctggactcagcactggagatttgggcccaagatgagagacaaccgagacggaaggaatttttgatcgatgtaggaccgaattggatggagtaggcgaaccggaggtgagcgtcgatgagggtaggagggggtgtttcgaggtcatacttgatgacattgacgggctaggcccgtgcctacggtcaccatgaggagtagatgatctggaaggggcatttgagcttggagcttgaacttttgacggtgtaggagcagaaggatgatagatccaaagattaccctcagatgtacctagaacgatggtcggttgggaagcgaaggatgatgatgatggtgatagttggtagctacatatggatgccgttggagtctctggacccaaatctgagcatggtgactcaaacagaggcagattaatcggcaactgaagaccggacgaaagcgccatcgcttgcagaggagatgatgagactgatcgcttgggtgatatcctcgttctcgtccttctactttgcagaactgcacttcgaaggaacaggacgaacgatggtgatgatgaaatgttgtaaccaaaagaaggttgtaatctgcacagcaaatcacgtgtctatggcaatttataacatttccgaataagcttgattacgcaatagggttgtaagacgtcacgtgaaacaccggcccgaacaaacccgatgagcggaccggttcttcctgctgattctttcgttctcttcatccttctcatactaaccaatctccctccacactccatcaacgaccatcttgaacgcttgctttttccccctcaaatatctactcacatccatccgtttacctattcttgaactcaatggtgtgtttgcatgtttggttgatacatcctcacggttgctcagcaactgatgcttgatcaatttccccactttccttgttagtcttctcacccagccaacaccctttccggactttgtttcgtcggcggaatcattggtctgtctcctctgcgtctctctcttttcattgttcttgactaaccgcccgcctgttttcgcttcttattcacataggattcagcaggacacgatctatccctagcatagtaggcggtttcgctcttggatctctcttcgccatctctggaatgagaatccaggaaggactcgattatgggtacgagacagcgggtaagtcgttcttctcttgcttactttcactgctatacatataatgttctcagaggacaagagatgccaagattgcgaggtggtagtagagagatgattggagagatggtgagactggtgtcataggacaaatcaacctatcacacgctcgcccttttctcaaccaatcccagcagacggatctctactggttacattcccttcttcccccacttatgctttcttccatgaccgtttccactctattctccttctctcttctgtcatcttcaaataggtctgagatttagttagatctagtccagagtcatccttgctgttcctcacccttctccgtcccaacatcacaaaattcaagtggagaaaagtactgattccatttcaacccaactcctttacacccaagctgcctcttctgttttgctcatgctcgctggcctacctcgattccgaagaggacgtgtgcctcaagtcttgagttagttccttctcctcttcctctatatcgcatttagacattggccctgatctctcctcgctaaacctcgattttcttcctcctcttctgatccgttagctggactaggtctcgctgggacaggatactacggaaagaccctctatgatttttcccgataatacgcgtctttcgtccttatcgtcctttgattcattccccctctctgattacccatgcccatgctagctttctgccactacttctcgtttgacaggtgtatttgtactctttttgttttctcatatcatgatgtttttctaactcgagaggactgagatcagtgttgtgtcagtcgcatacgtcggatggatagtattggcgttagacatgacaggccgggaagtcgatgttccatcaagcatggacggtcatcttcgagagataaactaagaataagtcacgaatgatagtgaggtccatccattgttcgttattagtgagagtcgtcgtcaggttgtacagcagagaaggagaagaaaaacagagagaagaaatagcacaagagaggacaccaccgatcgattcttaatctagttgtgtccgaatgtttgtacgagcgtggggtcgagcaatagtagaggatgcatgaggaagagtagaggagtacatctctgaaattgggttcgctctgatcacagtcgccttcctttcctgtgagatttgaagttcctcatgtttctgtttgattcaaaacggagaggtgagtttgaaaatgagctctcatgatagcatcatcgagagggaaataagagaagacgagcctgttcccttttctgctcctcttctctgccccgttctctttctcgctctcgctcccttctctcgttctcccaacgcgctctttccctccctcgttgttcgactcgtctgcccagcccgcgctcttccttctcgatttctcctgcgcgttctgatcgtatccgttcggtccttcgagcctgtcgagcttcatcttgaagatgaatttctcgaaaggaggggacgcgtcctgctcgagggctgatacatctcttttctggtcttttttctcgtccttgagtggacaaagcgtctcggtttgatgatcttgaagctcttagtgctgattcttgtgtagaagaggttgatttggtagaaagagccgccgggtatggatagtatcgctgtcgatctggaaccacggaggcagtatccgttgaggaggcggaagcagtaaaagtgaaaggccgaggaacggtaaacttcatgttcttgtttgagtggtgcgtggttgacaacggacgggatgaatgagatactagagctgagtcagttggtcttggagttgaagaactttgtctattccgtttgtacgccgcagaaccatcgagggactcggcggccactgcggtcgtattgtatccgtgtacagagatctcctgtctagctcttttggaggtattgagcgaagcggtccttgtccgggagtaatcgacttctgtcttgacggaactcatcgcacagactgcgttgggtgcactcgagagttgctgcacgtccagcttcttcctcagacgagtgaacgaagctctgataggtgacaactcggcgatcgccgaggtctcttgaagcgcgcctgatgggccttccgtgtcatcgtcaacagactctgctggcctggctcgacccctggcaagattaggagtactcatcatgtcttcgagagaaagctgaccggacaacgaagattgcgaggagagagaagaggaagagagaaggcatggttcggtggtagatgtaagcagaaacgagtcttcgagggcatgcgcggttgtcgacatggctgtcaatagtcgtttgactagatcctaggatgctggcaagtaagagctgatatcaagatgaaccggatgatctcgataaagtatagcaaaaggacgttttgtacctccacacaaggaagaaaaccatgtatgttctactggagagggcaggtaaaaacccaagagaaaacagtcgcgtccaatggccatggttacaactatcgaccgtaaccaatgacgcagccaagacgcgtccctacccgcatttaggtcttggttacggtgaacgcgtttttctttcttttctctcttgctttccttgtgctcaccatccttcccgtccatccggtcgtacgttcacatcgacatccattagctcacacgtacagatagcaatcaggctcgcgatcgatccacgcggctcagagtcaactatgtctccatacccgatggaaacgccagaaatgagtacttcagtctgctcatcctctcctgctaggtcattacctccgaacacgccatcgtcttcgacgtttcccgtgtgtcagccaacatcttccgaaagcaatcgtcattatccttccaatcggcgatccaaaccaagcattcagtacggtcaagagtctgggtctctagctggactcgggatgggtgatgtcgcttactccttccttgggcttcagactcaacgcgtcactcctcagcaactctattctcatgaacagcagggccaacagcagcaaggcgcttcgagtgcggctaacagtccgcataggcatcatccataccatcattcacctttcacgtctcgcttgacagaccagctgttgccgtctgtatcgatatccaccagtcactcagcctcctctcttcggtcatccccagatagaccgactgtgtttcctacttcccgctcttcacccaacatccatcgccacagctccatcgtccctccgtctcctcctgtcgctctacgcgactcgctgcgtcataaaacccgctcccgttcgccttccgctcacactattcttggagggtatgccggctcatcgtctccgctcaagagaaaagaaggtatcagggagagaagtccgagtccgtcgcctatgaggccaactcccgaacggtcgctcgctagactatctgagaccgaggatgacggggaaagcgcattcgaagatgaggagatcgatgaactggaagacgatgaagacgaaaacgatgatgaggctgtgccgacagccagtcttccgaaccaaagtgatatcgttctcttagaagacgcgctatccgaactgaacgttgagtttggtctaggtgaagacgaagaggaaggtgacgatgagagcagagagatgagagggatcagagatatctacggacttgtgcaacccttgatgcctgtgttcaaatttatgccaaagtggaagactcagttggttgaacaggcggagactatccagtcgttgagaagagtgattgatgttcaggcagagttaggtcggttggctatggaagaagatcggttcgtttcatcttgttccatttcgtttcggccgaatccggttcgctttcggatggtaaatcattggctcatctgatcctctctactttttcaatccctatctggcaacagagcgattcagaaagtccatcagaccaattgggagaccgaggcactctctatgatatccaaagccgctcgatccacggggctgccacctgcttcatccttttcgtcaacagactccactcggccccactcctcgtctacgactggttcggctgagccaggcttgtttaaaaagacgagcagtgggaaggagagcgggttcagtaaaatagaaagtaatggacaggaagattatgagaatctgctccgacaatgggtggtcagttccccttaattttttcccttccctttaatagtatctgatgctaaaatcagtggattatcgattcggtgttccttcttgtacgggaataatatacaggagctgcaagcagaacaccgaaagagcacggcagagaagacaaccatgcgctactctgtacgtgttttctttctatttatctcctttcatttttaaactcgacaggatgactgagacgtttgcttcgttgatacaaccaaaagcttcgacacgctgaagctcagatacaacttctcaccaaggaactttacttcttgcgcgcctcagctcttcacggtcgacgacctatccctccctcccaatctacttcggctctccctcctcctccgactggcaaagttcattacacttccggagagtcatcagctcacccgccgtctccttctgctgctcgggtggtcaacgcgactattgtgcgcgcctctgccgattctggtcctgggccctcctcaagcggactcagttcaacttcaaccaagcgacataccctgggtgacgcccgatcggagcatctcttgttagccgcgagaaggctaaggacacttcgagcgaaagatccagaaattggtttaatccggacggaagactatgtcacaaacaggttggaagctcctattgttgacaggaacggtagccgatttatccgggaaggagcaggtgtaggcggagaagatgtatggggggttgaagatgagttcgatggatggctgggttcagcggctggtggaagacaagacaagacgcctcgaacattagggagaggcagagcaggtaatgggaaaggaaggaaacctaatggagtcgtcaacacaccgtccactgtcccgcgtccgacaacgacaacaagtgtaggaaagtctataggaacacccctagaaatacctgttcgccaggccgtcgaacaaaggtctttcccaacgcctacaacaacccaatccggagatccaaatgggacacccaaagcgaagaaggatctattcacccctcgctctgttggacctccgtccggagcaacctttgacgacctcctcatggctgtccacacgctttcacaaccattgacagtcgagtctgctggcctggatggggaacgtaaagttgcgggtagtgcaaaaccagatgagtcgcccaaacgacgaagagttcagacgacgcaagagtcgtcatcggcggtgtaccctggcgaatgggctcacggatcatcagggggagg

SEQ ID NO: 1208 - DNA, 58651 bp, Xanthophyllomyces dendrorhous
taaatcacaatcaatggatggcatgcacgcttcggccttggacctcttagcgctcgcgacgtatcttccaggctcagatgatcatccgtcgtcgtcttcgtccggtgccggttcacctctacatgcttcaatccggctcggagggcttttgggctcgagctcaggctcggggatgggccaaaatggacagagcgcacggtatgggtcaactcaccctcgacaaggggccgaatcagaggacgagaacaatcagcggcaggatcagtctcgagtgtcttccattcgatcgggttcgattgacactactccctcctcgggttcttcccattcattctcttctccaccaaatgcccaagctatattggagccggcgttccaattccgaccggatccgccaactgaatcgactcctcatctaccatatacctcagctttaccaagatttctaccctatcaaactccaattcagcttagtcatttagtcaactcaagcccaggagggatcgcgtcgtcacctgttctgagacaagcaggggacaagcatatggctctctcggctattccaatgagagtaagagaagaacaagttgaatcgagtgaaggagaagacgaagaagatactgaggtcgaagtcaatagaactcaaagggactcctcacgcgcacaaaaccaggctcaacgacaagcgctcataacatcagcgtcagcgctgtcatcgtcccctagtttgaaagatggaaagaacgcaaaagcatgggagctgacggcagcagggatgccggcaaggagggttagaagtccatatctgaagtggagtatcagagaagacgagttgctcgccagagtgagtacctttataccactctatctacgtcctattaaagtaagagaaacatcgatttttgctgacctcgtttatttgacgggaatgtcttcttcgtgttcgcatctgtttatagggtgtggcaaagtacggacagaaatgggatctagtatcaaaaacagtcccaacccgaagctatcatcagtgccgccaacgttggcttcgaaaactgggtgcgcttctactccttcatcttcgtttgcagttggcttgcacacattcttgactttatcgacttactctaattctcctcgtctacctaatccaaaaaaattcaatttgcaggcgtgttcgacaataagccttccccttcccaaactactcacaacaacccttccgatgctcaagaacctctcggcataacttcccggaaaggacggttcccgaaaacagcgacagctgcttaatatgttatacccgatcaaacatctatccgaattatcaatcatgtctcgtcatgtttcctatcccagtggtgctatgcaacataattcttcaattttctcagctctggaatgagaatctaaatcgcactgtctccatcattgatgccgtttcggccttttgtcttatcgatcaagccgatgatcttttctattcgttttgtttcgctttgtatctagtcacttgtcgaccatatgtttattttaatatcaaatttgtgcatacaattgtgtgcacttcatatacataaccgagagatacatcatacttcttgacagagaccgaaaaagcacaaaccgaagtatacaacaaaacagtcacaaattccttttcaatagattgagtgatacataattaagggaggaaagtgtgagaacaattatttcagactggagatggatagttgctatagtctgctacccctgctaagtggaaagtctctcccaggagagctgtcacaaaagttgatttcaggagcgcaaccagagtcaaccgtcgtttcaaagtatatgcagattcataaccaagagcgaagggcgacctacttttgcaaatcaacatcatcttgtcaaatcggccgactagcgcaaaacacgttgcacaagccatcgagaatcgaagatattcctcctacatgattcgcaaagagtatcgacaaatcagttcatcgtctgctttatcctttgaaatctgtccgacccttgatccaaacctacgcttttcagaatatcaacggttactcgtctagggacccctttgaaccgagggtacgccttctcgttttcttgtgtaacgtcgcggtgatctatattctcatcatctacgaccagaagaccatgtcgtctttcgaggtatctttccaccaatctagattgataaggtgatttgagtgaggatttgaatctttatcccaagaaaactacaccattgtacgtacgggcatggtgtgatctggggcagaggactcttcgattggagcgctgtggagcagagtgagatcaccgccaaaacatctcccatctgagatgagataaccaattggacagaagatataagcgagagttgattcttggtctaaaaaaggagaggcatcttacgaatcgaggatcactcaatcgcgttcgaatgagaagtgccttcttccaagcagggtccatgacacccatgatgaagtgaagttgattcatcaaagtgacgatgtcggatagaacactcttaagagcagtgtacctctcaatcggccatgttcctcggaatgaaatctatgaggtagtcagtgtatatagtatgagaagaacattaacacgccattacatacctcatacgttacagctttgtgtcttactgaaagcatcatgagaaaagtttctctattaaccaaacgatatacttcaaacatgtaacaaggaaaacatatgctcacgctccagctgactaaaattcagaggataccagataaaaccgtgttaggaaagatattcgggtgtttacagaaaagatgaccgggtagtctcactttaacttcttcttgacagctataagatttccctcaattcgcgcatgctcctcttcatcaggaacaacatcgttcgaataagaaacaattgcacatagtgcatcccctgtggtggtaatgactcgactgtaggaggccctctgttgattgttgaaattacaaggatgtctttatttagtcttggcctatatcaacattgaaaccatcagcgatacttacaatgttgcgttttccagaggccacaggaggaacagagctccagatccaagcagcagttatgccaatcatgacgagagtaaatcgtcgccaggcaacatcaaatccccatgaagctaagaatgttcagaccgtaatcaaaattaagagtggtaccatagacgtagacgtaatgacatatagagagatatctcaccgttggtagttctgattccgtgtgcatctgatagagagaatatattgtactaccttcagtgatcgtgcgatttcgaagacggcaaaacaacacttactttgccaactgtatccaactaccaacgccgtagataccgagtagaggatcttggtaagaggtggtgctgtaaaatgaaaagcataaagcggtttatactcgatgggtccgtttgtaatccttcaatacggaagacatcctgttcgcttacatggataatagagccggaacaggaacacaattgggaaggcgacagctgtgacagccgcctgacaattatgtaatagcaatttgaaagaaatgaaaatggatagaaggagtatgcttaggatcagatcaagacggcaagatgtatgtgacacagaaagactgaccattccgtaatggttccctatgtgatctccaggtgctccgatagaccagatgagaagacccgttacgcacccccttttacgaggaaaacatcatcaaaccaaacgaagcctcagtttaggtctttaaaaactctagagtcaacatcagcttaccaaaaggttgcaacttcaggaagagaagatatggcaaagattcaagatgataagtaatcaacgactatgtgtgatcagggtggtatgctgtagaacctaccaactcgagccacccaggccattgtcgtttcccctgagaacatccctaaggtcagctgagccatgatcaaagcccacaaacctctgttggcgtagaatactttagccgatcctggcgtccaggatggagtggcgacaagaacagtgattatcccagctttgcaggcaaacataaattggttcgatttgagcatggagaaggctttgtgaatccgagctagaaccgcaagaaatacggtggatggttcgagggtgtccggatctcgagcttgagcatgcatgacgaccgaatcagctctcggcttgaaaccatcgatgcgttctgagatataaccaatgaagaatgtgagatatgtttaggaatgtctcgaaagtatttatgataatgcgggcgcaccaggatcttgttcgcccatctgctggccatcacattcctcctgctctcgcgtaggaatgaactgcttccagtcgaatacaggaaaccacaagcgttgtttgggtctcttgagttcaatcgcctgctgatcctcgcaaagtctgagaaggtcatccccaaacgccagcttggaacgatgaaatcgcacaatatgtcagcagtgcttggtaataagcttgtagaggaggaaagggtctatcgtaccagattgaattgaagagcaaagcaccagaacaagtctcggtgaggtacgtttttgatctcttcatgattggcaggatggcttggatcgaacagatgctacatagtgtatgtttcaaggagagacttgagcgcagtgaaaaggagaatctaactgaaagacagtaccggaaagtactaaccgtgaaaggttcgatcactgataatctgtcaaccgttttgaacttgatgatcgccgccttgagtgcctcgatagcttggtcgtttgctttcaagaacgagtctcctctaaacttcttactatcagtagaagatagtgatcggtcgttgttcatccgctcagcccaggctatggcatgcttgatcgcttcgtcgagggctcgaaccagagggagtgaagatgaagcaagaagttgaagttggtagtggatatggtcatcttgaaattccgacttcttttcaagatccatgtacctaagaaatatcaaaagggtacaatagacaggtgtttaaactttgctctgtttctatgcgttctctgaacatgtcctgaacgggaagactccgaccaaaagattcaaagaaagctatcactcaccgatgactttcaaacagccctacaggttcttgagattttctcaatttttccaggagattgaaatggcttgtagaatggtgatgatgatgatgatctctggcatgggatctgcttggtgagtcggctcgtttccttccgctagtccaagatgatctcgaccgatcgacgttcgagaacctagtggtcctttcccttgagaacattcctgagcctgttgcaggagaatctcttccactacctggaccttcatccgcgctgctctctggatctcgttcaagctcagatcggggacgagacggaatcggaacactttccttggtctgagatcttgcgactgcagcggttgaattaagacgcggcaagttctcgtgagagcttgagggagaggtagcccttgaaggaggttgagatgtttgataaactgagccgggtcgactatcaagtcgatcagactcgttgtcgtcgagatcttgacccaacgcttctcgtgcgtggaacgcgttggagtctaatacgtcgtgcgtcaaagcagacttgaagatatcaaaaaagaaggtgacttgattgaagagaacagttttttttcgtattgagcgttgagttaactctgagaagcatgtgatgaaggaggagtaactcactccctcctgatcttagggtcacatccttgacgctcttccctagtcgctccaagtctttcgctcctaatcggccccaactgacgtccatacccagactacctctgagggctgacatagctccaaaacctactgtctcactcttaactttatcagccctcaaaggcacgccaagctcgatccattcattcaaactggcatttcctacagcggcagactcgaacagagacttcattgaggtcatagagctctcgagaggagacagggtggcgcagaattggttaaggtagagataggagaccgattgaggaaacaaaaacacagagaggacgagatggaccccgacttgaattgccataggaatgaagaagaccaaacctaggagaattatcgaggcaattagaatgagggcttgaggtcaaagaaaacagtatatgacacaccagaagtatagctgtaggtttcagggaagaaaaggaacaggacgtcagcatatcattctcagaaatccttctaggaagcaacatttgtggctactcacaaatcgtaaggatataaaggtatcaacgtaagtgctacatccatctgaatgcacgccagtacacacggaagagtaatcggagagggagccgtccgagctttcaaccaacactactccagtgacaagttcggtatccgtaggaagagaacattgaatgagggaactgatcgatacagatggaaacagctaagggaggcacttacgaagaagccggacccaaatccgagaaacacagcgcaaacaatcgatgtctttgcttcaaggtaaccgcctgcgtagatgtctgcagccacagcttcggacgatggaataggattctctcgaacggcagagcagattgctgcagcaatacatacccatgcccaggagattgcgacgactgagtttgatttggtcgagaactaagaatgttagaaatctgacgcaaatatgaacaaacttcgtcgagacatttgacatacagagcatgctaaagaaatgaagttcggcattttgaggaaacgatttatcaggaggtgtcaagaactagttggcgataggaatatgattatggcatcaactcagtacagccaatatacccatccgaaatacttcaacaagacacgtactgcgataacgagtgtgaagaacgaagccgtgccgaggattttctcagtgggggaaatgatgaggagaagcattgctatccaaccctttgattcctcgagcacaacatggattgagtacatgacaatagatcagatggatatgttaaacagaagcaaactgatagctcacagcaatcgaacacctaatcaaaggtttcagtgatctccagttcatgacccccggtatccagtcaagctgcaatactccgttattcatcaccatccacttgatctttggccagattcctggtggtagcttcctctttgacttctctccttcttcctccagcttcttgatgtctttctcgttgaatgttacatcttttcttaaagagtgatcgtccgcggtcgactgagaggtaggattctctttgggtgttcttgttcttgatgctggcccattgccatcggcatcattcaattcaaaagctgtcttcctttgccgaggcttctctgactgaagtggcatgcgaacgatgcctgtggggaaagggtgaaaggtgaacagcactcaagagagtctcaacattcaaacaggagagaaagtagtagttgtatttttaccggcgttcatcatttaatgacggagtctccaactgcggggatttgacatttaccacgatctgaatttgcttattcttaataggtaagataaagttcatatggggcaacttcgtatccttgacattcgacatgtttctgagaagaggcaagaggttctggtacatgtgtaattttgatgctaagattaaagatgataggtatgatgacagcgcagatgcgaccgaagagacggagggaagacaatacaaaacaacagaaaaacaaaacacaggtgttatccatatatgctagatctcatgatccaggccaccggagctttagtccatccatccacctcgtatagagcatgtcagccacaggactcttctcatcagagaactttggcgctgggatggacatgttgtcaggctctgccgtattctcgtgttttgtgtggaaaggcttcccctctttgccctcagtcacagcgtgacgaacagtaaaatccctgcagtgtaaatgatgagcaacaaagagcaagacaaagatggtcagctccgatttacgagctatagaacaaataggcagaggtacgaactctttcaaacttgatgtgatgtcaaatagaattgagtatgctaactgtggattagctatcttgaggtcttcaaaccctttggaaagtagcttcaaagcttctctcgatggcgcgctcattctctcttgagaattctggtgttgtatgattcaatacatacgaaagcaagatatcagtcacgttgtccagactggctagcagaatacccagcagctggatttggacatactttctgcaaactaggcaagacaacagtatctaccagagatcttcctgcgttttcttccaagatactactgttctggctatctgatatatggatggagtgctgtctttccgtgcttctctcctgatctgtcgtagaagaagatgaagcgaatggcgtggtaccaatggatgaagagaaggctctcggatgcgggctctcagtatcatctgctgaactctctctcccaacctgtatctcggctgttgatgtctcatcctcccttgccctgctctctcctttctctcttatggtaccttgcaaatcaccttggttatcctcctgtgcttctaaaacattagcctcggtcccaaagctccaatagcttctggtcgaggaacccaagcacgattcgagatctttcacagtaggtaccggctctaatccatccaatgtgaaaggcttggactgatgttctttgtatttctcgatgagctcaatcaggatggtcgtcttgccagcggttctgatgaatcggtgctgaagtagatccttggctgtggctcgctgtatttcataacgcagtatatttcacgcggccaaacgaattgttagtggagctgatagatgaagaaaggaggattaaagactcgagaggtgtgaaagagggtcgcgcacatcaactgggtccttcatcaggcataagctcacaaaatccttgaacgcgtccgaaaaatccccttcgattgttggtgactcagctttgggaatcaagaaaagcactctcatggctgccattgcattatcgtcatagattagatttgcatgttagcctagaacaatctcatcagaccatgtcacagcaaagagaaccaaagagcaagttgacgaacgatgatattcgctaagaggaggaagaccattggccatctcgattgcggtgattcctagtgaccagatgtcagctttgtagtcatatcctgattgtcgaatcctacacatgataacaaccgtctgatcagtacgcatctttcactttgagtccttggcccatgcgatgggcacgattcgataaacatgtactacgcacacttctggcgccatccaaaaaggtgttcctacgaaggtacgtcttcttgatatgttgtttgtaagttgggcagccactccaaaatcacctatgtttacagttttcacaagccccatgattattctttcagtcagctcttgagcaccagactgacggttcattcaaaagggcagatatagtggtatcttgactaaccgagtttcacttgtccgctttcactaagtagtatattggctgctttgatgtctcgatggatctttccttctgaatgaagatacttcagtcccgacagaagctcacggcaaatcactgcgatatgtggttctgaaaacgttccagctctaagctagatggtttggatgtaagcaagaaacgaggaagatgagcatgttgatcagctttctcttgtcatgtagctgatttctatgatggctttgcatagatcgtgcttaccaggtcataacatgatcctccagcgagatactccatcacgatccatagctcgtatcctcttacaaaagatccatagtatcttgttatactggttggtcgttttccagtaacatcagtgtttgtgttttgtacatcatcagcaaccatgctggcatgatacggattagattaggaactgtgcatgtttcactcactagtccgagtcgcattgagcaaggtgagcaatttctgcttgaatttcagagatgctatcgttagagctttccaaatctatatttgagcgggaagttcaacaggagcaatgtcaatactgatctgaacagacatgatgctatctacttatgagtatcataccaatctgttttatggcaacgactttgcccgtatcctttctcactctgaaaccataaagatgtcgacatgataaggcatttaaagagaaatgaacgttagcctagtctctacgtgaatgaacaagagggcatctcgaacgacactagaaagggagagtagtaggttgaagacttttcttgagcctctttctagatccaccccttttcctactcgctctttcctttgtttcttgatctcctccatatttgaatacacccacaacagtatgtattcgattgtgtatccacctacacagtcacgtctatatatctcacacacacgggcatcgaagtagacaaacactcacgccttccagactgtcccaaaactacctgttcccaatctctcctccagtcgataaaacctgccaggatcttctgtgcttcccgttaaatcctgtttggcggccgacatgatctccttgcctggatccagacgggccaaaagcatgagaaaggagaaagagcgagggcggagtgaagggtgaaggcaacaagcgggtgcggtggttagattagataaggcgatgctgattacgtaagtatctatctttcgtctccatgacaatgccgctttctgaaaaataaaaaaatgaaacgtctgtataaacagaaagaaagggtggaagactttctgctctctcttctctcttccgaccacaacgcttctctgttctctttctcgttctctataacatccaactagctctcaatatggccaagaaatccgctcaagacaagtcggctgctgccgccgccaccgttcccaagactgagaagtccaaggccgttgtgagtactcgccttgagagggcagtgtcttgctcattgtagtctcgaacatctctctatcttggtgctaacgtatccatcccgttccatcttgatcgcaatctctcttgatagaagaaggaggccactcctcctgatgagtcttctgaggaggagtctaaggctgagtcttccgacgaggaggagggcaaggctgcccaggtcaaggccgccactaagaccactaaggctgaggacgtaagcgaaatcttccgactaatacatcaggttgaagggtttcttttgataggagtcatctgacgcgctgcgctggtctaaataccaatctttcgcctttttgcagagctcttctgaggaagagtccgaggatgagtccgaggaagaggaggaggaggaggtcaagcccgctgccggttcgtcagatttactcttgtgtcattttctgaaacgcggatgagatacttaatcttcttttactctctgttcttcatcccatatataggcaagcgaaaggctgatgaggagtctgctcctgctgccaagaagactaaggccgaagctcccgcgtccgctgccactactggcagcgataaccctccttcccagactttgtggatcggaaacctttcttggaagcttgacaacgccggactggaggcttactttaagcctcacggtaacgtcgtttccgtccgacttcagaccgatcgagagaccggtcgatcgagaggtatcggttacgtcgagtttaccgatcaggagagcgcccagaaggtctacgatttggccaagaaggaggctttcgttattgatggaagagacgtcaaagttgatttcgctactcagcgaggagccaaccctgactctagggcaaaggcttttggagacaagatcagtgacccgtcggctaccctctgggttggttagtacagaattacttattatattttggtgtgggtagggttcagatcagactggctaacgatacgttttcgtgtgaacataggaaaccttgctttcagcatgggtgaagatgatctctgggaggctttcggagagcacggagctgtgaccaacattcgaatgcccactgaccgagataccggtgccgccaaggggttcgtctttcgccatctcttctcgctatagcgcgtctttcttgccgatagaacgaattttctgatcatctctcttcctttctgtctgcgctatcttacagattcgcttacgtccagtttggatccgagaaagatgctaccgccgctttgcaggctatcaacggaaaggacctccagggtcgacgatgcagaatcgattacgcgcctgccagggatgagaacggtggtggaagccgaggtggatttggtggtggacgaggcggtggacggggccgaggtggtcgaggtggtggacgaggtggcagaggaaggttttaacttacttcctcatcttcctctctttcgctcctttcctgatgggtttcttgcctattgtgttggctacatctccatacatactcttctctacatacggcctatcctctcttatccttcagtttcatcccatattccacttcattctccctacctcttctacctccaaaataaaatctttcatacggaaatctcataaaatacatttctttccttcttcattcttctctcaatcttttaaaattgggtttgggtcgtatgttgtattctatcacaattttcattcctgttatgcgtgatcgtcttcaaggacttacatatcatgctcagaaggaaatagacatcgatgatagggttatgcctcgtgttttaatccatgtatttagcttcctgttcttcttctttttctcttcagtgaacaagcctttctgtagcaggctcgtggtcaaaggatatgttaggagagaacgcgcatcatcacatcactcctttggtggccaccgtactgactaccatcttttccacccactgcttatctgccgagttttttggcagtttgtaaagcttagtccaagaatcgatcagaccaaaagtcaacttttaccccttaaaccccgattcatcatacttcttatacaagcgcacacagacatggagaacagtaagaaacaaagaaagggagaagacttaccttctcaactaccttccaatcaaccgtgccctctcctatctgatccagactgacttcatccccatcgaccaaacttctcatcttctcctgtatccatcctggtgagttctcagtagatggatctgaatttgtcggtggcggtgcgattcggacaaggatgagtgaggtcgttttaggcgagagaccaaaggatcgaagggattctgcaatctgttgtgacgcgaacaccatggttgttagtagaaacgagagaattctcaaagtaagcagcagattacgaacattgtttgaaggattcagcataaagaggatttctgaatgcgttgtctttgtcgataaagcttgttgggacgaagctagaagagcttgatgaatccctgtaagcaagtgtgctcttgatactatctgcgtcaaacacacgaaagcgagaatgtatcagccagcgttgcagcagaagcacagaaacaagcgttcgacattcctggtctccgtccgagcaccaagcataaaatcgaagaggagaatgaaggtgaacactcaccgactttgcctcgataaaacaaaagtcgtatttgtcccgttcagagtctccagcgggtccgtccatagtagcagcagcaataagtgaacttcgaatctcggctgcatttcgaacattggtaaataaagcgatgtgaacttgggaaagttcctcaggcatatgtgacagcggatagacctccattatgtttgttgaagaatgaatctggctggatcgaaaacaagggtcaaagttggtcggatggatgattgatggtattcaagatagttgcagcgcaggtaaaaataaaaagggcttccttcgtcccatcaaccatcatcccatcagtaaatcataatcagcatcgcctccaatcttccagcaagagaacaagagatttaggtctaaaccatcaagctaggtattcgagggaaagtagactgaaagatgatattcactctgccccttctggcactactcgcaccgttaatcccttcattctcacaagcggccgagctcaggcaacttcaatctgacaacttcaagcaagtcacttctcaaggccaatggtttgttgttgtttatccttcctctgtttgtatgtgtatctctgtgtatcgactgatagcaatggtcggatcgatactcaggcttgtggagcattacagtccgcaatgtatgtgccgaattatctaaacgagataacttctccgatctttcaagatgctatgctcgagtgttgctgactgactgtatcgcttggtgatactctttgtcatcaattcaggtggccattgtagagcctttgttagtcttcttcttacgcttcactgattacgaccgctttattggctaacacgagatcggtctgtactctgacgaaatgtcaacaggcccctacgtgggagaaactcgttgaggccaagcagtatctagagggtgtggctggattccacatggcgcaagtcaagtgagttgttcatcctacatatggtttctctcgataattaagagacaggtattgatatggatcgcttgctttgccatgttcttcgccatagctgcctagcacaaggaggtgcgcgtgcagtcttctttgaagtcgataaatgctgaggcaacgctgaccgagccttcataatttcgtgcgcttagatctgtgcgacgagaatggtatcaaaggatgtgggtacacaaaagctttctaaaatcatagatttaatatccagatcaaggaatgaacttagatgctaatggtgttcatctgtttaatctctatcttgtagacccgacgattacgctgtaaggaggcctcgtgatttctccttttgcttttctgagatccacctaattaactcttctcctctacttatagtttccaggacggacagatggttgagaactatcaacagccccggggattcgatgaactgtctacatacatccagaattcagctacaaagtattccaagcgtcggccccttgctcaggctggaatccctccaccagaattaccttcagcatctggaagtacagaggtcgtcagtatcagctccaaagatgaactagatcggatcaaatcgcagggtggattcgtcaagttcttcgcgccttggttagtttacgttggttgatcttctgctctcgaattgatgtgatctgatcaaggctattgatttcttcgtttgatcctcaggtgtggacagtaagccgtctggttttctcgttttaagctctgtttaaatacgcaagactgactttttgtatctttacagctgcaagaaacttgcacctagtgagttgggtttcatgatgtttcaatgcgcatttgcacccatcttgttaagatagaatcttaagctaaaactcttcaactcctttctacagcgtggaaaaagctggctgaagagataggaccaagtataactattgcagaggtcaactgtgatgaacgaaaggcgctgtgcagtgcagaaggcgtcatgggttaccctcagctctacctgtacgttccaagccctcgagatggatccaagggttgaatcagtttctaactcgtctgcgttcttcgactcactgtgccactcggtatgtttcttgcggatggaatgacactaacaagatatgccaaaggtcagaagtatgaacataacggagggcgcacgctcgacgcgatgagcaagtttgccaagaaagctctcgaggcgtatgtttcccttttttcttttttttctttttttattaaaaaaagaacaagactatctgccagcgtctccgtttattaacattgctcatgtattgagcaaacagtggcgagcttgagtacatcaatgttgatcgcatcgagagcatcaccaagaaggaggaagtgtttttcattttccttcacacctactctgcttcaagaaagattctagtaagtctttctctgccgtctcctttaatctgtgtgatgatcagcctatctaaagtcgctagtttggattacacaaggaatccgtgatgagtgcctcgaaggcacttcttggagaggcggttatttatcaatctcgagatcttgaactgttcagctacactggtgcccaacctagttccggtccggttctgctctgtttcaaggaccatgactctactactcccatcgcgactttttcgttcgctgagacgacggatgaatccgctgaacaggacgttagcgctttcctcagacttcacaagctaccgattgtagtcaaagtcgacagtcacaatttcaaagaggtgatgagatcggatcaaggaagcgctgttgtgctggctgggttgaggactaaaggaaggaaggatggcgagttggagacagagatcgaacaattcactcgggttgcaagggcctggaggaagggtggaagacggtttgaacaaggagtcatctttgcttggatggacggtgataagtgggagaattggttgaaatcgaactatgggtccgtccgagatttctatcttttcggctatttgttcttgtctcattcaaaggtttcgaactgaattcaagtcatgttttctcttcttattctccccttgacactgcagtatgaaacggtccaagatgcctgaagttcgagtaactaatccgcctgtgcgtcctactgaattccgttccttcaacatctctgctgtttgccaagtgctgaagtttccatccttcagaaattcgaatactacgacgtgactctggagatcgaacctatcgaatttaatggggaatccatattttcgactcttgagggattccatcagaacacacttcgaccaaggacggtggaaccgttatctcatcgtttgttccgagcttctgctataaaaactgagggctggaaggtatgtcttgtccttctttttcacatgagtttctttcgtttcaatagaccactgatctatgttcttctgaattcgtgaatattcctgtggggacgaagacatgggcaatggaaaacatggccaagtttatcatgatttgcgtcggtttaagcatagcaggtatctggctcgctcgtaaacttatcctttgggatttcccaagtgatcatgcaaaccatctcaagctttcgaaccgattggattagagttcatctcactatctgtttctgttgtggtgattaatgccttataccaaagtttacgtagtttctcttatcgtttgttcaggtctcaggatgtctatggcggattgaacttgcatcatggcccgtgttactcttgtttttggtcattgagaatcatattatgggaagaggagggatagggattgtagggaataaaacaaagataggaaaatcatctagatcttgatctccttgagtccatcagcccagaaggtgatgaagggagtgacaccgtcctctcggtagttgaggagggcgaccataccgtcagggttcatggactctccagtaaggaactcgtagtccttgaagtttccgagaaccttcttggccaaaccctgggctcgcttctcgaaagccttgatgtcatcatcggacttgccggcgtccttgagggcggtcttgagggtcttcatgtagtccttgaggtaggtcatgtaagacttcttgtcgaactgggtggactgtaggtcacgaacgtaaaattatgaagggagttgattggcgtgggttttgtttttaaagaaaaaatcaataatattggtgatggagagattagtacgatcatgagataacgttggaagagatcagaggcattcgtagttgttgtgggagagaacagagagagaagaaggttagtgatgtttatacttagccaatgaaattggccggtttgagggttgtacaaacaaggaaaacgttcgtacctgaagtcgcatcgagtaaacgacgttgttgacagtctcggctccagactcgagctcctcagcggcctcctcagcggaagcgttggctcctaacagaatcaaacatgaatgagaaagagagaagggagagatggcatatagtcagattacggtactgtctaaaatttagaactagtgcaaggaaggagaagatttgaaatactgaggcacgtaccgatatcaacatcaccctccttaacggtgatcatctggcaatcaacctcgatggatccatcctccttatcgtggacgtcgtaagcatcagagaagagctcgtcgccggtgatgactatgggtgagacataccaacaaaatagtaaatttattgtatatgttatgactgaaaggattttaaaaaactattcttactgtcgcctgttagatagagagaaggaaaaggcaacggtcagccaagaaagaacgagctcggtatcctctcccgtccaaaagagagctcacgtactgaacaaaagcattttaaaagaggaaaggggcggaaagaagaggaaaggtaggcgggtgttaaggtgagggaccgaaggtgaagagacaaattgaaaaggtgtggagaaaaaaattaatagagcatagagattgagaagggcgtgtgtagccatctgattatgtaagcagcttggttacagtagccgctggaagtctgcataactctcggcaaggcctagactcttgccacatcgtgtcggcacagctttgagctctttaaccctaacaccacccccaccgtcttccccttgtttgttgacttttcttgttgacgtctttgtttgggtttccttctattcaaccatcaagccatcaaactcgacacgtctaggaaggatccactcgttttactcactttcccttacctttccttcttttggtccgaacagtataggtcatacttttaattctcaagagggttcgtgtcagtcagtctgaatcagaagagagacaaacgagatagaaaaccgggctcgttggccaaacaacggacatcattgttgaacgagaagacacccatacttacttgtcaatcctttctatcttgtgttctttcagtcatatccacgcatacaacgcttccaaagttctactttcctttctcgtgcctttgcactgagaacctgcatataattctgggcaaacaccatgtcgtgccataatccaacatcatctcctcatcgaactaaccctcctcctattcggattcctgaccaaactggcctctccgtcgcctcttctcgggaaaagatccgggcagagtccagcatgggttggtctccacttcggatacaaaagcgatcacagacggaatctcccaacagaccttcctctctccaccacaccatctcgtacgactcagatggaacaccaacagaggaagcgatgagtttggaagaacctctccgacgtacatcctctagctataaacaccttaaaacaaactcactagtttccaactctatcttcaagcaggatgcctcacctcagctctccgatagtacaccaaaaatgatgagcggtgaaaactcgcctacaaaggccttcagcggaaatggctggggaagtcctaggaaatcacccggcgcaggatggaagcacaacacgggctacaactccaatgacgagggttcttcagatgaagaagacgaagaagatttatctcgtgtatcaccagaaagaaagctggacttcaaggcgcggacgaaaggaagacagtcaatggggctagtgaatcttccaaagcaaggcaaggtgacctcatctccatttcttaaacaacgggactcgactaccacattccctttggaatctcccacgaaaccttccgttgtttctaatggttctgaggtttccaacgtcttgacctcttctttcgaatccacttccgccgacgaagacgatgagaccgagcaaatcgtcccggaaaatagcctgtccatcgaccattcgcctcacccctcacctttagagtcttccaccacgtcggccgaatcgtccccttcccaatctatcacgttttcgccttacaatcctaacgaatcatttccttctcctccaccctccaatgcccagatatcatttccctccgagcgagaaacaccctcgacccctcatagaccaacctcaattccttctcacatgagacagaacatcactgcctctccttcgcccaaatcgaacctcaaggccagagttgctcgaactggtggatcaggtacacgagagagacgaaagacggtcaccttcgaagaccggccggaggtctctttctttgaaaaggatgccagcctcgactacgtcgaatcacccatagtggacgacaacagcccaagctctcaggagacatttggaagctcacctataggatctgagtcgggaatgttcgaatatgaccactcaccgccttggaacgatcaattctctgttcatccagagcaccatttgcccaccgattcatcttatgatctcctgcctcagcctgcttccctccccgaagatgcgtcctacacatctcttgtggatctcaacgatgtctcgtacggctcctatgatggcgcgcacgatcctttctcggaggcaaacatgttcgtcaacgacctgctgaaagaagctgatctgttgactccaggaagtgtaagcagcgctcatttcccagaaacgaatgacgatactcagttagcgtccgacgatgatgctccgagttacattgacgagggtcaagagctgaaggaagaagaagcaagaacagctggagtatccgcccatggaacctcatatgggtaccgcggtccagaggaattccgtacagagcttagcctcggtgcggagatcgaaacctcttatgaccatcccaagattgatgcgctcgatcttcctcatctcagaagctcaccagctgatcctatcctattgaacggcaacgtgctcgaaccctccaccttctcaactgcggctgctcatcattcaccaatctccaccgcccgcatcaaacaatcaacctcgaccacatctctttcttcggtccactgggcaaaggaggatgtacaggcacatcaatccggtcctttgcctgatccgttccttactcttcagaccgtccaaaacatcctgacgtctccctcaccaaagatgaaacgatcgggttcgtcgacccgatcgattgcagagttaactcacggcctgccgaaagaccaacagggcatcccgtacggtcgaactcatcactctgaacggcgatttgtcagaagagttttgaaggatggaattggaatagaggagaagtcaaaggatgaccttgaagatctcatccgtgaagacaaggaaaacagtttcttaaaggaggttgaaggagagatcgaggagaaggaagaggctcagagaaggaccgggcaccctctagtgggaactaggggactagtgttgagtgatctgaatttggcaggagaggatgagaaggatgtgtttggagacaagatcgaggtcgttcaggtttgtctcttttttttctttttttcttttgacagcgtttggtcttgatcctatttatgagtcaaagtgttgaccgattgtttctttggtcgtcgatctccgcccaaataggcgctacagtcacctgcgcgacgagtgtcctcgtccacaccttctaaatcgcttccaagatcatcctcaaacttgatgactctagacgacaatccgtattcacttcctgattttgggactcactcgcctctgttctattcttccgaagatactcgccccagcttagatgagttcggtactggatcggccaaaccgtcttcgtcagctgatcgattcaagcttgaggagtttggagacttgtcttctctcaataggaatggcttcatcgcctcgagtgccggagcaggagattcagtctcgagcagaagtagctccggcaggagtcccaggctgacaagagagagtgttcgaagaaggatggatgctaggaagaaggaagcggaagaacaagctgtgtccgatttgaggtcgagcccaaccaagaaaaagactgttgtggacaccagtggagggtggaaaccattggatgggttggggatcggtcttccggatgagtcgaaatcagaaagatacgctgatttaccggagcacgaaggtctcccctcaccatccacttctacgtgtttcacttcgctctccaaagctcctgcaccatcttcttcgaagacagagcgaccccagatccctaatcgaggtagtgccctttctgctaaagagatcctttcagcaaagtcagctctagaagaactggccactggaatgggcggcttatctttctatgagaatgcgcacggcaacagcgaggaacgaattggtgaagtgaaggaacggtcgattatattggaatccaagaagattccttctgagtcttcttcgactcccgtggaagaatactcagccttacttgcgccatctgggcaggtgatcggacttactgcatccacctctgcagagcaggctaagcgagatagcgaactcatgcctcctccgcctgttccctctcggacggctaccgctgctacggtttctgctccgccaatttcatccgaccgggcgtcgtcttcacctagctcttcttggttgggcggagacctcgattctcaatcaaaggaggaggctgctgcgactcgaaagcgagcggaaagtagttcgaccgaacctacagatgtgaacagcgtcacccctcgacccagacgaaagtctaggaggagtatgagtgcgggagaaatcatgatggatgatttccaacaagagtcgagtagaaactcgattctgatcgacaagttgttgatagatgagaaagatggtgatggatttggagaaagcttggttcaagagattcataagatcgcggatgacaagaacgtgagtttgagttcttgttcgctcttggtctcaggaatttcttcgctctaatcatgcgtttgctcccttggttacctagcaccgttaccgactggttcaacatcagcagatcactgcatccgacgagaaggtatctcacagccgccgggctggagatctagacaaaggcaggtcctggaggtctgtgaagcgaccttcggatatggtaagtcaatctgatgacgtcccctgtatcctatcgataatttctcagctcatcacgtcaattacgaaacgttcatctcctagaacgagtacgctcaagagattcgagagatccgggctcgagagaaacctggcagagcacatgccaaggtgtttgtcaagagtgagttgtccaattgtattttatagctctaatggggtattttgtttgaagtctgaccataattgctgaacatcaatggtatgcatctacctagttgtatcgataaccgatgtggacgttccttttgcaaaaggcgagactcctcaggttcgaattgctcttaacaatggtcttcactcggttgagaccggaacttatcctctccgggagaaggttgatatcggccaagagtttgaattgtaagtcatatcttcctgacttacagtgtggatgcgatgctgtggagtcgaatgttgacttagaattcctccttgctctcgcgtccttgtgttttgcatataaagactcggccttgataatcttgagttcagctttgccgtcaaagtcaagaaagacgccagcattgtcgataggatcagagcggtatccactccgcctccgatcaaagagctgccaaccacgcctacaaagcagagtggtttccgaaaacttatggccagcccgcgtcgaccgaaaccggtgatacctgtgattgtacgtccggagcctccgaaggacgacctagtcaggtatctcgcaccggatggtacgctcgccgtggtcaaggtggtatttaaggatatcgcctctcggtgtaacggtcaacttctatcgcttcatcttcctctgacgggacgttggaaccaagactctatcactcagtccaggtctgctggattgaatacggcggcgaatcgatcgaggacgatcggacgaatggagcttcagttgatgatgattccttccttacccggtctatcacctgaacagctgcctcagtcactagatgatgctatcatcgggcttcgacatgtgcgctggcacaagatggactatttcaacgggacgctcacccagtctggaggggattgcacggtttgtttgattctctctgctgattttaaggttctctttgttgcactttattctgataacatctcattttccttcgatatttctgtctatatttccgttggaaacacagtcctggagaagacgtcggatgcgtattgtgggaggaacgctcgaagcatcgaacgatgtgaccggcaagatcactgctcgaatcgatctgtctcagatgacgaacgtgacagacaacaacatggaagatagtcaaaacccagatatggaccggccgatgagcgtcgaacgatcattcaccttgacgttcgaaaacggggaggacattcagttttacgccgacacggacaaggacaaagaagactggtgagtggaatctaccgtgctttcaattccgttctctcgcgtgcatagcggctgataggttctgggctctatttgtttgatgtatccatctaggatcaaccacctcaacgaacttcttggccgggtaccgagcttacctctttgggctgaacttctttgggtcaaggaccatccagcgccatcatcggaaaagtctggagcaggcattccttccagcccgcgatcgtaggaagacggagtattcctgctttacgcacttacattcatttttctcatttctattcttttttctttcttttgttccattccaattgcttcgcccatatacccagtccctctcgttttgtttcgaaacacgctacgcctgcagcagtagcaacctttatgacacgcatccagctcctttttcttttctaatggattttcctttctttctctgccttgcttgaagcaacttgcctctagagactctccttcattttcatccgcttaccatggttcctttactccacctttcccatatattctcgttctgtttctcatgcagatgggttttgacgaagcaaatgttactgatgatagggaccgagagagatcaaggtcagagctgaactcgatagtcaagagatttaagtttgtgttgaaagacatcaagctcgaatgatgaaagcaaatagtgagggatacagcatccgtgcggatatgataaacagtccgcctacatgttctactagagatggttttgactggtagagaacaaactaaacctatgacccatagcatctgggtagtttcaatatcagaacacatccaatttcagacggatggtttatcgaccaacatcggttagggttgccctcaccgggcctgaggtctgtaactacgacttagctacgcatagatgaattatttatgattctcagtgtagggtcggttcctgggaagaaaaactttttgcgggtggcctgtttgacgcttctgaagaaaagagtgttggacttgccaggaagacctcacagcaagactaagactctcaaacatggtaaatcgctccctcgcttgatcaaactgtcctccatgtgttccacccgacatgaatctcgcttccagaaaactgtgcgatgtttgatggaaatttggatggaatgaggaggtgaaaaaaaagaggtcggggattgaaacgggcaaaaaaaagaacaattcttcaacaggggatcaccatgggattgatggacgatagaggaagagaacaggagccgaatccttgtaggagtctatggaagaacacgacgtggatgatcggctcgttgccaaaggagatattcaatcttgtcggtgacgatctgtggatccaagagcgttcatccatcaacaagatcatgataacactgaagaggaatgaagtgctgctcgtacgcatgtcagtaactgtatgctgacggtttgtatttggccctcttgtctcttcattcttgctctgcttaggctaccaagaccggcaagactcgatccgctctccaggacgtcgttactcgggagtacaccatccacctccacaagtacgttcacggaaggtctttcaagaagcgaggttcgtaccagttttttccttccttgtatcgtttctggctagagaaaacttcagtaaacaagtagtacagccagctcacaagttctcttcgcttcctccgttcttttctctatggcaaaaacaaatttgtgatgaccaaaaactttctacaaaaatctaaaatcccttctttcaactacgcccgtcttgtcgcccctccaaccacatatcctgccttctcatcctcatctgctgccttttcaacaaaacagctccttgggctgtcaagtccatccaggagtttgctctcaagtcgatgggaacccgagatgtccgaattgaccccaagttgaaccaggccgtctggggacagggtgtcaagaacccccccaagcgactccgaatccgacttgagcgaaagcgaaacgacgaggaggatgctaaggacaagctctacactcttgctaccgtcgtccccggagtcaccaacttcaaggtcggttctctgctttcttttatgctttcttgtgtgtgtatgtcacatccggaaacagaagtctcattatttgtcttgtttttttctcttccctcggggtgtttttttttgctgggtccaaatcgtcctcttgacttgtccatcttcatgtaacagggtctccaaaccgttgtcgttgacaccgagtaattttgtcttggattttcatgacggtcgattcagctgtttcttggcgccattcttcttatgcactctgatgcctttcacgacacacttggtctggttcacttgttaagaatcgtattttgaaggaaaacgagagagagtggaaaaacaaagaacaaactcggttttggttgaagagagtcatgagttttacttgagggttgtgtgaacaccgtctcatgcatttatccgtcatcactgaatcattctatcattctatcattgttgtcattcgttccccatcatcatcaacaacactatcgtcaacattgtatcatatatttgagtgtctaaagtgaacgaaacgttgacccgaggagaatctcgattcaggctagcgtgcatcacatagatatagttgatagtccgaccaaactgaccaggcatcaacgaaggacgaatgttgcatgacactgtactttttagattgttcttttaaaagtttcacttttcttttaataatcttcttcccaacgatctgaaccaccgtcaacattgttttgagaggaacaaccggattaacggtattcggatagaacaacgcgagcgaagcaaagcaagggacaacaagaaaacagatagaatcttgaggttggcatacaccaaacctgtctctgcatcctgacccttcatctttctctctttgggagggttcgacaaagggaaagatggagagaagcgagaagaagaggaataaggaaaaaagctcaccttcggcatccgagtcgaaaaagtcatcttctgaatcttcctcgtccgggtaatcgtttcgatagaaatcttcatctacatcatcggttccatacatgcaagcacgggaacgattggaaaatgacacgttgacgtcaacttggaggcttcaggccgtaatctagacagaaaggatcttgaccaaccattcgagtcttcatccacctcctcatcaatttcctcctcctcaccgtcactccccacgagctcaccatcgtcccctagataaccttcgacggtggccatcgcgcctaacccctccgcgctcgatagttgggcacctgaagagatatctctatagtagagatcgtacacatacgtagccggaggcgaggagggcgtgacagctggagctggaacaggattaggcctcgaaggtgtgcgcgctctagaggaggaagacgacgaggaggcagtggatgtataggtcgattccggattcgatacttggacaagcaacgtagagtgattgtacaggtaagcacaaagggagaggagggaaaaaaaagaccaagcaacgtgagacagaagagaaggaagatctagagtggacgaactagccaggtagtcccgcaacataggcagaaatgcagccatctgcgggtcttcctcctcttcttttccaagaagaatctggttctgggtatggtcttgaccgggctgggaggaagttgtgtttatctggtgtgcgtcgatgactttaagcgcaggcgcggacggcaatggtagggaaggatcaggtctgggcacaagacagatttcgagaaggacatcaagatcagttaaaaacatgttcagttcagctatgcgccgaaaggctccggcgaacgacatatatagcatgactaagaggaacgacctacgtggcaagaacttctggagctctgttcggtcgtctagaacggaccgaaggttggagagggttaacgatcatgtaccgtaccggttgcttcgtagacgataccgggcgaggagaaactataggaatctcgggagcaggtggctttgatttagcctcagccatgagttgagctatacgtttctacaaaccaagaaagacggtgaaatgtgagcatggatgttataatatatcgttcccagacgttcttgtttgcagggaaagaaggaaacgagaaaatcactttcaatgcctcgccaccttccccttctctccagtcctccttaacagtctctgccagtctgaatacacctcggccggaagggtctggccgatcgaagtctcttgtcttcttcttgggtctcgagccatcgatgactatggtgggtacatcgcgtcagctcctggtcgagtataaaaagaataggttgaagaaaaaaatgaataagcaccaagttggtcgagaggatcttcggtaatctttcgcttgatccgaagaatcgtgtattgaggcacagccgaagccgaagacagagacatgtttcctttctagttctttagatttatctgtttatatctgtgcttcgtgtggaacaagatgatggtaggacaaagctgatggagtgtaggcagagcgaaagagagcggggaagaaattcattctgtaattctttgccttcgttatttctccttcagacaaccatcttgatcgttcacatcgcggtgatcacctttgttccatctagctatgccagcttctccttcttcccggcctagggaccgttctcgttcggcttctcctgttcgttctaaacccaaggctccaaagcaactggatatctacaagaagtctagttcgcgtcgagatcctctggatgatctccctcctcgctctgggtctggatcatacagagattctggccgagaccatggcgactatcgaagcagaaacgacagaagagaagacagagggtctcaaggcgaccgtaggggtgactacaaccgacgagaagattacggaagggatgatagatacggaggcaggggagacgacaggtatgggtctagaggaggttacaactcaaacgacagagacagagatagcgacagacgagaccggccaggttcatcctccacatcctcgtcttccagagctcctcctcctgcatccgaacgtcctgctggtttgccgacatcaacagcagatccgtccaaaccagtggctcctgcggctgccccccctcctcggtatgttcttcacttggaatagattttgaccagccgataattagaccagtatctgagagtttctccgtccttatacttgatgttcatattggtcagaccgatgatgggaggatcgatgatcgaagtgattgcaaacgatcgtctaggaagaaaaggttcgtcctccagtattctttcactaaagcgcgtcatagacaatgtacaatgtctttgtttcttcctcttgggttaacagtgcgagtcaaatgctctcctcgagatacggtaggtgacctcaagaagcttatcgccgctcagacgggaacgaacgcgaagaaagtgcagctcaagaaatggtgtgtatgcgtatatcaccactcagttttaggtggttctgccactgacatggctagtctgttaccgtcttgccgtctggttcaaaggtacacaacgttcaaagatcatatcaccctggaggattatgaaatccacgacggaatggtgagttcttttcgtgttttcgaaggatgataccgtacacgattggccctcttttcttccttactcacgagttatatccctgcttgtgcttatgggtctacgtcgatatctctgtgtccgtttagagtctcgaaatgtattagaagaaaatgtatctggaactatgtgtgtgaatacgataatcaaccaggcgaaaagcgaatacagccatacaaccgcttgaactctgttcattcctaacttcccttatgcctaattctccttctccttctacaagcgacatcaatactggctgtgagagatataagacagaacgaccaaagtgaaacgggagaatgatgttattgaaactagagctcatgaatcgaatcgaatcaaatcaggtgtgcgcgcgcagtgtctcggtcatctgcgagtttcctaactctttccggctctctcacccccaccaacaaccattcgtcttcgaccttctttgtctgtattcctttcactctcctgttgattgcttctttaactggcttcctcgcatggatggacatcgcgttcgaatctcttactatttccaactcgcacaccaacggaaacgggcatccggcgtctctccgtaaacgacccggatcatcgagtgcgttggcccagagccttcatccgttagcctcccaggaaacggccgctcaggctcggtcgtccatagaggcaacccggccgaatctcgttcgaagaacaacagagacgctggaggaacttgaaagggtcggaagagatagtctagacggtggagtttcgggaggggaagtcggttggtcgtcaacttttggtgaccgcccgagcctggagtcccatcttcttggcaagagagaaaatggcggttcgggaagttcatcagaacgaatgtcgagtgtgctggttcacgaggttagtttgtttgggagtcgaccaacccgaacacgcgatacgaaagctaaggagagcggatgctaatatgacggaacgaggtttccctcatcgtttcataggttcaatctacagacacattgcccaaactcgccttactgtacggcattgatgttcgtaccccgaatcagtgtctttgtgagtatctcggaactgaatgttgacaacggcttcgtatcctgttcttgtgtttctttgtcttgtagctgtccctcttgaaaaaggtcaacaagttatggtctaccgactcagtccatctccgaaagactttacacatcccgctcgaggcttgtacactgcgcgagacgttgatttgggggccgaatgaaggtcaggttactctattcaagccctcgactcctccttcatcccttctgtcgtcggtaacgtcaaacgaaggcaacgggatcgaacaccctgagaggtcgtatcctgcctccaacggatctttcccaagtataagcgaagatcacgccggagggagtggagccgccgttgcgttcctcggttcgactaacatggcctattcatcttcacctagtctttccgtcgcatctatcacaacagctcaacctgcatcgtcagggttaaaccgttcaggggcaaacccatccaaaggaacggaacgggtgttatcggtgatcaaacttcctgcgtcagaactctcattctttccccgttcaacacctgcttccaatcgggcatctctagattcatggacgactcgtttggaacgatcagcggcaccttcttcaccctcgagacttgggcctcggcgagcgtcgaacgggtcgagaacaatctccccatctagatcgagaacgttacccggcaaacctgcgacgacaacgacttcttcgggatcattaaccacccggctgacgagtttgttcttagatccattaaacaccggcactgtttctaatcctatagcgtacatctcgaccacgagccgtcctccatctagatcaaaatcagtccggcacattcggcattcctccgagagccgagcgaatgcctcacatttacccctctctccctcctcgcctacgttatcgacaactttccgcaaacctcaacaatcagaacaacaacaacaacaacaacagcagcagcagcaagaacaagaaaaaaaacaaatacagaacttgacgacatcgatagcgacagaaggagcgccattggaactttcatcactatcaactcgaactaaagaaccggcccgaagaatgaactggtttgccgatccttccatccttccagcaagcactggcgcaggcgcgggagcgagcgtgaatggaagcgtaggatctatcaagacgactcagctggaagctgagcgaccgatgaaagcctcggctgtgcgaggtgtgggtgatggttagaagccgggcaggccttgggtctagtttggatccggttagatttttcttctcttttctccttttctcttcttcctcgcagtatcgacatagaattttttccctttctcttgtttttcgtttcgatttcttatctcggttgtaaacggattctccactttctagttctcttcttccttttcctcttctccattatattgtcatcctccaagcagctagttacaactactaaattcttccggaagaatctttggctcaacaagtgagaccaaaaaagaaaagaacaagaatcttatcctttgttcccgttccatcgttctgttcgtttcaagtcgaacggaaacccatgttgtatgatgttgtacaaggactcgtcatcccgactggtattatgtatgaagaaagaaataaaaagagaggccaatcctgacaggcgagatgagacacatcctgcacttcgtgttcgcgcaccggcccaactcagacagacatcttcatctccaactttggatgaggtttgtaacctacgacttcgaaatcctccgttctgaacccatcgatcccaccttctttcaattcttgctccgatctggtccatttcagttttgggaactctcttggctctctctccagttgaatcttgagcggttcgacatgatccgcatacacatgggcgtcacccatctggaggacgagttcgagtggctcggttccggtgacgagggcgatcatatgtgtgagtagagcgtaggaagcaatgttgaacggaatcccgagtccaaggtcacaagaacgttgatacatcagacaggaaagtcctggcttggagagagagccgggcggggctagagtgacatagaactggcagaacatgtggcatggcggcagagccatgatagagagatctgagaggagggtagggaagaggagagagtgagttggaagacatagagagaggagcactgaacacaaaaaaaaaacagaaaaaaacctaacctgctgggttccaggctgagaggatgattctcctatccgtaggattgttcttgatcttgtctatgcagtcggccaattggtcgacacctttaccgcgatagtcggtcttgcaatcgacatattctgctccaaagtgacgccattggaagccgtagacgggaccgagatcgccctctgcacggtgagagagtcctcttgagtcaaggaacgccctggagccgttaccatcccagatgtgaatatctttttgggaaagtaaggttgagtccgtcgacccagcgacgaaccagagaagctcctaaacatgtgaagagagagcaagacagagagtaagaagacgaagacgaagaataacaacgagaatcagccaagaataatagcaaaggcagtctaaaagaagagaaacaaacctcgagaacacctctgaagaagactcgcttagtggtcaacaggggaagcgtgccgttctggagagagaatctgagggctggaggcgcgaatagagcaatcgtcccggtccctgtgcgatccggtctgatctgcccggtatggataatggttcggatgaggtctaagtattgggcttcctcatgcttttctgtggacgaggctgggttgattggggcggtcattgtggaaaaggtataagggagaaacggtggagaggatgtatgtgtgtgtctgtgaacgagaaacagaccagagtaaatgagagcagactaggcacacggtcatgttgaccgacgcgccaagtaaagacgcgtgcagtgggacgcgacggtcacaacgcgacaaacacgtgagttgatgaagatggaactgctgtgccaggtctcatcgattgctcgttctcggcctcggccacggcttgagtatgggaaagaccgagaagctatttatatgtgaactcgatgtgtcgcgccgaatcagtatttcgtcatctcctatccagcagaagttcaagagtggcgataggcgagaggcgactcgggtagtaaccagacatccccatcgatcgttaaaaatacctatctgggccggccggtccgctctcatcaccgactgcttgctcatccttctgatcacttacgttgcttgttggccggctgaaattccttcggccggccggtcgttcgaagatatatatcggtgacctcgtccgtcattctttgtcctctcgttccttcgatcgacctcttgtgttccctgttccttcttcgccctcgagctttctttgctcggctgtccctgttccttgattattcctgttccttggcacgttcctgttctctgctagaacaacaaacgacaaaaagtccttcgccggtacgttcttcttcttctctcctttcctttctttcgttgtgctttctctttctctctccttccctcatcctaacacccacccttacttgccctgtttgttttctcgccatcgctcgctcgttccgctaacccatcgtcgttcatttttctccttcaggtttttcttctatttatcgtcctttcctacacttacactcacccacgcctatatacaccatgtctacacacccagtggacggtccgcttccgctcggccggtcgttggtaccatccgaacagccagtgttcactgtatcggccgctgagggtgactcgccattgactgcctcttcagccccagccaaacgggcacatggtgtcagcttccagccgagttcccacgtcgctgtgtatgaagatgagagctccgatcagtatgcccaacatgaccagtatgattcgcacaacgagaggaaccacctgtccccgtctgattactctccggtgtccactcacttttactcgatggcagatgaggatgccatgtcggatctagaactcggtgttacaaagaccgcaggcaaagcactcggcatcgatccaggagccgctacgactgcaattggacttccttcggtaagcctccgtccagagttccttccttctctacatcttactgtgacctaatcgagacgaatgtttcatcgtcctgttatcatccaatcttcaggcaccttcgaccctggtggactatcaaccgaaagatgccctgaaagagtctaactctggacaggttatgtccatcccgtcgagtcctgttcgaacctcgggagaacacaacgaaaaggccttggtcgggagtgctccggtgaataatctacctgccggtccacataatgcccacaatccgaaccttcctccgattccgttaggccgattcaaattcgtcgtcgtcttcggaagtctgatgatctgcgtgttcttgtttgctcgtaagtggtcttctgtgtaagttgtttgtggcttgcacgctgttggctgattttctctttcggttcccatttgctcttgatcatagtcgaccagctgatcatctctaccgccatgtgagtacaatcagatcattcttcaatataggccatacactgactaacccctctttccgctcgtcaaaccttcctgtgaacagtcccaagattgtatcccagtttgattccctcactcaagtcgcctggctctccaacggtttcttcctcacccttgccggatttactctcctttacggtcagatgttggccttgttcccgtctaaatatatcctcctcatcgccatctttatctttgaggccggcagtctcatttgcggagtcgctcctggcatggttgttctcatcgttggttcgtctagttatttttcactctcccactcatttttccttaggcgcgtccgactgacataacgaatttatttgggggtttgataggtcgtgcggtagctggactcggagcaggcgggatcttctcgtccgccttccaaatcacggtcgagctgacaaccctagctgagcgaccgagtaagttcatctagctatctgtgttttcctaacccgatgatcagctgatccaactgtcgtcaatacgaacattgcctttcgtcctcccaaagtttacatggctttgttcggtgcctgcttcgggctctcttccgttctcggacccctgatcggtggtgttttgacggatcatgtgtcgtggagatgggcaagtctattctactcttctgttcgcctctgttcttctattaaccttctctgccttgacctttcaactttctagtgcttctacatcaaccttccgatcggagctgtcgcttttgtcttgattactctcctgtttaaagccgcacccgctctgggcgccggaaacgactcgaggacttttatgcgaaaaattcttggtctcgattgggtcggaacagcaatcaccattgcccacaccgcctgcatttctgttcgtacttgcgctgatcatgtcgtcttagcttattcttgatgtactaaatgttacttcatctgtttccctgcagctcgcattccagtacgggggtgtcgactatgcatggggaaatgctcgggtcatcgtcctcttgattatgattcctgttaccctggccatcttctgcgcatggacgctttacatcgggccagagaaggctatgttccctattcggttccttcgacgaagagttatcatgtgcgtctctctacatatctgcttatatcgaaccctcccaagctgacctgtctcctgctgggatctctttcttgactttcagcggagcgtccctcactgggttcttcggttggatgactttcatggccgttgtctattacttgtccatcacgtatgtcgcgctttcgctccacttaagttctatctgtttcggtgaccttgacgtcctttgctcttgcgcactcaattctcccagcttccaggccatctacggaacctcagccaccaaagctggagtcgatttactctccatgattgtcgttcagaccgttctcatcgtcatgatcggacggtaagcacgctcttctcttttaccttaccgttgttacagattttctgattgggctttctgtttctcaccgatcattggatacacttacatcaactagtgtcgtcgcgaagaccggtcactacaaatacctcatctgctttggacctctcccaataatgcttggatggtaagtctactcatccttgaatggtgtacttctgcagaagtgagagagagaacttatcatctcttatttgttcttaatatttcacggcagcggattgatctactggactattgacgggggtagaggacataattatatcctcggtttccagacgctcattggagttggcgttgctgcgttcctccagaatatcattatcgccggccaagttgagttcagaaatgaaccccgattcatctcccgggctatcggtatcattacctttatcggtttcatcggtcgaattgtcggagtttctgttgctacctcgatattcaacaacttgatcatcttcaagctagataaatatgcccccactatgcccaaggcctaccagtccatcgttcgagacagcgtcgccgccatccggacggttgtacccgaggtttaccgagctgatgtcattgttgcgtacgtctgatctaattttctttttgcaccgtcctgtccctgtcaattctctaagaaggtatacttaaactgaatccccctcccttcttcgactctcgaacagttactccaaatcaattgcaccagtgttcatctatggtgtcgtcgcctccttctgctgcttctgctgctcctggctactcaaaaatgattctcttatcttgccccaagttcctactcaaccggctatcccgtccgccaaggaggacgaggaaaacaggatgcctcgaacgtccttctcgtcctccactttgtacgcgaccgaaaccgggacagaaggacaggagaaagaaaagcagaagaggcagcgggacctgagcggagattcttccgtgtaggtcggctgaaacatcttttgcatttctctctctccttttcctctacttgttttggttcctcttttgttcagtgtttctgcgacgtgttgtcctgagtaattatttgtctctcgagatgcatacgttatctctacatatgattactatatcaatcaccttttttttgcttgtgacttgcttattctattgattccttccattcgggcgttgccctctagaacattttgtaacatcgtttcatatatactctaatctataccctcctcgtttgcgcctgtctgtccgcgctgtgttttgactgcctttcttccttggctcttctcgttcttggatgtggacctcattctcgcgtttcttttcttttttcttccagactcttaaatggatggattaatggagccaaacagaaacagactgaaaagacctagaaagggaaggaatctaattcgaccagtaaactatagaacgaacgaacgatccaaacggagagaaaaaaaaagagaagagagaaggaccgtaaggggtatctaagaatcatgatgacaacaccgaagaatccagaggggaggcagacaaaggagtggtcgaagcagacatggatgttttagaagtgaaagaagaggaggaggatggcgtcgaaagaggagaagaggaagaggaaggcaaagaagaggaagaggaagaggaggaggaggaggaagaaggatcaagaacgaccgttcggccgacgtcaatcactctcatcacgtccggttggttccctaggcccatttctgcctttgcgatttctaaatcctgtggtggtagtgtcggaggctttagagtttcatcgtttgtttatttatacaaggtttttattattgttattaatcattgattcgtttataatggatggcataagattttagtttgagtaaagtagaaagagaggaaagaaacaagaaggacgaacctcatcactcataacccaggttccccaatgaactccaaatgagtatttcgcgcttacatcctgagagatcaaaacacttccctcaggatctgtatgatgcagctggtttcgtcacgaagagtgaggggatggttagaaaaaggagaaagaaagggcgatgagagagaaggagtcgtactgaaagatgccacctcggcccataagaccccattggctaattggacagaaacaatcgtgcttcaaagtgtttagtatgtgaaaacaaaacaagaagagaccttgatgacagaacgaagagatagctaggcttacaatagcagcgagtgtcactggtcctaggacctgtccgatgccttcaaaaagatgggccgagtaacctgagaaagcgcgacattcgagattcaaaccaacaaatcagccaactgagagtgaacttaaaacgcatgttgaacagacaagatagaacaggagaaagaaaagaaaaagaaggaagggaaaccggaacaacgaaccggtatcacccgcatggaagaacgataaagcctcttcggtttgacctggcttctcaacttcttctacgtggaatccaccccaaagggtcgtgttggtgtccaatccgttacgacctgaccaatgctactcgaacaaaataataatgaaaatcagcagagttagacctttcgagcatttggactagaccagttgatacagagagaaagaacgcaccatggctggggtacatgtgatattgtattcttgagatgagcttggatggctgaattttgccgactcccaccagctgcaagcagttcagaagcccaagtgattcaaatgcgtcagtagccgaacgcgttcaccttctttgtatctgccaaaagggagaagagaaggaccgactctagttcggtgacgttggtaactccttccttgttgaaccagtccttaagccccaacggaacaaaccaagatacagtatttccaagctcatggaccgctttgatatccagatggtcgaagtgactatgcgaatacataagaaggtatcgtcaggtgagcgtagcccgtaagcgcaaagattttaacatggttcagacaaagggtaccaacttgtgggagacgagaacgacatcgactccagggagatcatggaggttgcacggtgctggtcgaagccttctcggacccaggaaaggtggattgtcgagcgttcggtccctttgagaaagacaagttagataatagaggcgcgcaggaatcggtgagcattcagtcgagacgatggcacgagcgaagtcgcgcaatgaagttcatgaacggaagagtcaacaagaactcacgaaaaaataggatccgttaggatcttgaggcctgccatttgaacataagatgtcgactgtcccaactgtacgaccaattgagtcaagatatatcttcccgtggttagagatgtataaagtcacaggcgacctaggaagagatatttgatgcgacaaaggatggatagacgtacccaagtgtaattgagcctgtgatcatctacggatgatttcttgagctccacgaaatcaggctgtacaatctctgtcaattgttggagaatctcgagggaaggatattcttcggtgggaaaaatggctgagaggggtgttaggaaaagcttccaaaagaaccattcccagatgcctagagtcacagaaataaatgaaattaggctagacgcatgcgcgttatgtgcgtacagaaccaccagaacagacatcatggctagatacataccctgctctcgccattcagggaacgggttcactatcgatacgtgaggcgttcaaagagagatcagctacaaatggagctgaacaagaaagaaatagctttgagctcaccgtatcttccccagatctttaagcttgcccagcgctgtcgcacgagttccttgtcttgctctgaaagatgtccaactgccagcctcttcttgttgtcgattggctctgcgcctagataatgtgtttcttgaattcgacggtcaaacgtgcgttttctctcatagacaaccagtcgtcgtttggcgtccgtatactgacgttgcgcgaaagatagatctggtaagatcgatagacttaaaagaggaaatgaaacagaaagctaggtcacacgaacaatgtagtagcccatccatcctgtatcgtattcaccccgaggaatgacgaagtaaagcacaatgaaatagattgaacgagtcaacgcctactccggctgaatctgagattatatgattccctgaacggtccatcgaaaggtcatcgagcacagaccagagatgatagatctatggaagatgagatagactaacccgtggtgtaaattagaggaagcgctagaagcgtctttccgacgtctggaaagcaaacccggataaaagagggcccgtaagcgttgagacacacgttggaaagaatgcatcggagaagccaatgcggagaacttacaaggatgaaagaatcgaggcatctgagtatatagactacagtcttctcagatttaggttatgttcccagctagctcttgataagaaagactgcttgcccgctcgctcgcttgtgctgttctctgtttgtttgttggttggttggttggtgtagagaacggagaaggtgaggcaaagaaacactgggggcggacctggttacggatccgcttacgtcacccacggtgttgaggacgggggccgggctggtaacagaaaggttacaaagtcataaccacacaaggctctctggttccagggaagaagttcaggctcttggaactggaaaacagaattgataggattactaggaagatgtcaaggagataaggaagcaaggaagcaagtgaataaggaaaggagtggaagtagcagaggatcccagcttggaatttctgtctccaggtggttgagaaagcccaacttacaatgattcctagaccccagaagcacgatacaaaacacactggatatacaaatatacgctgaagcgcaaacaataagaagtagagcgtctatagatctcggcttgtgaacgaagtgtacctcagttttcatccctggcagtggatcaatcacaagtcacgtgacctgacaattctagcttcactcacttgtacctgcccactccctttcctattttgaaggaatagatctgttcagttaagtgtgtatgcatatgcatgcgcgtgtgtgcgttctcgtgtatttatatgtgcatttgtgtgtatgtgtgtgcgttgtacgctatgtatgtttgtgtgtcggtaagcgagcacgtacagagcaggcgtgcgctccggttaatgtctgtttacatccagatcgaccggactcttcaatggcatgctggtttctctttcggaccaatccttgctgctccttattcgatagacatccattcgcatcatacccacctgcatgtctgttctgagcttgatgttggtacggaagacccagccgagtgatcttcgggcgccggcacgggagaaggcgcagtgggagccggtgtggccccggtgtgatcccggtgatgtgttccgggttgatcctattacctccaaactttgttcgtctgatcatcttgccaaggacaagtgagagtcaacgacaagtcaagcaagatgagaatgctgccttcattccttcaacattaccctccatcatggaggaacactttctcacccctctcaaccgagagcatgcgtctacagattccatcttggattcagccaacgaccgcccgtccctccgaacacataggaaacccgttctgactcggcgtcgtcttctcatcctgattgcgatcttgattgttctcggaatctctggtggagctatctaccttgtcttctcggtggctagatatttctggcgtctagtctttgaccctcatcggggggctacaatctactacaactacaatgccgtgaatagctactacggcgagaacgttccccagttcgatgtcgtagccagcgtgtttgtcaggtttggaagagagtttccgagtagaaacgacagcagtttctacaataatctctctccagacatatcattccgtggggattggcagtcaatctatagccaggccgtcttctcttgaatcagcctcaactctaccgacacgaccttcaagaagacggtcaatttgtctatccctctggatgttttgtcagtttggttgtctcttgctcgtgtctctcttattatcctgagttcaactctctgacctctccactctcatccttctacgaaaacagatctcaattttacgagccccaaactttctttcccgaaatcatcaacaccttcgtcatcgttccatctgatcccgatcctatattgagctccctcagtccacctcgagtcgagatggaggagttcaaagaatggtatccctccttttcttccttcgaatctgcctcatcgactaaaaatactcttcaactgctcgctcgtcctaaggatcctctcgccaaccctcctcgtgatagctcgcatctagaaaacgtctcgcgatcgcttaacgcattttatgattctggggccgtcagagagtttgccgtgcgccctgttattaatgaacgggccacttggggtcagccagtaaagtaccgtgaaagccgtccgcctaacgaagccgaagagaacgaagatcttcaaattcaaagacaataccttccttacaagcgggatgcgagcctgaaaatcaagtctagaagctggctctctatggctaaggatacgccaaagtatgattatgacaaatatgttagaaaacgtcgtgatgtgggtttagaacaggttggtcatctcatgatgaggtttacctggtgaaaccagagtttagagtttgtgagcgctaactgtctttgaattctggatctttctgttggtttgacttgtggtttcttcatgtagtcgacgattgaattcaaacgagaccctctcaattggatggccttgatcgcctacattcctttcaatgctgtaggtcactaccggtctttaatcactcagcactttgatgcgaacagtacccatgatcctgccaaagcaccatggtttcgtagacctgaaaagactcatttctatggaccctatatgactctgcgtatgttttttaaatgtattcttctcattcaagacatcggtttagtcgacatcaagatgacccttctccatcctaaattccttcattttctcctccgggatgtaaccctttacatagacgatcatgcagctgggtctgaggattgggtcaccttgcctcgtatcgatgagtcttccaacgttcaagctggtgagcagtattcagggacagaaagaggatgaatctacttttctgacttctgcgcgctcatcaacctctcattcatccttccctttgacgtccttatagatccgttcactgttccctggaacatcacctttgatatcttatcacaatcgaaaatacttgctattgatgagatcaacgagaacaatcttagatggctcgatcaatatagaccagattatccatatagggacaatggttattcggaggccagtacactgcaggtggcggatttcataagtaggatcttctttctccctttgatgacaaatattttttgttcttggctgcctggtcttagagggtctctgatcaactgtctgtctacctgttatgcgtccactttaactactcccagatgctatctttgggaacagccacacgtattccaaacggcccatccttcgctccgtcttcatcatcattggcggcttgatccgataccccctcggattcatccttcaggcgtatcacctcttttcccggtccttgagcacgggccttagtcttccgtcgaccatcctttacctgtgtttcagtagtctgtacgaagcgatctcttatcaccgacatcgttatgattatgacagctctgcatggatgttggttgcagtacaggtgatcaacattgtttccatctggcgatgggcttgtctttggtggggcatcggcttcaaatggaacggccggagtggctcaatccctgtggggttctacaggtttgggcgaacacactcggagaggatgagcaggaggtccgaccagaagcttacgtgggttcaaagaggcgtggtatgtctcttcttttctttttgcacgaccatcagcttagcactaggaacgtcatttgagaggaagatcactgatcttgactttcgctttagttcgtagctattctgacgatcaccctaacataccttcctgaactcccccatcttatcagcccaacttaccttcagctccttcctatgaaatttcctaatcggaggcctcctggcttcttccggacgctctcaacctggtcagaaaagcttcggctgccgaaatacggaacttctctcaatacgtcattatcgatgatggcgttgttggcacaggtgttgttgaattggaggttggggacgttcgcagggtcaactccagctttcgcatggactcaagtagtgggcaccattcgtacgttgccttcttcctttttgtttcaatgttcttgtatccgattttcatcgtttctttcaacgctcttgatctcctctatagtctcgtggacgccaacggtcttccatactatattcggtaaattccacgcgatggatcctctcagaataagcgatgtcctgagattctgtatcgatctggtcattctctcgcaggctgtcagtttgccgaccgtcaatcagaaagaagaagagagtgaataaggtctggattccttacacatggcagtagagtgctatgttgtatgtatatacaataacattcatctgtatgatgaagaacgatgtgtatctcgaaagaaacatgacttaacagatccagcttctttttgcatccttgatgtcagggacttgacctgggcgataatccccttattttctctttcttctcctgcttctcatccttttttaatttctcatgctctcccatcacatcaacgtgcaggtgtacagtcttccagcgcaagtgcttctagcgccttcaaagatttgtcttcttgtgcataatcgctggagtctgaggatgatatcaaagaaggggctcctgtaccaccggtagcatagttttccaagccgagatcctttgttattccctgtacattgtgatataaatctctttcccaactccagatgacccctgcatcgtcttcttggttgcacaccattccagcgagagtctgaacttctttctcgcccgattccatttcgcgcgcggttacttctgttgtaaccatccagtaaccacttcagctctggatcctaacagcctgatgttacaccgcttcacgtggtatatcgtgccacactcacacagctcactttacctgctaccaagtttcccgaccaagatttcattagatagtgcttccaaatggatctctcctttcttgttccacaatcaccctcgtcgtccaagaagaaaccagcgaggacaccgtttgagagaacaatgtctgcaggctcacctgcctctggcgctccgaaaaggccttcacttgccgttcatcagtctgggtcatccatccgagcaaaggcacaatcgtccgtctcgttcaacaagtctattccccttcaatcccactcgacatcctacctcggtccgggagagacccaaactggatatgcagccgggaaaggaaagcgaaaggcagagcccacgagcgagcagacaaaggtcgtttggaagagtttgctagagagcccaaactacgttcgttggtcagtattctgtgttctggtttctccctacttctgtatccttcactctctactttctgctctcgctatgctgagtatctttacaaaagtttgcgagacaaagctgacggacccaaacttgatgaaaaactatcaggccgacctaccctcgtcatcttcagcaaaccacacttcatgcgctctgtgcactgtttgccaatgtatctgactacaaccatgcgaaatccttatacgctcaaaaacggacgaggaaaacaaagaaagccatcaagaaggtctccaagaccacccacacaaagccgagcccatcgtcagaagacaaggctccatccaaagccgtcgaatctccaacagagcatgttttagaagacgtacaggatgtttccatggtcgacattgacgtggagaatgccggaggtctgaagaacgtggatgaagaggaagatcaagaacaagtgatgatcaactcgttgcctccgaaaccatctattgtggaccacctggtgttaggaatcaatatgtgtaccaaatacctctcttctactcctttgcttccacctgcccctgcttctgcttccttgccgtctgttttgtcttctcctgttgagccagggtcgatcgagccaacacctctgccattaggctttctccagtcgtttatccccccttcatcaactaaaccagagcccattaccaaccatactgaatcttgcacgaacaaagttgcacagaaagggtcaaaagataaggaagaacatatggtctacctgtttgcctgtctaggtgatatctctcccccctcgctcgtcagtcatctacctcagatgtgtgcggcctacaacggccgacggaaagctttgaacttggaaggaagagtgacacttgtcagcttgggagtcggagcggaagctctgttggctagcgcgttgggtgtccgacgatgtgctgttttgggcgtcaaggtaagtcctcgtttcgggtcttttccttttcttgtgtacagggttctcttgccttgagtttctctgagagaaaaaagatccaagtctgaccaatctttctttccccaatgaaactgcagtcgactgtacacgcctcatctctgacccaacttcagacgattctaccacccagtcaatatccacccatccgaatcccccacctcgaacctcgatctcctttctccctcgctctttcaccctcagagtcaaacgcagtcgattctccttcaaaagggttgatcccgactcaacggtctttggatgtagtgatgactcctacgtctgctcaacctcgacctgttcttccagattttacacctactcaggaccaagctcaagcccgaacaatgtccttgtctcgaacaccatgcaaaaccaacgggaatgcccatgaggatatcaagttaaatggaaaggggaatcggaccacaaaagaaggagcactagcaccgatgaggataaagatgctcaaaacgacggcaccgaaggacatgaaacgtatcaagactgaacgagtgaaagccgttggtgacgctcggagactggcgaggacgaaagctgctcaggatgctggaaagaaggctcagctggatgggaagggaaaggagaacgggaatgggaggggtaatggaaaaagaaagaacaagggcaaggagattgcaaaagggaaggacaaggagaacgatgaaaagaaggaaaagaaaacgccaaaatcgaatatataagatgactgtcctttttcatacttctaaagtctcttttcgcctgttttgttttcattcccgttcttatctgtaattgttcttgctttgagaaaagaaaacgtctctttttatcttttgtctcgctctcgattaatattcaagagcctcgtccccttcgacatccattcctgtactcgcagtgggcgcagccgatccagtcaccgtccccgtcctcgactcatctacacctttcatctcctgatcctctccctccagacctatcgatttttctagctgggtgcctgtggttgtagccgatgcagggacagaagatctattgagggcagttgtagattgggtgtttgaggattctcggtcgagaccttgacgttgtcttcggagatcctcgatcgatttcatcaattcgccttcttcgttccttgccttatggatttgaaggagaaaccacccaaggaaaagacaagaccatcagaagagtgaacaaatacagacctactctcacgaagtagcaaaatgaggaaaaaatcagaaagaagggacaaacctcaaccactcggtcttccaatgcgcttctctcttccacccaagctgtcttttctcgtttaactaaattctcaacctcctcaagctgtctgttgactttggtttgctgctcatccgtcaatttggctggagactatttggacccaagatagatttagcaaccatgattcaaacggacaggacagagagagagagagagaagagaaccaacataaaacaaagcaggcagagtaacttccggtcttggtttcagaattccagacgactgactcgagattggaaataacgagctcaagtggcttgttgagggggataacgaggcgtctgtatcgggtgagactgattgagttggagcagaagaagtggtaaggaggaaagacgaaagacggagcagagaccgatggcgggtagccagctggaaacaaaaagagagggatggaaagacggagtttagaaaaagaggtgtgatctctgtaggtataaagagagaacaaaacgtaccgatcctgacttgagtttaacctcaaactcttttctctctgcctcgagccggagagttcgagccgaacgttcctttgtggcaagctcctccgagatcgtgttttctgatcgaagctttgtctggattcggtttgtgatgagctctcgtctctttgccgcgtctgacgcgtctcgtttccgttcttctttctatttgttttcggaagagggaaagcgaacaagagaaaggaggcaaatggatggtggaagcgcataactgtaagtcgcgttgcaattgagagaagcaaaggtcgaaaggcatgtgagtgacgtactttgaaagcatcaagcgtccctagcaagccaccaaagagtctctttcctctcttcttctcatccgctccaagtcctttcttacgtcttgaataggtttgcatacgatgcgcataaaggaaaggcgaaagtccaaggatcgagggtcaggaaagggggtaggcgtacagcccaaaaggatgacaagttgaaagagaaggcatagaggaaaaaaaacgagactaacctttcttctctcttttcggcctcagtctgcttaatgggcgagttcggtttgactggagggacggtggtagcagtagccgccggagaagtgatctctgtatctgctgcttgttctgtagacgtgagtgtcgatggctgggatgtgggatctaacgatgactgggtgatgtcggttgacggggcctgcaccgttccggccatgatgtcatcttcttccataactgtctgaatagaagagagaacgaataggatatcgatcgaaggctaaagaggatgagaaggagaagaggatggatctatctggatctatcaatgttggtgtgtgtatgtgagatttgaggtgagcgaatgagtgctggagaggatggaatacctgaaggtggttacgagatttgatctcgtaacatcatcagctgtgcatatgaatttgatcacctgatgtgattgcgccacactcgagcacaaacggtaacccgccctgtacatccgcaattgttaaacgatcggcgggttcgtcactgtgaagactgagagatcaacatcgggcggtgtttttgttgaatgactaaaatgatcaagaatagcagtggaagtattttgtgtatcgcttttaatgagttctatagtcttcttcagtgttctctagtctctatctagtgtcttttattctccacaccctcgttcttatctatgagcactatcaatagattctgttcgtattgaattactatgattacgatgtagtccgttctggttgtcaccgcaggctgtacaacacgccctaaaaatccacagtgatcacaccacatacccagcctctccggttttcttccttcgtttctttctttctgtctctctttcctgaaccccactccattttgatcgtcttgattccttttacattactttctctggcatacacaggttgatcctgaacgttcactgccatctgttttcttcttgtttctttcgtcctttccatccccccaccctcctacctagacatcctgccacttgataaccacctaggtcccatcattgttgatcgtttactgtgcctgttttaaattcccatcccctgtgcccttgatttctctttgttcccctttctcctctcctctccactccgcttgcccttatcccagaaaccatccatgctttcccaatcgttatctctcccactcgcattgctcagcgcgagcgcactgttcccatctttagcgtccggtcatatcgctctgtggaatccaggtacgcatgtatcatccatacactttctcaatccgccaagtattctcccttacaggattacatatcgatgacgcgtcctgggttgcccgcttttttcttctttttcaccgctctccctgtccctttgacctgttctcaggactctacggcttcaacggaacagataactcggtcgcccagtacaataccgcagctgcagttgtacgtatatgatgtttcctcctagtcttccaagccttttcctacactctctcttcttgttgactgataaatctctattgtcttttctttagggccctcttcgaaagtatgataacctgacacaatgtgagtacaccatcactgtctacaccttgactttgatttttgggattatgtatggtcgttgcaaagggctaacaagtcctcctgcggttcctgccctttagctgaatggttcggtcacggcttcttggatcttccaccaaaagacggcgactttatggagctcacgcctggcaagacggaaacgttcgaactctcatgcaaccgtgctttcacaagctacagaagcccgacagatactggtgacttacctgagtacgcgtgcactggcgaaggaccgttacacaccgtcaataacttcaatgacactacaccggtcaacactaccctcctcggtggttgcgtgctggcaattgcttatgagagcgacgtcaccaaacttcgtccagaattcttttccgtattctctgtaaatcacacctgtgtctggacgagagaaattgactttcaggtacccaaagatatgccggcttgtcccgaaggaggctgccactgtagctggaattggatccatacctctggaaattacaacgcagaaggccggggcgaaggctacggagatgagatgtaccacaacatgtaccgctgtcgaatcaataacgcaacgaacactacagctgtagttgatacacccaaggtggcggctaaatgcgagggtgatacgtccagttgtactccgggcgctaagcaaccccactattggtctcagcttgatggaaacaacaacaactctactgttcgtctaatctttctgcctttacgttggcttatgcgcctcggttgttgacatttctttcggttgcgcatgcccctttagattccaccgttatataatatgatttacggctgggcggacggagcacaggtaagtcttccttgcctgaagtgaggtcctgtcatgtcgtcgatcatgctgactagcttgttgatctctctttctctacaacagaatgacatttttgtgacctctacaaagtctaaatcggacgactcttcggcagctcgaagcatgccggcattgtcggccaagaacattttcttgatggcaacagcgatacttgcgagtatagtcacgatcaaaagctaagctggttagtctggtgctatccagcttaacaacccatagaatttttcattccttctttctttcttgtctgccggttctcctgtttcatgttctactcttccccaatcattaggttacaagtcttcctctcagatactccttgaacatagtttagtatagtttagtatagtttagtcaaattcgatctagtccagctgtcagttttgctctgtctcattctccatatcccatctccttctcttttttcttttctcttctcttctcctttttttttggttttccgggctggtcctttctttctaattcctcaagacgatcaatactgtatttctagatatatttagacgagtttttacttctcttttccaagttacttcacttagttaccttccatagaccttcctctttgctttgttttccccctcctctcccctcctctgctcttgttgatcacacttgcctctggttttttaatcagaaaccagtggcgttatgaatgacctttatgtgttctttcacgacatggtccaaaggaaagaagagacgtttcagcctaatgacacgctcggtgcctgtgttcctgatcgacctgtagggcgtgcgcgcctatcgactgccttctgtctgtgttttcattccctcctccctcttcctctgactactaggttgattcatttgataaaccttggttgtttttggaggaaatgaggagaacaacaacatcgtttctttcatattctccctcaccgaacccaccttgctttctttgaagctttcttcctcgttaaaataaatgatttcaacattctggctgcacgtcagtctttgtctcgggatgtttcgatctgcatcagcccatgtcgccttatggaatcccggtatgacccctttcttttcttcctttctcaagtcgtctctcttccagagagttcttctttatgaaattaaagctggatacagagctgatcgatgtcttttatctcggtctgtttcattgtcgtttcccctttctgtatcttttttttctctctctctttggcactgccgccgacacggaaatctttggatgacgttgatgcttaggaatgtacgctttcaacgggacgagtcagactgtcgattacaataccaaccacgccgtcgtcagtgttttttcctggtcattctcaggactgaacgttaaaaccttcgttcgacgcgatagattatcgttggatgttgaaagccaactgcttgatttcatacaaagttctgacgctattttagttttttcggatcggtagaatcctttaaggcagtcggacaatctatccatcggttagtcctccaggtaaagttcaaagcgcataccaagggggtttcgttttaacctgtttcgttttatttccgtctgggtgcgttttggatgtgtgggtatgacgtaaataccagaacgatggtttggacatggcgatcttaatcttcctcccagaggcgagtatctaaattgagttctccttctcagagtttatggaaaaaaagcctaacccccgctcttgaccccttttttatttatttttgatcgaggagaaaattggttgattagacggggatttcatggatgttagtgatcaacataacctatgttagggttacacactaaacgcaagttatcctttttgcccgattataactcccctcgcaattgtcgataacgaacttcgaaatctcaagttgtacccaggtcaatcggccaagttcgagatcagttgtaacaggcagttcacaaagtacagggatccgactaaccagagtccgttaggagaatacgcatgtgataccgttggtcgtgagtttttgagagcgcgcgcgcgttctccttcacgaaggcaagagagagagacttgaactgatttttctctctggggtattggtgacccactggacccggatgaaaccagcactacatacggttcttaactttggagaagcagtagatgactcgaagtttggaggctgtgcgcttgcgatcgcttacgagtcggatgtcaagaaactaaagccagaagatttcaccatcttctgtcagtctcagtcgtctgttctcttggcttttaatcttcattcttttcgatgcctttgtgcaaattgaaaactcttgaactccgaagaagccaatcgaggaaagaaaactgacctgggcaaatgcgctgatatctcacccttggactttccgatcaaagcggtcaaccactcatgtgtctggtatagagagatcagctttgaagtcccacaggatttgccggaatgtgacgatgagaaaggctgtcattgcacttggaattgtttgttcccaccgatttcatgctcagattcacgaattcgttttgtttacatgcttggcgccgttcatctttgacgttgagaagggatccacacggcgaacaaccagaacgcagaagggagaggtgaaggttatccattcgagatgtatcaaaacatgtgttcgtcctacccctcttccaccgctcatcttccttggcttctctgatgccagatctgaaaggtgtgcctgatcaaatctctatgatctcttgatgattgttgtgtctttgggggatggtgaagtatagacagatgtaggatcaacaacgccacaggcgtccagccagtcttgaccggtaaagtcgctgccgagtgcatcaacgggaacggaacagagacgtctggttgtctggatggaccaaagactccatttgtgtggtctcaagctgaaggggacaacatcgtttctcaagtttgtctatcgtctcttggtctgttctactttgagagcgcgcgatgaagaacgatgactgatgagatgagggtttcttctttctctgttgtgagagtagacgacaccgttgtataacatgagtgtgtcgttcttacatcttgttttccttcgaaattcgatgagtgaatcgaaaaacccaagagaagaagtcatccctaatcttatgtatcttcttgtcttctcttgtggtcgagaaaatagaatatggatttcagaatggagcgcagaatgatatctttgacaccaaacccgacgacgatgacgacgacaacgatgataaagatgataacgacaaggacaaggatgaggacgagggcgaggcaaagaaggatgaagatcagaaagaaggaaaaccagaagacgcctctggccaaccgccctactcaccacatgaatcaatcgatgaaacaggatgggccgttccagagatctctatagggatccctctcgttggttccactctaggtttctttcttggtcgagtttaggttgagaacatcttttgtgttcgcttttctttcttcctttttttttcttttactgtatctactatgcttctttctttctgtttctgtatcgtcctgttctctaattcccgtataggtagacacatatacatatttgcacattttaaacaaagggaagaacgaacgaatgaacgaacgaacgaacgaaagaactacagaaagattgcctacaagagcatcaggtagaaaaagatagctcttagtacgtagcgttatgaccgggctggtacaccggctcaaacgcgtactgtttcccggtgtacaacgctagagatagatccgaatcgattgtgaacggagagggatccgaatccgagaggataaatactcgcatgaggtcggctaccatcctgccgaacaaaaactggccggccagattcagatgggtcctatcatctggcgagcgattgagtatttgcgaagcgctctggccgatcgattcgagataagcaatcgaaacctcgtgcaaaggaagaagcgcgcttcctgtggcatgcgcgacgtcgatcgtggcgtttgcccaaggaccgagcgtgtccgcgatcaatccggtggcgttgttgaaatttcttctggagagtgcggtgacgagtacagggttggcgccgaggttgttaagttggtgaacgaagcttgtcaggttggcagccatggattctggaggggcaattttcatgtcgttgtgaccgaactggatggtgacaaacaacttgttacctttctccgtctgtgtgcatgcgtgattgaaagaaaggatgagaggatgtaaggagaggtgagcgaaagaaagttaaagaaagaaagaaagagagagagagagaggacaaggagaaaatgggaacaagaagattgatacaaaagtacgacgtcaagcaaaaacaaaagacaaacctcgttctgaacgtcagcaagggcaagatcccagaaaccttcagacacaatcgtccctgtggtctttccattggatgatctgtccgaacaaaatgtaccgccagtgaggctgccgcaaaatccctccgcccagcccccggctttaagcgtcaacgatggttaagaaaaggttgaaaaagtcagctatcgagtcgcaacagaaagcgatgtgaggatgtttccaactgaacttacaattcaaagtcagtgtacccgaatgggtggtggaatcaccgacgaggacgaacgagattccgttgtaggatgtggtggtggtggtggtggtgatccgctggaaagggtacgcgttagagcgagcgctgcagcccaaggcaagattcaggagagcgctgataggcagagtggtgagacgcatggtgactgtaggattattcagggatgagcagatcaaaggctagagaggtcagcagaagatgggttaaccaggatggattgttgattgtgctttttatcgtcaagtacattggacagagccggaccggacggagtccgcgcgagccgaccggacggtaggatttacgagctaaagcagagcagttcgaagggttggtcagaggtacatgtgtgagccgcagagagagaagggatagcaggtccaggtgacctcaaaggtgatcttgagatcatatctcggatcgcacactgggtcaaactggactgaacggagcggggctaagctgaacgaaatcgagtggaaaaagtgattgaagaacacccaagaggggagactcatagggcgtcagtgtgcgttcatgaaactcagctcaaggtatccgctacgtgtgtgagtgtataaacgtgtatgtgtacgtgtgtgagaccatcactgtacgttggttagtatacacaatcgtgagcgtaagtatcagtacgggcgtggaaggtgagaatgagcttgcgtttggttatccgtttacgcgactaacggtctatgtgaaattcagcgtatgatattgacatgcacagagcctataaagatgcataccgattgtccagtctcgcattagcccggacaatacgcgtatggatcaataataagcaacgcggtttaatacttgggacgatcggtcggagataaaacgagcaaagaaagcaatttctggtacggaaccca

SEQ ID NO: 1209 - DNA, 647 bp, Xanthophyllomyces dendrorhous
gacatactcagctgatcattgagcccagaccgcgggtcttcggatcaaccggtccgaaccaaaaggccagccgatgggcccggactttgagccctgattgaacctcagagcgacaagccagccaagcgcagtcgaccgtccatgacgatgaggtctaggccctgcagacttccggcctatttccgattttgccgttcttttttttctctctctctcccctttcgttctctccgcctgactcttttttttctcctccttcccttcttgtctctcgtcgtccttctccttcttttcccggcttcttttgttgtgtcccttgttggtgtttcttgttcaagcactcgttcgtcccgcttgtgatcgttgtggttgtggttgtgttcgccttctcttttcgtctgaccttcaaccaacatccatcctctcaatccgttcgtccttacagggctcttcgaccggaagaaaggttcatcctatgaagagagcgttatagggaacaaccagtcttcttttcttttcctttccttccctttcttctttcttgtgttttctcttctttacaaacatcggacatacacacacgcacacaagcataccttcaacccgtcccttgttgttcaaacagacacacacacacacacacacac

SEQ ID NO: 1210 - DNA, 4556 bp, Xanthophyllomyces dendrorhous
cacacacacacacacacacacacacacactctcacactcacacccatacacatacacgtacataacaaatacacctccagcaccaccctcgttctccctcaaccccagtttttctctcgctcggtccaccagtcgactagtgctttcctaccatcgccatggccgaaccgatagaatctcccggactagacatagagacctggtgcccggtctgcgacaaactgatccatcaggcccgtccgaccgcccagtctaggttgctacaacagcagcagaaacgacaacaatccttggccagcgatgctccttctgtacatacagccgcccttgcagctcccgctccagtcaataagactggtccgctaaagtacattcctccgattgcacccaactttcgtagaagcaaaacgggaactatcaaggtccgttccaactgtgctcgagtcatcagggtacattcatgtctgactcatacacccacgcatacattctctctttctttccacaggctaaagccccgccaggagcgatcattgtgcctccaaacaccaacctcaagccgtctgctaccatccgccgaccacaactgggtaaagacctttcgttaaatcccactcagttgacggtcgtgttaccagatccgcaagtgtcctctgacgagaatttagacggagcgatctccaacctttctctccttcccactactcctgctacgactaccaccgcctctgttactgctgctactactactactactactactactgctaccactactactactactaccaccactattattactactgctaccgctaaacccgacgttatccgagttgaatccgaacgcaccccgctgcctacacccgtccctgaagtccaacctacggcttcctcaacagccactgtccctactcctgcttctgccgtgtcacccgcttcgttgctatactgctcattggaatgtgcaaagctagacgagatgcgttcccagagtgccctggagacccatctcccagaggtcctacctctctccccactgtccccgttctgggaccacgactctccgccgtacggaagcgacgccgagtcttcagattaccttacatacatccctcactcggctccgctcgagagacgaaactctagaggcactgctaccaccgtcagctcctcagaatctctccagagcttgtgcgacccacagccaatgtctcgttcaaactcgagctcttctcaccacaatggcttcagaaagttcactcccatccagccgtactctggatttccgatctcgcccagaaagtcgctgccaatatcggccgatcttctgcttgccccaccactcatcacctcctccagcctgacttcctctccgttgccggttccgacatacaactatcggtcttcctctcactcgaatcaccaccgggcctccttctcgtccgtctccccggcaccccgatcccatcacttcaacatcccttcctcgtcttcgtcctacgcacactcgtccgcctcgtttgagcccggatcagcaccggcgactgcctcgctctacgcagagtacgctacatccttccaaaaaccgtcatcggtctcgagcaggacgacgtacgtcagcccccgaaggtcttcatccaccatgagcgtctactcggtcatcagtggcgatcatcacactgaacattattcttcggaagacgactaccctaacgaccgacatcgtggtcggacgaacgaccccagaggaaggaccagaccaccgatgacagatagaagtacgtccagctcgaacggctatggagtgagccaaaggtcccatcgcttccagatcactccaactcagagctccttactcacgtgtggccaaccggccgacccgttcaagcctggctcaacccgtaatgcccgacgagactcgtccgcctcggtagcatcctttaccggatcggctaattcgtcgggtcaatactcctcacgttcatactcggatcatcacacctccccctcacctgcatacttctctaaacgggccgtcaacaagaacggatcgatggctgctcccccgatcgttcagtctggtctcagcccgaggcgtccatcctcaggtctctcaacaatatcagcagtcgcagcagaaacgagctgtgcttggtcatcgatggaaaagatgtacgagatcccgaggtgtgctggttcgggaacaaatccgtccaagagcagtttaggaagtgctcggctgttctactggggtgaatgagcaatcgacttggcggcgccttcgtttaatccttttcttgtctctttctttttcgcttcctgcgctgttcgttctccgtctactcagaaaacaaaaagaatcctttctacacccttccgttcatctcttcacccaacctctggatctgtacaaccttctctttttactctctcattcctcctctttttacccttcatcacacctttcattctctttgttttctttcttgacgaccttctcttcccactcctcttattcatctgtttacaatctttcttctctttctcttttctttcttgcatacgaccatcatcgtttccttcttctcatattttttttttactttcgcacgagaacaactcctttttaccaacctttttcactttcctactcgagttcactccgtctcagaagcaatctttctctcactacgtaccctcgacatctttcatgatttcttttcctttcctctttgtggctatcttttgcatgctcacacaccttgcaagctctgctcttcgttcacggcgaacatcttttatccgagaaacaatacaaacctcacagggaaagcgaagcgaaagagaaagggcgaacgggtttggccggcggcctcgcccgcctgaaagcgacttctaatgttaaatctgaaaatctctcgatcaatcatcgcatcatcattcatctcttcccggttcgaccgaacacgaccacggctgtccaacagatgatatcgtctagaactcggtcgatctctccgacgtttctcaaagcactcatcggttcatctatcgtccatctcggtctgatcgcttatggaacgtatcaggacgctcattcttcggtaaagtataccgatgtggactatgttgtcttttctgacgcggctaggatgatgtggaccgggccgggagtagggtcagagatagctgggcaagataaagatggctcgagtcaaggcctctggggaggaagttggttaggcaggtctgtttcaatctatccatcttgtactctccttgctaacatcaagtagaggagacaatcaactgatgatcaatctttacacccttgcgtcgccagtccgtacacgagatcgacctataggtatacacctttgttggctgtgttgatgctgcctaattatctagttcatccagcgtttggcaagattgtgttttcggcatgcgatgtgttgatcggatacttgttgtaccttctgtttcctccgtcttgctcggtacaaacttggtcgtcaacaccagctaacgacgagaggcatagaaatgaatcgactattctaacaacagacgaaacaaattcttcatccggtcaaaccggtatcatcaacaacaacaaaaaatctgcaaactcaccacgaaagggattctcctcgaaccttgaatcatcgacaatatggatctcggctctatggctgttcaacccggtcccactcaacatatccacaagaggttcatccgagtctctcctcggcgccttgattctcacatccctgtacctcttcgaaagctcgccgaacctattctcggctagctcgttaacacgctcccaggcctgggcatctgttgctcttggacttgcggttcatctaaagatatatccggttttatatgctttcgccgtactaggtttcttgggcaggaacgaacggacaatcctgggccgtctgggtgtctgtagaggtggaatcgaatttggagtcatctcagctgggacgtttgggttcgttacgctaggctgctggttgatgtaagtgaacacctgtctttatcctggtctcgatgtcttggtgtagatcactccttctgttcctctactgaacatttgaaagtgcacacgtatcatggcgcgcgttccctttgaccttgctcctatctttgttcctggtgatatcaactcagatggggatacccagcgatataccatccgtatctgtaccatcttacccgactggatcaccgacacaacttttctccatacttttacccgatctatctcctctcgtccaccaacctgtctttctcctctaatccaagcgcgctgataaagttgttgagatcatcgttgacgtcgttcgtccctcagttgggactcagtttcggtctcagttggtggttgggaagcagaggcgagatggcgctcgcctggggtctaggcacgatggcgtttgtgtgttttaataaagtcatcaccagtcaagttcgtctccttctcattttccgtctgtttgctttgttcttgtttctttctgaacctgtgtgtgtgtgtgtgt

SEQ ID NO: 1211 - DNA, 15182 bp, Xanthophyllomyces dendrorhous
  misc_feature (14313)..(14322): n is a, c, g, or t
gtgtgtgtgttccgaagaatgctgatatgatctttcgtcttgttgcttcccttttatttttattttttttatttaaaaaaatgtaatcgatgacagtactttatatggtatatttcgttcatgcctctcatccttcctcggataaatgtttcccggaaaaaggcgttctggatgatcttcgcttgggtttttggtcaggtgtgtctctgtttattccttcttcttcgcttgttttttttcttggttgtctctgagagtataatcgagtggcttagttgttccttctttccttttttctttctgatcaaaacaacaacaacaacaacaaccctggcaacgattcaaggccgcttggctgtacccggcttataacttagagtttctaggaaaaccatggtttctccctttgtggatgtcgagtatcgtttttctctggatcaacagttggatcctcggagagcttgtcagcgactatcgatgacgttgcgccatcctgcgtttctcttgttcttttctatgaacgttttgaaagatgagaaaaacccgggtagaacgatttcattcttatttctattcctatgttgacgacgacgacgacgaagggtcgactttctggaagaacctttcgacgtatctcttgagtggctcgtcagcatcgatagctcgtcgaagtgggttggatgtcgggagtgtatgtaagattaagaataggtgggatacaaccaggcagtctaacggggtgggcgtcctgtaaggagaagaatgaccatacaaacaggtacacacacacacacaaggtaagtatgagagaataagggtaagaatcgagacaaaaaaaccggagatccgtaagagaaagaaagtcaaaagaaagaaagaggagactagaacgaacgagcaacccaagaaccagtcgtccggacctgtgccatcagctaccaatctaacacccaacgctctgatagcttccgcgccttccctcttgatcgattccaaatcgactcgtttcagctgacccagactaggcaagggtgaagtcaggccgcctagtagtgtaggtggattaggtaataagagcgcaagtcgggcaacgctcgtctgagaggatgcaagggaggccatgtaggctgggtagatcttgtcagtcgccagacgaccgaacgcgcgggcttgagcttcaagcgtggcatttggataaccatggaagctggacagcacaagcgagaaaggggatcgaaagtatgataggattcaaatcataaagaattctcagcaaaagaggaatcaagatctacttttgaaaggatacgtatgaagaggagacgaactcggacttgatgtcatacagcggatgttcggcgtccagccaagctcgcacttccgaagctggtacgatcttctcgggcagcacaagagtcggtagttttcctatatggatctagctattagcacttacttacaaagtgacaaaccagaaaaaagagtgagagaaaagacaaaccttcaggtgcggtactctctgtctcccattctttccactcggcatcgactcctgccagcaggaaaagcagttggaatcttaatgatgaagggtccgacgatacccagtcgtagcttgtcgtgtccgatcggagacgcggagcaatctttagttgtattcgcatacgttgtaagtgatacccatggcttgttagctatataggatttttattcgatctaacgtgaagaaagaatgaaatagacgaacccagagaacaggtttcgacggagcggcgatcaaatgtctggaagtagaatcttgagtttcatacaagggaaacctatcgtagaacgcttgcagcttagccgacaacgtagagaagatggaggtcgccatgttcaaagggtttggacgagatgatgggtgggatagaaggtggacttgctggttcgtccggttgactacaaaacattctaatgagattttcgaaaaagattaggcaaaacttttagtccagtcacttcaccaacaaccaccccccccatccttcaccctcgacagaggtttcgtactctacattccatcactcttcctctgccttgcattcatatacaatgtccttcaaccgtcagcctggatcctcatctgctcataggggaaagcctagaaacaaccgacctcctcatgtaggaatcgccccgggctcagccggctcctcctcgacaactcaacaggagggagagaagaagcctaagaagttctaccaccgaccgacggcagaggaaatcgcggtcgagaaggccaagaaggagggtgcagagctcggtgccaacaagttgaaggctaacttgagacaggccaaacggttgctagctagggttcgtgctttctatacacaactttcctttacttgcgtttgactgactgacgtcaatcatctgtttggttacccgctacacgtattgggacttctctgcaggataacatccctgcggatgttaggaccgagactgaacgaaaagtcaagagtattgaagctgatttggagaaggcgttgtcaaagaacgacgagaaaaagaacgctgcaaagtatcatatggttcgttctttccgcatttattaccgggtgtacttgcttctcaagtcgaactaatcctcactatgtatgggttgcgccaacaaaaactcgatggctcaaacataggtcaaattcttcggttcgtcgagtttcacgaagcggaagaacgcgtctctatcaagaacatgaaatgctgattctaacaaatggcccccatcctcactctagaacgtcaaaagcttatcagacggctcaaaccgttgacaaagaagctctcgtctgattctccagcggaagggagcaaagaactctcgaaacttcagaaagatattcttgacatcagagtcggattgaactatgtcttggtctgtgcacttactcctgcgcgcgtcttaccctctccgcacgtcatactaatattttgactcaatattcttctggcggcaacacttggtaaataacgtagaactacccaaactctcaaaaatacatctccctgttccctcgctcgacttcgtctgctcagaccggcgctcagtccgacgacgaaaacgaagcagatgatggcaaagtcgctcctcaactctcgaaaccggcttcgaaatccaaaggaaagagtactagctcggacgagacagacacgaaacgatgggagttattggagaagattcgaggacttatgctcgacggaacgtgagtcctcctctttcttccgtctgctcattctttcctctatctctgcataattaattctccttggttcaaaaactaaatcgcggcccattcactcgttgctcactgtcaatcctttttttcctccaaagcctcccagccgagccagaagatgctgtgcttcattcagaccagaccccatctggctcttccaaaaggaaaagaactggactcgaatcgctcgatggatccaaaaagacaaagagctcggtggaggagaaagagccggaagggatcgaaggcgacgacttctttggcggagacgaatagtaaagacatcaacgagatacaaaaacaaaaagagaaaagcaggaacatcttgtcggagctttcagttaatgtggattcgatatgcatttttttgtctgttcttctagagagtctatcttcttcgcttgatgacactctgtagtaatcattatccgaaaaagaaaaagaaaatccaaaatcacatccctctaaagtatcctccttacaccctcttccgttggcggtgacgacggggcacggagagacccaaggcctactctcttgatgtagtgaatccttcgaattccgagcgccgtcagtgtcacacaacctaaagcgatccaaccagtgatcatgtagaactgaacaaatgtaaaggaaatagaacaaccgattagtgcttgatcagtacggacacattgaatcaccgaaaacagaggaaggctaagggcacagaccatggtagggtgttcttcaaatccagacatcaactattgaaagatttataatttagcagcgcttcgctcctcaaggtaagagaaaaagctaaaacgaacgttcatgccaaacaatccggcgataagtgttccaaatccagtgacaaccgttatgtaattcagctgttatcggatgagcatgattgaacgcagcaagtcgatagaaagtcaggtggaacaatcaacgatacatcccttatgctctgatgttcgtccaataaggaaattcggatttacctgaagatccagtgtaatcaggccattgcgagtggcgcccatcatcagatccaccacctcctttgtagaatggacgttcgactgtttgaacacgaaagaggaaccagagatgtcaaaaaaccgactcgtaacagagaagtgatagaaacgcattcgcaggcgatgtgtaattctcacgttggacgtctgaatttcgctcgtgatttcttctattcgctgactaaaactctcaaaaagtagttcggcttcttcttgcctcgatctcatcaatgcctctgctgtacttggtttcgatggagagaatgctaccgtttgacaggtactatcttgatccgggatggaggagctagaggcgggcgctggagcagtagctggagggggaggtttggtcaggttcatgagaaccatcaaatcgtctattgtttgacccgataacgcatcagccgaagtgagaagtgctgagaaacataagccatcctagaatttgttgcagaaggacaagaaaggtacatagtgtaacaggaaagaaaacaacagacgaaccatccgcaaggcatctctcaacggcgtcattcaccaacttcgctcgttcgcccagcccgccaagatctctagcaacactcgatagctggttgagactgcttctggtgatatttccttggagattggcaatcaagccaatgatttctgagcgtagtaacgccatctctgcttcgagagtacctgcggttgaactgagaaactatcgaagagttgatattcacgagaaaaaggtcaagccagatcgacagggaagagcaacaatatcaggagagcaggaaagacttacagactcaagaacggcgtaagagaaaggttctccaggcgcgcggtcacgtagatgccgcttttacggtcacatcaagatatatggttgtaagcttggaaacaaacaacttgggcagaggaggaaagagtcgaacctcaagatgcgctctgaacgctgagtgcagctgactacctggaccctctgcgctatcaaacaagataacctcatcggcgagaataagggctctgatgtaaagcaaattgagctgcggagggaaaggaagatagagagaggtgccaatcattggtagctgccaagcagaaaaatagcgaaagaagtggacatacaacgatacagtgacctcttcttggaaggatagtggccaccaggttctgccgtccatgatatatgcctgcggaaagcgtgttgctacccaggtagaaatggagattttaacagatccgatcgagatcagaacgcgtacaaagatatgtattcgacaactatggagcttactttgagtctagaggtcgaacatctctagcctagagagacgaggtaaaagaaacatacatggtcaacacgaagttttgtatgaacaacaccagttgaagcggctgaaggagacacttgcgtggagttgaaagcgtgaacagagctcggccttcgtgaagtttagatgggggtgcgtgatgtcgcctgtagacagaagaattctggtgagctttaaaagctagatgacaacaaagacacagagctatcagacagtctggcttcgaacctttctcgttgaacacagtaactaagaataaaaatgatcgaacgggtcgtgtgggctggtgagaacgacccagtcgaaggaggacatcaaaagagctcaaagaaaggggtccaccaacagcttaaccggactagatctcctctttttgcctctgccttcttgacctcatctatgatcatactacgtctgaccttggtagcctcgtccaactctccgaacgcggtagtcagagtcggagcgacggctggccttgagggcatgacggtcgagagtgcacggccgggctgccatcgaacggaattgtatctagatctgaagggtgccaaagatacccgactaagcggagggaccaaccggaaagacattcgattggggtgcaagctatctgtagtaggtacggtggatgaggacgaccaaaagggaggcaggcgaataaggaaccaaaacaggaacattaaacagggcttgattatctggccctgatacatgacgtcagcatttcactacgttcgcagctgcgcctatatacgatgcacgtgccttcggggtcgagctcttctgaagatctctcctatctaatacccaaatattctatataattgatcttttcaatcttgatctgtgcttgttctctttctcatctttctctctgtgccagcatcaggatatcttgtcaaagatatttttattcttccctctcgtcgcgttgatagcagtcagaatgaaatcttcatccaccatcctgctttacaatcctgaaccttcggctccgtcttctatcgcactgtttgattcgatcgttgaatatctcggaactcatccggcccaaccaaatcttgtgttcctgcccgtgttgcgctcagagaattggaaagacaaactacctacattggcccctcccggtagcgtccttctctccagcggacgtatcgatgattggacgctactcgagtatgttgtttccttgttcttctatctctccttcacgttctgatgtgcctgatggttccttccatattgttcctccttagagcatgcgcagagcacaacgttcattatctcgggccaactcgagacgcccgatacctgaaatctcttttgtatcatctaagttacattgcctctaagacgaacactgtgatcatcccttccgctgacgctctatccacagccgtgtgcgttccgcatatcatattctgcttaccttgatgtataaatcaacttctcactgatatcaacgatcttcaaccgatatagtgaccttacaacacaagcgctgcgtccatcgcaggctacacgctctatcgaaactaccatcgagactgttccatcgccccttttggacctcgcttgggaaagttatgtggcccgagacggctggcacaaggatagcggagtctttctcaaagacggttcaacttttcaagttctttgggatctagaagacagagctctagatagtaactctcgtaagagatctctctttccttccttctcatatggcagctagttcgttcatcacaagctcatccatcaatcgttcgatgccgaggcaatcagtcaccgctccgtggaactcgatcacgaatcatctttcccaaagacacgccggattggcatatgactacaaagaaacttgggacgtcaagactccgttcacggagttctttagcttcggggtttctttgattgtttccatactctctatgttcatcacaccgtcagtcatcatggtcttcttcggaaaaaacgaccgactttgctcctgacatatcatcatacgtgcattcaaaagatccatcaatgcgtacagtcctctgtctagtcctcttcgtttgaagatagagtccatctctatggactctttttcggatagtctcttgctcaacatcccgttccagtcctatggcaatcaagattgtagtgagtgacaagcctagttactgttctgtcttgtcgataacttgtttttgatcgaccaaggtacaatagtgcaaccctgactacgcaaattcctctttgctgttctattttgattttcagtctgcctggtggagaccgccatcgttctgcttgaaagtggtggaacagatacaggcggggttctgactccttcagcgggactaggacctcgaggcggatctttgttaagacagcgtctagaagaacggggtggttgggtctggaagtgagaaggatggtatcatctccttgacttctttcagtcaattctagccttttctcttgcaacacatagctcaattcaatccttaggatgttgtcactccctcttcacccaacaacaatcttgattgtggttcctttcgtttgtgttttatacatggtttctcttgtcaatgactgagggtgtgtttgagtttgtaagtgggagtgacatctggatgtgtttattggatcgcacatccaaacccttatcttatcttgatctcaaatgatcgctggttgccatggatactcgatcatgtcgagcctccacctttgcctgcaatccctttgccacagaccaaccagatagttctcaaattccattatcaatccctctttctccccttcttcggattcttcccctttatcgtcatcagaagcaaacatcggatggatttatcagcctgtatcgaggctcagaaagaagaacttgaagcactggcagcgatctatggcgatgatgtattctcttacacgttcgaacatcaggaaggatccgatggagcggccggtcgatttcttgtaacagtctctatggccgtcgaattgagccctgatggaacaacaggtatacctgtcaacatatcactcgaaccatcctcgtcgaacaaactatcggatcggagcgatcgatcgggtccacagagtctagggttaaagctagcgcatctgcctcccgttcaattatcaatctcccttccttcgctctatccccaagatcaaaattctatcccgatcatcctggagatcaacacgtcaccaagctatctcactaaaaatcaggtgaccgttgtgattccagagctgatgaaagatgtcttcgggagatctgatggcggggcttgcttatatgaattcctggagatcatcaggaccggagggggttcgatcggttcgtccagctcgggtaagggtctgggtggttccatggaagaaaccggtgctgcagtatggtgttctgcaagcgatggacatggggaaggcgtccttgatctagcaagaaagttgcaggaatgggaatcgactgtcctgggtaaggactttgacggaacgacatttccctgtgggatttgtctggaaggcaagaagggacgagtctgcgttgaaattgaaggctgcaaacacgtcttgtgagttgtttcatcgttatgttcctcctctcgatcaatttcattggacttgcagcgcgcgcagattgaccgttttctcaatgtggggatggacatttcttttttcgaatgagaagctgccgattgtgtttggaacgatgttggaaactcgctatcagtttgtcttccttataattgtactctgtgagagcgtccaagttgacttctttacgtgttgtgtcattctagccgaaggagacatcatgtctgtggcatgcccttcattccagtgcatcaaacttcgcacatcgtcctcgttcacctcctcttacgtctccccttcatctgcattccttgcgcttgtcgaacagatcgttggggcagatctgctcgctagattcaatcggcttgctgataagaaacggatagatagtgatccaacttatactgtctgtccgttaccttcctgtcaggcgcctgtaccagcaccagagataaccaagaaaccaggcgaagcaaaaaatgaagatcggtgggagaagtacaggcagtgtccgaaatgcgggtttccgttctgtttgttctgtaaactgacttggtgagtcaagcttttcttccttgttgcaatctcttcttcttttcttccttttctcttctgttgatgccatgggagtgataacaacgacgtttccttttgactggatactgatcaggcacggaccacatacaccctgtccacttcctacgctaccaggttagctgatattttcttgaggtttcttttttgtgtcatcaattgcacgaccaagctaactttgcatgcaacttgaccgtcgctcactgcagcgtttatccaaacatacctctctcttgatccgacagaccctggacggagacttctcgaagctcgttacggcaagaaaaacatggagcgtatggctgcccaagcggtagaggatgaggaaaacagaaaatggttggagggcaagacaatggaatgtccaggatgtggagttcggacggaaaagtcccatggatgtaatcatgtgagttagatctttctgttcccctattcatttccagaagggcacatggccatggcgtttttgctgacgaaagagatacgtgtgcttgataactgattgtggggggttgcattgtttgtgtagatgtcttgcgttcgctgtcaagctcgttcgttctttcagattcttctcaaaactcttcttctttctctgatgttgcccttctcaaatcttatgtcccttctcttcttctctatctatctctagacttctgcttcagatgcggtaaatcggtaaatccagagttttatcacttttgttcatggtggtgatgaggagaataggagctttcaaactcagtcataggtacccttttctcttttctcatcccttcccattttctcggggtatgacgggttccgaccttgtgtcttctctacgatctatccatccatcgtttcattgtctgattgggatatggggtctggcgtgggtatagttatcggttttacacccttataaacattacaacaacgtacgtctttactttcttatgtttctcttgtttacgcatcgatcttaaccttggtattctcctggcctcatttccttccttgattatttccgaatcacctcctgggcgaatgtcttcttgtctaaacaaatgaaatagcctgaatcaccctgtttcgaaaaactgtttgatcaaaatgagatcgacgctttcaaccgagaagcagctggtggttgggtcgacgatggtggtcttgccggatttggccatcttttttgatccgccttttgtctgatgctcgccgatctcgtccttgttacctaatcaaagaatagaggtgaaaagagacgttcggttctatatatgtaacaaagcacaagataaaatgcgcatatatgtttttttttccaactctggtcttccagaacacagttaaagctacgaagaaagaggaacagaacagagaaatcacacatctaggtctctccaaccttcttgattcctttcaagttgacgccttcgtttcttctccagaagtcgacgagcacctcggccaatctctctggatcgtcttgttggatatggtggcccacgttggggaggacgacatgttgaaatttccctagagtatccccagtcaacagaaggtatctcagtatcagggtctgctacaagaacaagggagacacatccatcgaagaagagcaggacaaaccttgcatctgaccgatcatcaactctttgtcaatcctgtcgctcccggccaagacgagtaacctagcggacctgactgccaaaaacttggcagaaaggcctttgtaccaatcatgccaatagggcgcagaatccaacaaggacgttctccatatgaccctctgttcggactttgtcggttgaactatagacgggacggacagacgtgcggacgtcggagatcgataggtgtttgatcccaggctgaagtggaggagagtaggaatgaaagccatgatccggagaagaatgttcatttccagatggagactagtgagaaggtattacaacaagaggcaagcaaagaggagacataggtgtataacaagaactgactgccaatcgatagcttcgtctacgcttgcgaatgaacttggcctagacaagatgatagcgggcataagcggcagcgcttcgagtgccgagcctacaccgtttttaagaacatcaattgtcagactcttcactcgctctgagatgcgatcagatgaaaccatacaccataggacggaccttcgacgacatctagaacgcccacaccggcgactttatatcctattgtttgtaaggtcggtgtgactcccaacacgggagcagcacccattgagtgtcctataagctattgtcatccgaatcatccccattcgaataatggggatgtacgaaagtggaaggaagaaggagaaagacagagaaatagatctcaggagatgatatgcggatgaagcagagagatggatgaagacgaaccacaagcgcgggtgtcttcttggggttaggaaacattgtccggatgaatactaaaaagtcagcggtaagagtgtttaatgagagatccaacactgcttgatccttatctgggtttgctgtagaacctgttgagcgatggacagatatcaggtgagcaagagaacgacgttgtctcgaaggtagtcatgataggagaagctagatgggtgaacgaaccgtgacctctacagtcaaacgctaatagacctagttcacctcgagtgagtctggtgatctctttcgccagaaccgcaaagccaagggcaccttctccacctccatggtgaaagatcataatggatcctggtccttcatcggacgcaggttcaggaggggtgtaatacgttttgaaggatggtgcactccatgccgaggagacgtcagaggaaggaggagggtcgaccgagaacgattgagcgaagtatgaagggacggctgaaggaaactcggacggcggtcggttcggtggtcgtcggtgagatcggtttgatctggcccgtgtgctatgaaggtgcgccggctcgagaatgagcgaaaaggagttttgatcacctggaggatgcaagaagtattgagatgctctcaccccaattctggtagatcatcatctatctctgtgaggtcttcttgagggtgtccatcattctgaacagactgagagttcggatgcaaaggaggaagatgtggcaatttcgccaaatttgttctcataaagtcccgttgaaattcagacatagtgaatggaggatgtgtgtgtgttatgaaaaaagttgaggaagaagagagagaagaacgagatgaagtcatctcccgcgggtttactcaaattccgtcggctctgtccgtttcgatcgttcatcaccatcatcgatcaagacgaacaggtagccttctctacaatttggattgatgggcatcagttcgatggaatatccttattggtatagttatgcgctcagagtgttccatctgtttccgctacatgttccagccacgttactcttcgccgctcctcatggaaaacattcgttccaaagttcattcaacattccaggtgagagatcaggggtgccttcttgttgttgtcgtcatagaaacataacacaacacatcgactgactccgtatgcatatgcgcgttcatgtattcactgtcacctaacaataatttcataggcaagataggttggctgacaatggagcttgtctcgccagtggctttgttgatggcgttggaaccaaaaatgggttggagttcaaaggtcgatccgatcagagtgctgactggattatatatggctcattacctgaaccggtcaatcgtgagcgtactaagaagccgacagatggctccgatgcatctgattgtctggctgtctgctgttgtgttcaattcgatgtgagtcggtcaacctctcttcataggtgtacgtgagtttccatgtggactgacgtttcggttgaatacagcaacggtagtctgatcgggacgtttcttagggttcagtctcaatcgtgcatgagtacgagccgatggttttggctaggtgtttcgatctgggctcttggctgggtttccaatattgctcacgacgagattctgatgaatctccgaagggattcttctggtacctcgatggcatcgtcttctcgacactcttatcggacggcagacggcaggctttattccatcccatggggaggcttgttccgttgggtgtctttcccgagttatctgagcgagctgatcgaatggacaggattcggtttggcatgtgcatctgtcggctgtcagacggatctttccgagatatttctgaatttgtttcagtcggaagagactttccaagtgtctggctgggatgttcctctgttgaaccctgctagtctgtttgtgatgaacgaggtgggtgtctacgaattcatctgagcttctttctatctcatgagccacagagctgactttgtggttaccaccttttttctttctctctgtgtgtgtctctctctctctacacacacacacacacacacannnnnnnnnncacacacacacacacacacacacacacacacataagttctttctatttggagcccgggcttgggaaggtcatcggtggtacaaacgaacgtttgggaaaaactatcctgtagagagaaaagcactgtttccgttcttgctctagagtgtgtgtgaaagcgcaggcagggtagttcgtggggaattggggggcttaaataccaatgaatcaactatcattcatatatcaacaacccaagccttatcatccccggaacataacaatcatctacaaatcacctaccttcccgctaattacccacgcacagaattagacaccggccagtcagcgactgcgccggcaaagtatctgctgcgccggcaaaagggctccgaaccttaatgttctccttgctctataaaaagagcttggtggactgtagtgtgtaacgaaattgagtggtatactttaatagaacgttatctaatgatttcgtaatgttttctaatccgattgtcctaatgagactggcaaatacaaaacttgtaatttgtctattctaatttcctaatagactcatcagaatttcctaatacatcaattcaatcgctttgtacgcacactccctttgtcaatcctccgcccggccgtgtttcatcgtgctcaccatcctgacgaacgaacgaacggaaaccatccgtcttttgtcttctttcgtcaatcttgttctggtcgagtgaacgtctggaagatgtctatcagttgagagcttacgtcttccttctctttgcttttcatcttgatatcttgtcccgtcactacgcacacaaagaacacacccacatccgcacccacccacccacacacactcgcacgcaccg

SEQ ID NO: 1212 - DNA, 57900 bp, Xanthophyllomyces dendrorhous
tcgcacgcaccgctagcattcttccctgctcttctcctgtttccattcgtatcgaaaacactaaaccacatctgctcagccggggctctctcctcacctgtagtccacttctgtcgtcatccatctggtccacccataccaaggttcttcctacaaccccatggcatccttcgagacggaacacaccttggagtccatgggcgagtacaccactcagctcggcacgctcacaaactccatcgactttgggattctcgtcctgactatcattggcgccgcaggcgtcatggtctccatgctctacaaagagtacaaggtcggcaaggtgagtgcatcaaccagtcttcttggaattgaacctgatcccattctttttatcgcctcccgtctcgccgtcttgcgatcttttccgaccttttccctcttacattttttttctctcccctcgtcgacctgttcttgcctcaaaagggctccactgtgagaagtcgtctggtgctgtttctcgtgttcggtgatctcttcctagggtacgtgtctctttgctttccttcgcactcgtacatccgttccttcccattccttgtccttgtcagctccatagagacagaacgaaatccttgtgctcttttcttcccggccttcgccgttgtcgcgattcatacctctcttgagaccctccagcttgggtcttcatgccgcatgcacgcatgataggcatgtctataaacatcgaatcgttccctcattgacgcgttctttctatctttctctcgctgtccgaacgtctttcatccagcatcatcgccatcatccctacaatatcgacactagccggaaaccatccaaaacccttcacgccgtattgcaacgccttgggcttcctcatcgcgaccgctctctacgcccgtgagttcctgttttatttttttgatttgttcattatttttatcatcccttgctcttcttccagcgttttggtcttcttctttgaatacaacctcttttcattcttgtttccatctctgtttccttttccatcattgcctctgctggctttcacctcgtcatgaatattgacatcatctcttttcgcgtcgtcttgcagaacatttcaatacgctcaccttatgtatatccacctatctcatcctgatctatccactctccttgtatacccggtggctcgaacggcactggcgctggctcttcccgtttgtctggttcagcagctttctctgtgccggtatcgcctggggcgttattaaatactggggttacaacaacggaatctgtatctatccgtctggcttattgtgagcaagcaaacttctcatcgcgtttccagcacccttttggggcttgtctgttttaccacacgtgtttgtgaagcactgaacgtccaccctcttcacgctagctccgaaatctggcaattcattcccagagccatcgtcttcaccgtcatcacccttgtatgtctatctgtttgccctgatagaaaaccatgtgttgacagttttttctcgtacatcgtagctctacctccgactgtttgttttccttcgccggccggacaagatccgaaccggttcaagctcgaccgataatcaaaccgatcgatcgaccgaacttgaggccgaaccttctcacccttcctcccaatctcattccaaatggagacagttctcttcacgcacaagagcatctcacacagagtcttccgggctgactgcccaattgaatagatggatccgttcgaaatcacttggtcatgacgatcgtaaaccgaaagctcttgactttgctgaacatcctagaagggccagcttaccactctccgtagagaccagtgaaatcgggactggcgaagaaaacaactctcggtcttgtgaatatcccccattcgcgaccagcgaggacaacaagtctcgatcatatggtattccctctacgttcggctctagctttggcggaggacataggcgaaagtctagagcggggctacctccgtgggagaatgtcgatctgccgaggtttcctggtagtatagacccaataacggcagtcgatcctttagacatcgagccttcgtatccgccaccggtgaccgccggttggaaatggggtctttctgccccggattccaacagcgacttcggtggccagggttactcggccgaccagtccgcctgtcttccttcttcctctcccatcgtcgctaccgccaccaacaagacaaacatagcagggacgaagacgtccaacatggtgtctaaaccaaaacccgctgacgaatccagtggagatccctcaaaagaagtcggctgggacaatctcgctgtgagacgatcgagtcacgtctcgttctctgaaggatccagcctggcaacgtacaattttatcaactctcgagatccgccttcggtctccatcatcctccccaactcgaacgctcctccttctatcatcaatctgaccatccttcatccctcgccttcttcttccccctctccttcttcttttgcagctcctgtcgtcatggctgctgcgacgtcgacaaccatctcgtcgttcaagtttcctccctcatcagaaaacgggccgttcgtgtttccccgacaagtcgaccaagtctcttatctgtttgatccgtctagacgaccttcaatacccgattctgttgctgaacatccgtctgatttatcagaccccacatcgtctctacccccaccatcaccatcaccgccactaccgccatctccaactatcgtcaccgctaccaccgccgacgactcgtccatgatcgaccgaaacagatcgacgagcagaagccgaacgatcacttcatctgaccgaacaggaacagaaagccttcaagtctcacctggaggatccttcccgttgagcgaatcttcaacttcgagcacgtcaatgtcgaacgcgatgacactgatagatccgttggatagtcgtcggtcgtctgccgtcacccagcctaccgatcagtcatacggaatgaatttttacaaaaagaaatccaaagagcgtgatcaagaccatccgttattatcattgacggtcgaccgaagagagctggacgaggaagcagatctgatgtcgtggcaggcggggagaagaggaaatgcacagaccgaggaagagaacgatgattacgacgacttggatgagggagatttgacgttaaagagagtgttggagttaaccgatcccgctattgacggtctcatcacgcccggcggcggtggtggtggcaggggtgaactcaacggcggtcgtaggactacagactcaggggccgggatcagttcaggaagtgacaaccaagaaagcatggcccggttcatgaatcgaaaggcgtccctcctcatgttgaccttcccgctggcctacgtcgtcttgttttccgtatccatcatcaggatcgtatgggatttcggaccgaatacaccttcgccagtattcaccgcaatctcgagatggatgatcttcatgcagggtctgttggacgcggtgatctacggactcgtcgagaccttggtcaagcgacaggtcaaaaagaagaccaggcgtgtattgggtacagggcttggcacgggaggttcttacacggatcctagagcgagtgtagccaacaccagaaccgacactgcttctcgtatatgaccccttcttcttatcgaaacagagagggaaagttagttaagcggaggggtttcgcttcttcttttgccttgcctcctaccctttcttctactttcctacatatccttctccaacccagtaaagacttgaaccactacatgctttatttctgcttatatcatagaccttcttcgttttttttttcttccttccttccttccttctttttttcttgctcatctttcttcaagactttcagctttgattttcctttttttccaaaacgttcctttcgttctctttttctttccaaagtttttcctcgaccacaacttgtatctgtagtaatcgatgcctcccatcacatcccctctatattgaacccactacggcatactctacaactcgatatgaccacacgtacctatcactcatatcctaaacacgcagtccagatttcccactttgtacgtcgggttcgtactcctcaatccttttcttttcatccatcgatcattagatcggaatataccagatcgaggatgccggcttccttcctttcttccgttcaatatatcatcattttctcttgtgattcgaaaaaactttgccgatcacccaagaagcaatcgaaggtacctttctgagcgaaagaacgatcatattatataaaccacaatccggacgagtcgaacaagaagccccaagccggacctgcgtgtgtgtgtatgtgcgctctcacttcacctttgatttcctcctctgattgggtggccctggattccctacccaaccaaacaaagctggttcagtcagctagatgacagcgaagaaggaccgagcgtacgccaaatcaggaggagaaaaaaagatcaagaacacagctaggaacaagcaagacgaaaggaggtagggaacttcataggcctttttgggacaaccgcacatgacggctcttcatccctccgctcatgccctggtagtaaggagagaacaggggagggtgtattccagtgatactacgagaaaccgatccagtctttctacacatacgtttcgaagacgtaatcatgtagagagatcggaaaggattcaagtcttctggtttctctagacacttgatagagtcagagaaaccaaaaggaaagagatccaactccgggaaaggggttttaatcataatttcctctgtctcgaaacaatttcctgctttcctacttgtattcctttaaagttcgagatgtagatactacacaagtcattctgaagctgttactcacatccggtttggtggtcttcacgagcccggggtgcatcgatgtgaacgtcttggtagcagtttgccgagtaagtttgatctggatcgacacggaggcaacacacaagaaaaagagttctcagttcacggttctgaacttctaggaccaaatctcatcgtctgttaaatggatacaatctttggatcttctctctatccgtccaaagagacggaagaaaagagagaaagtatatgtatacttcctttttcatgcgggcctttcgataaactccatctctcccacttatactaaaacaggggagaggtccagaatatttttttttgaccaacccactcctttctcagtcaagagacaaaagaagggaagccaaatctcctcggtctggttgtaatcatgtcgttttacttgtcgatggagcgggtgttgaatcaaaatgtgacttaccgagtcttgcccatagccttttcaacttctgtaagcattgcgaattcctagcttgtcgattctgagctcgacttgatagaaaatcttgaggcggaaacaataaaatctgatgatagcggaaatccattagtagagcatggtgagtcggaaaatctggcgatatgcgatatctttgctgcctggagtctttttattgtgcaacaagactggtctatatcgatacaagagcattgatctggggttattctgaaagaagggaagaaggatatgagatacggatagatcagtatagacggttctgaggatcattgtagttttaggctatctgaaatggacaggaagtccgctcttcgcatcgataaccgagtcggaaaggaagcttaggagtggccagaaaaagaagaatgaaagagatgacactgaccaaaataaatcatcgtaaggctcaaaccaaatatcctacccgcacacatttctcgtgttccttcttcctctgcctacttcccacttcaacctttcctttttccttttgggcattagttctgaaacttatgcgagaggagagataagtcgaatgaaagacggctgggggttcgactgcctcattccgatgacgatgatgagactgatggtcaaacaaatgaggatagcggataagtaaaggaacaagtagtctttgcgagtatgatctggcataaaacttgatcgaacgacacaagaaaaaacgagaaactcacggaacccagccgtacatcatgacggtctgtttagaaaatagccaacaaaacgaaaagggagaaaaggaagtataagaacccaactggacgaagaggaaaaaaaggcaaaagtcgatgatcaacgtacgcggccgatgtcgacagccttgttgattcgctcctaaaaatttgaacggaaacacccattagcgatagaaaacaaacatgacaagagaatgaactgaccttgttctcctcggaaagcatagttgtgtcggttagagtgtcgggttgaaggtgaagcttgttgaaggtgagagatcgttggtctttcgagcgggggaagaactcgatgtgagagttgacggtgtaactattgttacgatcattactctggctacacttcgccgtgcttagtcagcagtcggtgcgttcatgacctcacagtttacaccctagatgatacaccaaacttatgtacagacaacggtaggatggaggatgggtctatctctgcgctctgttttcaggacaagatagcgggctagtccgtttgatatatgatgagtcggcacgaacaacctttgttggacaccgtcgaatgatgtttcttcggtccacagcctctatcacaccaagtctcgtctagaactccttcagcatctttgcaacaagtacgagcactggttgatgtcttctgcttcttgacctatctgtcggcgctcaaattgcgaatgacctaattcctctgacaacaaacagaaagttttgatggacttgatattcgcatctgagtggtaatgtttgaagtggacaattgaatgcatcacagtttgcctacgctaagcaaagttcccaacgtcgctttctccacttcgcttgaccgtttcttctatctccccgggataatcaactccgattcaaccagatcatggtatttgtcagtgatctcttctaagacaatagcagacaaacagaggcatgtgagcttagccgcctctttacgtcatctgatgctgatgcatcgttctcatgaatctgtgggaaactcgcatgagtgagtgtgatgagtatgatgagtatgatgagtatgatgaatatgatgagtatgatgaatatgatgaatataataacccgacgtggtctctcagaatccatggcttccttgtacaaccctcccatctccatttctgaaccagtgaagaacaaaccctgaaatatcatggtcgctaagatcgctgtcatcatctactccacgtaaggcgctagcctgccctttacttcagatagaagagtcactaacagaaaaaggttccttgttctcgtcctcgtcatctcaacttcgtcctagttggggacacattaacactgttcgtcttcaatcttttcttaggcgctcacttcagagagcatggtgtttattttcccacatccagcttggtgtcagaactcacttctgatcgtcattcattgaatcaaagctctctgagtcggtcgtcgccgggctcaaagaatctggggcagaggttacgcttttccagatccaggagactttgtccgaagagattcgggccaagatgcacgccgcgcccaagctggacattcctgtgatcactcctaaggacctcccacaggtgaaccatttatcgtgtctgtgcctttttatcttggttctcgaattgttgacagtcgctggtgatgagaatctactctagtttgatggtttccttttcggattcggcactcggtatgattctacttcagccactctcgttgacatcatagcgaaactctcttccagcttaacacgtctcactatactatacactcttgatgcagatacggccgagctccagcctcggtatctgccttctttgacgcgaccggtaagtggagaaaactgagtgtccgagtagacaacatccagactaagccctttcttcctttttgacatcctatagggggactttgggcctctggagctcttgttggcgttagttctatcaagttctttctaacttgttcctcgcgctccatcattcgcttgagcaagatctgaataaggtttcattgatgaggttgtcgtagaagtttgccggagtcttctttggagctggtagtaaccacggaggacatgagactaccgctttggtatgtagactcagaagtatcggctttggagaaagtacctcgagagaactgagccatcacttgcattttttctgcaatttaccgcgcagactactgtcccattctttgctcatcaaggaatgatttatgtcccaatcgggttcgtccgtccggagcttagcatcgtcgagaaggtcgttggtggaagcgcctacggagcatcctagtcagtcctcgttgtctgcatccctctcctgactttttatcattcggcgtctcatgaatcgttctctccctctcttccatcttacagtattgcaggttcaaagggacaacttcctgtgactgaggaagacaaggccgtcggtcgttatcagggacaatcgttcggaaccttggtcaacaccttcgtaaagggacgaaatctctagactgatctcttcgagaaggatatcgctgtccccttatgccattagctaaatttatatttccgtatgataacgtcagatgtctatgcatcaacctctgagtgtgtgtactgcttgctttccgcgaattgacgtacgctcagtcatcgtcgcaatctctttctctttctgagcccatctctgtttaatctcttttgcgctgatggttcgatatgtcaactcatatcaaatggtcggcgatgccgagaggaagggtagagttcgttgagctcaaccaacacatcaagggcgagcgatactagcaattgtaaggcgggctcgacggtggatttaataatcgtatgcccaatcgctttaagagataaattatagatgccataagcagcgtcttgaacgtcccatcgcatgaaccacacccccacacccacatttatctaggtcatgtactgacatactcaatgcagtgttccaaaaggatcttgcgctacagttgttttatttcaagaaaacgatcaaagagataggtagaagagggactgatctggcagattgtcaacttgccggttaataacggcccggtctagatctcacctgctgaccaacagagtcaataaatatcaggtagaaaaagaacgatctctttcttctttccgacgttcatcgactgcaactcactctatacttgtactgatacgtctaaaccatgagattaactttgccaacaaagatcatatccagaccggcttcttccacattcaggggtccaactagcttggtggcaggtgcccatcagatcacctctcttattcatcaggccaacagccagtctccttgtccatgccatgtctgttcgatgagcaggcaggctcttcctggcgctcaacagtctcttctatctggaatcaggcgaatgggtgatcaggtcggcagtagggccgacaaggagtatgcattcgaggtgcgttgaatcttcgcttgtccggtggccgtcaattctgtcgtgaaaactcaacttgatcttgttttcgcgctcaaccaggtcgctgctagcaacatccgatatggagacggagttaccgctgaagtcgttcgtccaagcgaattgctctctctgtgtctaacgtgttgaattgaaatcgatatcctctttttctttttttcgtagggaatggactttgctaacttaaaagctaagaaagtcagcgtattcacagaccagaagatcgtcaagcttgatatcatgaagaccgtgagtgaatcttttgtcgatcgattgcgacccaaattcttttttgagtctgacctcttgtgcgctcattgaccgcatcaacaggttcttcaatcgttagaagcaagcggcgttgcctatgatgtatacgaccgatgtaaggtcgagccaactgatgagtcgtcagtcgtttctccatctctctcgtcagatgtctgaagctatcagcgattctctgacatgcaatggttgtattgttttccagatggaaagatgcgatctcctggtctagacagagggacagcacacatttcttggcgtgcgtatttcttcttcctgaataccactagttgtaatcttataaaccatcgttatctcataatctgtatctacagcgtaggaggagggtcagtgatcgataccaccaaagcagccaatctgtatgagtatctctagcagtctcttcatgtataggttgaagattattaacgtatagtctccgtctgttcgtacgtcagcttcactgtttacaaagaagcagagcttgaagatttcctcaatgcgccagttggtcagtcaatgttcttgaaaaaaatcgtttcactgtacatatcatcattctgatagatgaaaattgtctgttggcatatgcatatctcataggcaaggggcttcccgtcaaagaaactttgagacctttgattgcgagtccgtattgacttttttgggtgcgatttctgataggtagtataagtcccatgacagctaacccgtccgtcttctctgactcgactctcaaattaactcgctctacatgtagtccccaccacagcaggaacaggctctgaaacaacgggctcggccattctcgatatcccaagcaaaaagttcaagaccgggatcgcgtccagagcactcaaacctctacttggtatcgtcgatccgcaaaacactgcaagctgtccgagagatgttcacctcagtagtggtctagatgtcgtgcgttctcgccacgtcctggtttattcacaggtgctgcctcacaagaagcaggagtctgatatcaatgatatgttccctgtctcgtcattggtagctgttccattcaatcgagtcgtacacagctattccgtactacgaacgttcgccccgacctcaaaacccaatcgaacgaccggcttaccaggtaggtctgctcagctcttctctttgcattagaatcttccttgcttacgatcacgattttgacctggatgaaatatggtatggccatagggtcgaaatccgatcagtgacgttttcagcagttgggccctccggacagcagtcgagatgctaccgagggtgtgcaaggatcagggagatatatttgcccgtgaacagatgttactcgcttctacggtgagaccttttgcttatgtcttgactccttcctcgaacatgtgggcttgtatacgtaaattatccgcgaccgactgactaaatgaccgatcgatcggacgattacatctcaatgaatcagtttgccggtatcggttttggtaacgctggtgttcatctctgccatgcggcatcttatcgtttgtatttccctctcagtctttcgactgcctctcctgacaactgaacctgtttcatacgttctttatctcaaaagccatctcctcgcaaaataagaccggtcccaaatatcgtcaagatgggtataaccttgaacaacctctcatcccgcatggaatagctgtctctttgactggcccctccgttttcgaattcaccgcaccttcttccccggagcgacatcgagagatcatccgtgtcttcggaggttcatctgccgaagccgaaagtgcgaatgtagacgatggaagcctgggaaagatggtaggcgaggttttggcaaagtttttggatagcttgggtggagttcccagagggttgaaaggagtgggttacaagaaagaggatcttggagccttggttgacggtatgctggtatgtcgttcctctttaaccttttggtcttgtttgatccgttctcaattaccatcatcctttctctcttgtactgtacgatttgtccgaacgaaagcctcaaaatcgagttatcagtctttcaccgacagagatcaacacgaagaacgatgagggcagaagatttctagaagagatcatccggcgcgcttattcatggtgaatcacccagccggtgcgcgcgagatatattcaagtcttcgacgaatgcctcgtcattgtattgtgatacatgtacatcaaaacatattgatacaagggcacatcatcacattccaagattcatgaaggatatctagtctcaccaatgaggacagaaacaaagagcaaccgaaaagaaagggtatggggcaaggggtataacatcgtgagagttggaagaaaagacgaaacaaaagatcatagtgagataccagcccttctggctctgtaagttcggagaatattcttgaggtagatggcgcctttagattcgcctgctattcgagtatcacctgcctttcgctccggcactgaaggcgaagaatgacgttgatgaaagaatcttgtcagatactgattattaaggtttctcaataaaacagaacaaaaagacgaaacgtacgccactctccgttgcagacgaccaatactctcatcctctcgtgataatctaacccagtgagcaacttgggcgtcaagagaaagaattggccagcgtccttatgacatgtcaccctgaccatctgattgtgtacttctctttcggaacgctggtccattcccttgatgatcaagtttatttcgtgagaatcatacaaccgtacgtgaggaaccgatttcagaaaacctgcatgaaacgaggattcgagacagattttgaaaacaaagaacagcagatctcacttgattgattctgagagtaagaaggttagaagaaaggtatcagaactgattatggtcacaatatttgtccacatatgataggaagagcatgatcgggcacttactcatctaccagggagaagggagcattagagagctctatcaaactcatcagatacatgatcgtagccaaagaccgttcctaaaacgtcaattaatcatcagctggttagacacacaacaatattgaaaagccgaagtcgaggcacgtagatcgtcaagacttactcctccagattgatgggttgacgtcaacagttgtaatttgtcttgggctcggaacgaaacaaggatctcaattgcccattgatcgtagtcgtcgtgctctttgattctgatttccccacgatcatccaaagctatggtttgaccaagatgtaagatgagcgatttgagcgcactcgaagacttttgcaaagcatctaacgcaccatccatggcaacagagaacttggcattgaagtttcggatcagcttttgaagctcaggataccatttgctctgttcggccgtgaagaggttggtgcaagacgattgttagctgtatatgcaaagagaaataacttcgctgaatagaggagcgcacccttgttgagttgacctccctgctgatcctgacctctttccgttcgagtgagtttaattcttcggaaagcttcttgatctatttgaaccacagaatctgttacagtcggcttatattcaggtcagaagtatatgtagaaatgacaaacctctctctgagctctctcatatttatctacaactgtggggtcagttccacccagagtaccaagctctgcttgtatgttgaccagatcagtctccaatgcatctacagtcggaagattttcattattctgcccgactaatgcctacacagaatggtcgatggtgtttgttagaagaagttaccatagtactgcatggagtgaagatcagagctcacatctttttcagtattgaactgatctcttgattcgtcgtccatctgatccagaatatcttcgacctcgtttaagctctgctttgtggcttccttctgagcttgaaattggtcttgaactacaattaggccacccccacaacagatgatttagtgcttccggttcttcatttgagtctcgcaaaagaaaaacataatctcacctctgtcaaacagagacttggccgtgagcagagcttctttgtctccctcagccatcagcgccacatgagaaatgttggcttcgtattgcagaagctccaaattcaattcacagagcttttggtacatttttgatgacttgatagccatggactggataattacatacaagcacatcatcagacgactgccaatgctttgcagaaattctgtagatgagcttacttgatattctagatcaaatttagtcttctctcgaacggctttctgcaattctcgactgagttgcactcggttttgttcctcggacggtgcagttttcaacctatgtacctgaccttcctgacggtctacgtaatcgcatgaaggtagagagatgaaaatccgttaaggttgaattactgagtttctgatggaagggaagcgataactagggccttactgagcttgatctccaaagcagcaagatgacttgcaacctttttggcttcctcaagtcgattcgaaaccagtttctgaaattgatcgaccggtcagtggacaccctttaagcttaatttgtctccgcgttatatgaaagggcacttacgagttcatcccttgctttgactagttcaacattgattgcctcttcctttgttctgagtatctcatacgcctgattaagtttttctaaagcgcttttctcaatagtgatagattcctgaagctgattgatctgactctgatcaactgtatcagccgcacacgttttcgttaattaaaaatccgaagtacatcagaacgtgaaacaaaaggatgaacgatacaatcaacaaaagagtaacacaccagttgagacgaaactcctggcttgccgtatcacattggtcgaatatgacttggttcggttaccataccgagacacagacgtctggtatgacgtatcttttgcgcaaaagttttggagttcagaacaccggttgacagcactccaatcgagtccattaggaccgctgataggtcgaagagtaatagcctgacaattttatcagacatcagaacgccaactgtcagctgctgctcttcccgtctgacgatagtatcaagacgtaaacgaaacgtgtatgcgcaccgttcgatgcattccaacattggattccaaatactgcttgacaggatcagcagcttgaacgaagtcaattgcgtagccttcgaaaccaagttcaagtaattgttccctagatgtaggtccctccatgggtcgataatcgggctcaacttgtgtcacatgtacatttgcgaccttcctcttgaaagggttttcgtctgatgatccgaaagaaagaattttgtcgaagtcttctttgcactgacaaatgatcgtctatgaggaggtagtgatatgagagccatatgacgtgagagacctgagaccaatcagtggacaaaaaaggatgctgaagaacaaatggtgttggaataacgtaccctcagctgagtagcgttgaaactagcttcaattaggcttgaatacctcttatccggaacgtcaacacttagacaaggcggctcaaaaactttcatcttgaaaaatgatgcatgtccctgagcgactctggcttcgttatgtcgaaggaattgaacgacttggtagatgtcttctgagcttggccaatgtttcagattgttgagccgctgagattcgacgtttcgtagattgatgattctacaagtttaaccccgtcaaattcaaacttcaacttgacatcgctacaaaagccagatgatctggcaatggttgggttctttgatgattaaaaaactaaaaaatggaagacgcacttttcttcggccttgctgatggtcattaatcgcgtgtctcgttctctttccaactgacttcgacccaacccagcctctgttctagatcggtcttctagagttcgatactttgcttgagcgtctctctgagttttaccaaagtggaaatattatcagaacgtcaagtattagattgatgaatccaaacaaatacaccaacgaaccctttgttgctccaggtcgccagtcggtggagccggctcccggttttcccactcatgtttaagctctagtagcttctcttgttcctgtagtagctgggctttctttctctgggcagaaactttgatgttctcgatggagttggtcactgccgttacattctcttcctgtgagatagaaagagcaccccgtacacacgttgatcgcaagagataagacgttttaatgaggatttttttaaagatagtaaggagatagccacatgagtagagaacgaactgcgtcaccaatcttattcgaaactgtcttcatagttttttgaagggtcgtctgactgtcaatcgtttctttgatcttttttaccgattttttcaatcgaataccgaaatccctatttcaattgatgcgcatgagccagacgaacatcagggagaaagctcaacaatagatattaaaacttactccttgagtttgtcgtatggctcaatagcagcttgagcggccttcaaatcggcatgcttgatttttcgctcctcacgaagaaccgtatatttctctttcgcctcgctgtacttggcgaagctcattaaattcgtcttgaagacgatctgatcaattatagagagtttgtgaggcatgttagtcggagatcagcattacatctacttgatacttaattaacaaactgagacaaacctcagcagccagacgttctcgttctcgggcgttctcgacctctgcttcgagtcgctgagcaccttgtgtttttctctgggcttcctcccgcttgatgattaattgctaaagaaattgaggtaaacaaatgaacagtttaaattaagagtgtccgttcacaaaatgcctatttacaatccctattatatctagtgaagccagcgtaaccaagaacgtgcagactgacttcttcgagctccctcgactctttacctaagatgatcaagttctgatgccactgcgtcatttgcgggggaccggccgctttctgagtctgctttagtagctcttgaggtgacatggtggcaaactcggagaccttatcctgcggtaagaaagaactgaagtccgcaagttgtgcgcgcaaaattgttaatcagaaccctcaatctggaaaaatcgagccaaggcgacgaaccacaagttgcccacttgaatgtttagctcagtcatcttctcacgaatggttttcgcagggacgttttcgcctgtaaagtatcgcacgcgggtatggagaaatattttgtcagtccatacttgacctcatcagagacataagatgattggaaagtatcgtaccatcaagagagaactgagatttgttattgtcacgatgtatatcccttctgactacaaggtttggctgcccagcaaagttcttgagttcaatctcggtaaagcctttcttgtgaccatatttaagaaattggttgatttcatctgctctgccaagaacctataatgacagttgcacattgtgaggattaagaaatcatgtcagctgtttgactactttgtcaaaggtaaaaagccgggttgaccttcggtgaccagccgagaccgatagcgatagagcacacaatagtcgattttcctgacccgttaggacccttcaacgcagcgacatgatatcgaatatatcagccatatctctcgaaggtagctgatgaataataaccacagaacgcaccacaatcatattcaaatgaggaccaggaaagaactctgctgaatcgtatgtcagaaaattcatcaaagatacccgtacgacagccccgggtagatatctgtcaccgttctcgtaaagacccactgtcagcattatatgatttcgagtggagagacgttgtatatagggtttaaacccacagggaagagaacgcacccgtcatggtctctcatattgagtctttctctctgttcctcactcagatcagccattgtcccatccccgtcgtcttgctctgcatcctcttcttcctcgtcatcattcccgtttgtaggcatgtctattccctcgttcccctcctccgcgtcgtcttggtatacactatgtttaggatctatcctcgctcgcttcaacgtgcctttttccggatccctcgagttggagctataagtttcggtggttgagaaggattctccattgagggtcttacgcttggatgaaccggacgcgtgagcttgagtatactggcttgatgacgagccgtcgatcggttcagccttgacgtgccgacgtactctggacgttccaccttctgtcaaacgggaggaagtctttattgatgaggacataggagtttagatttctcctctcaattacgtgaatagcagaagaggtggtgttggaaagagatggtgaaggtgtcaatgttgaagaggatcgaaacttatgatgatagatctgacgcgtctaacggaaatgccttatttgtctctggacgtccatcgcgttaacggttcaatctcctgtcatatcatactcttgtagcttctgcccatctctcaaggaagaccatagatcatgtcaaacggcgtcaagtcagctttgaacagtgtgagtctcgaacgcccttgacgaaagaagaagtgttgttactgctttgttatcctattgcttacgtccatcaccaaaaaaaacctcagatcaagccttccatcaagcgacaagtctttcgaccgattgatcctacaaagctattcaaaacacaacctccgctgtacaacaatccaatcgatatcaacccgaatacacattcgtctagatggcaaattcaagagaagcaacgcagggtcgagaaggagcgtcaaagactgaatcgactggatgatatgagggatcgggtaaaacaacttgaagctcaaggttggtcgatgaagaaggattgataaggaaacccacaatagtatggtgaggttctttctttcctctctctgaagaagtaggtgcagctcgttcgttcttcggcatgatcaaaatcgtcttaagcacactcgtgcaatgtgacaaagtcgaatatgactgacattggacatcaaccgacgccacccagatcaatcgcaacatccgtacttcaaaaagcgcaatggtagctctcctctactacagatgacccatacaaaatgcgcgcatacagcaggccaattgctagataggagagcgaattagtctgttgttgaatcagtttaatactttgagctatcagagtattaccacgaaggaaaactctgggttttccaccatgagcacggggtgatctgactgtatccaggtataccagcgatggccaatggttgtagcatgatgtgtcatggtggggacttatatgtacggatcaatcgttccagccctatcgaggacggtatgattgtgtatatgaacaatggttggttaaattgttctctgacatcagaaatcaattggtgtcccaacttctcaagaacaatttcgcagaaactagttatctcttatagtcacatgttttagacttcataatataaacattaacttaatcagacaacgcgccagatgaagaagaggaagacagaaaagacaggcatggaaataagattacaaaaacaaaaagctcgtgtatgaatagataattgagaaggaagtcgtacatataaaaataaagcagaaagtcgttgaagcgaaccgtcaagaaaagggaaaggataagagataaggtaaaaaaaagaataccgaaacggttagaccgaaggtcgagaaccatcctccgagacagagtcgtaaagaacgacaaagtcatcgtcaccatcatcgacatcagaagacttatcactagcttcgtcttgaacaatttcaccaaaggcgctcatctcgctgttggcctctgactgaacatcagatccttcttcatcatccgtcacggttgagatgctcgacacagacttggtggtgactgaagataacgttgagggttgaaacacagactcagaggcctgttcggagggcacatccaggataccctgcagagagggcgctgtaggcatgacgatagatgaggcgctcagagaggaggatccggaggaagaagcgtcgaccacttgaatgtcgacccaaactcgatcaccaaagtatgtagcatcgtcctgtagtctgtagaacccaaggtatcgtccaacatcctctggagccttcatctctaaagaaacttcgaaagtctctccaggctcaactcttccgacgttgacttgattattgacggagaatggtcgagatcccccgacatgagataggaccgtatgagacgggaagggggttgatccggtgttcttgagtttccaaaccttttgaaacatagctcctccaggaagctctgtgccatccagaacggtcatatcttcaacaaaagttgcctggagggaggcgtctttttcatctgacggctcccgagaaaacacgggtcgagagatgatagttgaaggacctacaacagaagggacgaccgaagtgggtagttcgttcatcgaggcagcaggtgaaggggcagcggtgtcaaaaacagaattcggacgggaaacatcagccataggtgtagacctatcctctgcggagggttcagcagaggtgttggccggaatggcactgttggggccgtcttggtcgaagaacgaggtggcatcaatgtgcatgggggtccttagcttcagcataggatgtctaggatgacgagggatcggagctgcctcgcagtcttcgcatagatccacatcagggcatccgggatgtacacatttgtatcgaatcccgtggatgggctgatcgcatccatcgcagatgacgcccggatgatacgtggcggctcgagggatcttggatcgtcggaaatcatcaggagtctcgaatcgaataaaagaatgaccaggatgatgatcctccacggttcttttgatggtgaaaacaatagtacgacatcatatgttaagacaatttagtcgagtggtagagaaaaggaaacagactgacccaaagcaggaagcacatgtatcgaaatcgggacactcttggcacttgaacctttctccgatgatcctgctgctacagaagtcgcaagttgccatatggactcttcggggcggagaaggagcagactgctccgcaggagctggaaccggggctgagctctctagtcgatcagcgagggacggatggacaaaggacttgaacttgtgggatcgagacgagcccccatggagcttggaagaaggaaaacaagtggcacactgaattgaggttggaagaaaacaaaccccaagttacaacgttaacttctgttcataatagacacctccttaaggtaatagagagaacctacgagatcaaagttagagcattcgatacacttgtatcttaatcccaagacttgtttggagcaaccatcacaccagacctagtgagaacgaataaagagttatatctggttgtcagtcagcttgttcacaggacagcaatggaaacagaagagttgacacacgtgtacaggttccccagtctcggagatccagacattcccggcgatggtttgcgagattctattcctattgacagatgctactgcatgcatgaaatctccgggaggggcaggctcgtcctttgtggttaccgcctgttctccgagattggccgcagtctctttaatatagcggtccataaacccgctgagaattgacttgatatcatccttcgtcgacgccagggcctctacaaggtcagacttggtgacgtgatgagatgcggtgggtacctcggcttgatgggcacagctattggcgtgcacatgggttctagccttgagcttgggagggacaggaggaggtggaggaagaggagcggcagctgtggccttgggtggggacaaagacagcttccgaagagtctccaatgtttcgagagaggtctgcagagtggctgaaagtgtttgagagatagcttccttcttgggagaactctgctgatcctcggtgggtgttgcctcggtcgtcggcggggggacaaccgtgtgctgggatgaggaaggagacctcgaggactgcccctggaggatgatgagcgtggtcttgaagtacccgttggccggtaggggggttccgtagagagcgttcgcatggagcgcagtcagccaatctttctcgcaaagcacttttcgggcaatcatgatctggccatggccgtctggtgagaaaatcaatctgtcgagtccgatcgatgtgtctgcctcgatggagaacagccgttgggtctgagatacggaacgagtgggtgcgagtacgtcagcaatcagacagaaattcaggcaaggggtgaatggagatgaaggacagagaactaccaatggcactgtcgccaccaaacctaatgggtcatcaggaacgagctcaccttggagacgatcacgttccatgccggatatgttgtcccggtgacggcgaactttctagtgtgctggccgtaggtgaccttgacggtgaaaggcatgtctgatgagtcgattctttcgacgatgggctagatggccattttgaatggaaagataacagaaggttgtaaatgagctaatctagaacagaggctaatggctcaagaggctgaaacgggaagagccaaacagatgaaccctcgctctcacctggagtatgtttcagttgtgcagacagaggtatacgtatatacaagagcgtatgtttagattcctccacttcaaggttgagagaaggacaagaaagcagaacaggcaacagaatggatgtgctggaggtgagagtcggtggatgaggtgagtgtgacctcgacagaacagaatagcaggtgatgatctctatcgactgcgcacgcaatcccaggcacgcatagatctcgctcatctccgttggattggttcatctcacatcggctcgtgtagatgcaacattcacacatctgactctcacaccatgatgctcgctcgtcttacttcggccatgcttgtttgggcttcgttcacgtatgctacgaagggtgtcaagcagctcggtattcaagacttgacagagatcaatgtcgagtatcaacaacaggtcaaggtgatcatcggcgtcatgtctagatggtgtgtcttcggtcttcttccaggttctcggaatgacattctcatggtgtatacatcctcttctctagtcccgatgcgttccagatggaatctacattcgacaaggtgctcaagacacggtctgttcgagataaggtcgatcttgaacttgtctatatcggaacgtatgttgattttgccgttctggatctcacgtttcatcactgcaggatctgagttccttctcttgaggatcgtttcaccctaacgacccattgcttttcgaacatgtacatcagtccaaacgccacagatcatatcggtgtgagctgcaaacatggggaaactgaatgctcaggaaatatccaacagttgtgcgctcagcagtatgtcgatcagaccgtctggtggcggttcgtgacctgtcagaatgtacgttccccaaacgataaagaagagtcattccgcaatatatttattcctctatcagactcatgttctcacaagttcttttctacatccttcttcttctgccaaaaccaaccgcttgatgatcgatagtattactcgtctaggatcggttcacctgcacttgctaccgagtgtgccaaagtagcaggctttgactgggacacgtcccctgtctcactttgcgcatctgaagggggtgagggcgaacatcttctcagacagagcgtcaagagatcccatcagcttgaaatcgaaaagagcgctacgttgttactcggggatgatcatcgggtgggtcaacggatattttcaatcgaactgaacggaaaaaaggattcccagactgacaagcctttcaatcatttaatgccaaattctttaggtgagatgcatcagggatgggggagtttggaagaattgcgatgagggacacaccgtcggtgaactggttgattccattttagatacctgggagcgggacaatcgatttttttagagcgaaataaataaaccaaatcaaagtttccaacccaactcatgaatggtaacacaaaagttgcccagttccagagagtgtatgctgtgtatatatgtgacgttctctcttcaacagttcttcccgtaccgaaaactagaaataaacatcgagtagtacgcaagaaagaatcgatacagggtggcaacgcaatcgaagaaaacggacggatctctaagtctaactagatgaaaagaacaccagtgggcttctcaacctgaacctgctcctcgaccacctcaacccattcaccagagggatcctgtccaaagaccgagatccacccatccgtctgtccggaagcaacaatgtactgtccatccttgctcagtccgactcctctgaactctcttcccttccttgggaaaagatgcgtggtgaaagagacttctcctgactgctcgttcagattgaacagagccagagcgtcaacgtcccgaccggtaatcatcctggttgaagcaacaatcgtcttgttctgcttggtaggcaccaggagaagctcagcagctagaacagggacgtcgctcgctatgcttccaacaagagtaggaggcaacaccgatgtgttggacttcagaacaggcgccgacgtgtcgctatcgatctcgtaatgaagaagagccggtcgaagctcgttcaacacataaagttgcttggctggaacacggccaaggcgcagaagtacacgggaatacacagttcaacagttagaggttgaaaatattcaggatcatttgttcgagataaatataacttaccatcgctagaaacaaggatatgcctgggtccccctccctcatcgcccgtcaacgactcgtcctccttaagcttgaagcccatcttgccatcgacagtggtgatcttgaatcgccagactttatcagaccctagatcaggcgaccagacctcgaactcgccatcgacgacgacgctgacaacctgatgaggatggggcttttcctgtcggtccaagtctctcagaggagaatctgtaggattgaatggaagcttgaccacggtgtggtcctcctccgggctgaacaaaccggtcggaagcagagggatcaacaaaacggaagatcccaagtagtttgccacagccaaagcagcaccattggcgactatgtcacaatgagcactaaaatataccgacgagatataagttcagattgagttgttctttggtttgataaacagagaagaaaagtagaatactaacgggccctctccttgagtgctagcagtagcttcaacattgaatgtctttccatccgccgaaactctgatcacagcgaccttgccgtcttcctccccaacagtgtagacgagatcatcgaacgtagggtgcctagccacccaagagggcgagttcatcaccttgtgagaatctcctacagtaagctttccatctcgtactccaggagcgctcggtggctgaaagtagacggtatggatcgagtcggtgtaagaaccaaggaggatagtagaagacatgtgtgtagtttcgcgagagcaggtggggtatgagagagaatgtgtagccagaagagagatggcaaacaggaagaccaaaaggttggccaaagtcgatcgggcacacgtcattctaccagatacgatcgattattgtgctgttgcttttttttttcgtcttcgtcttgatattgagaactctgcggaattcctgtcgaactttaatagagaagcgacacgatgaacatcagcaacaacaagctggctcttatagaaatccatgtgtctcaaatttgaccttccaacaccccgttatatttcacgtttgaacccgaccctgaccattctaggttcgacggattaacaaaaacaattagaagcctcggcacgtttttagttcctcgcaacaaaaaacttcctaaaacaacaagaatatcaagattatttcgaatgttcgtcgtggcatcgcgtcatggttacatgcaagaaactgtcaggatattgtcaattctggtcacacccagaagatcgtcaaatcatcccttgttctctgtcttcatgtccattagtcgttcttatgcgcctcgagtctcatgatggaactgtagctgatcggttgtggttaagattgataagatagaatgcaagggcagtgcttgactttggtactgtacaaagctaaacacatccatcgttctagtccgtgtccatccttgacccctcctgctcaccttgttctccctgagcagcttcaccgatcgctctcaagaagctctcaactcctgagccagcacttggaggcaaacccaaggattgcatcattccggcgagcgcgcctgtgcggagggctcggtccaacgatcgtacaccatcctggaactgggaagattcaatgatcgctcggacttcagatgtcgtcggtgggtttgaaattggcaggtcggagggaagatgcgggaacagggaagctcggaattgttcagaggcaagaatgggagtcacgatttgaggagtctacatcatcacgtaagggagcagaattcaattagaatatagtcactgtcaatccaatctagatgatcataggggaattactgacaaggatatcgttcaggctgatatctataacaacaagaagcgattgattggagggtcagccaatttagtcacatccaattcgccatgtacgttgagaaagagaacgaagcttaccaaattctggctctgccagctctgcgatatttcctccgccaatgatgtccctcagacgagcaagctctgcatcgctgtattgagcctgtctgactggattgggtgcctgaggcgtaactgaggcgatggtctgatgagcaggggtagcgggggggagagcagatctattcaacgagtatcatgagtatctgtcgtcaggctaacggagactgtatatttaacgataagagctagaactgacgagggagcagaagtcgtaggaacagatacaggttcgtctgccggaggaacgaattcaggatcttcgatgatagagttactagtatcaatacaatccaatacaagagattgctgtaagtacagacaatctccgtcatcgtccgtcaaggcactgatgggaaagagacgaacatgtgggaagcaaatcgagcataaggagcatcggcagcttggaaccagaactagaagaattccaatcaacattttctcaaagtcagctttcatctatcaaagactgatttgcctgttgaactttgacgcccatctatccaacaacggttcatagcccacccatctttcagggcatctggaaagaaagaacagacagacaagaaaaagacagagaaagagaatacaacacgaacaaagtgcttttccgcactgctttcgaacgtcaaagcgaacacattgtcctgaccggactcaggcacatgagcaaaactggcgtcacccggaaagatgatgagatcgagagcgacattggacgactgtcttggtcgccagtacagatgaagaagatcatcaccgccatcggtgaagctaagtacacccttctcggcgtcggcatcgacgaaattagaacccgcgcttctcctgtgggctcggccagctttaaaagtcaacccaggcatgatgtgttgagtgtatgaggttgtaaaacgagatcggacagaagagtagatgtttgatgaagaccgcgagtgactttctcttacctccagtgtcaccctccacgacttagtaaattagacgtattttcatataaaatcaaataaagtgaaacatcataaatatagcagaggaatagtaagaattataagagcttctgcgcttctttcatcacccttcttaacttttgaactttggtctctgccttcggactcttaccgagaccatctatccacgaaaagaatgtcggctcaacgttgaattcatcctcggccaaggttgatcgaggccgtttgtttgaaggctttattgcgagcgatcgatggaggggatgaggttcgagtggaacggctgagttggtaggtgaatagaaggctggtgttgggttggatcgagggatatgaatcaagtctgtcaacgtcagctcaggctctctctctcgctcaatctcatccctatggcccagtcccatttttgcaacctgctctttgatcttttcttctctcttcctcttcgcccttctcctcttcaccgcttgcccaaactcgccccatgaaatcctaagtccccatcgtcttctccattcctctgccatttgttccttgacaaccctctctgctctcttgataagaatctctttgacaatctctttgccaagccgaagtttgaattcattgagcgcagacgcataaacttcgtcttcctgttcaatctcgtcaagaacgacgagcgagagagcttgggaggcggtcgagcgaaggaatgggtttaatatttcagaaagaagggattttgtcaatacgtcgagtgttttgggggagagttgggtcgacgggcgaggacgggtagcggcagatcgaattaagggagacgaagagagaagaattgatgagttggacggagtgggactggacatggcaggcaccgacatctgagaagacgaaaaagaggtgctattggcagatggcgatgccaatcgatgtgaagttgagctggtgggttgtgagacgttaggagcaaacggggcggacgacaaaaaggttttggagggagggaaagaaggtgtgtcggaaagagaagagggagaggtgactatgggagtatcagctaagatctcggaagtaggtctaggacgggatgcggcaaacgggtttgaaataggaggtatgctggacgaccctgctgctaactttgcgctcgagccgaatgcaaaaggatttccaccagtcgccgctgacagcgtatttgtcgtcgtagtcgttggggcaattgtcgttgatgggaagaacggaggcgtgttcttctgaaacgaagtttgtccttgtgaagatttgagcttacccaaaacctctgtggtttctgcatgggttccaaatgtggacgaagaaggtgtctcgaatgcgctcgtccggtatgtcggaggtgcggtgaaggcgctcgtagtcgtggaccctttgtttccgcctccaaaagtaaaccctgatgttggctgagtaggaaggtttgacgttgacgtggtagattttggttgaaagacaggtgcttgagcagatagtcgagattgggggaaagatgaacgggtgaatggatttgttgtagattgttgggatgaggaagacgaggtagtagatgctgacgaggttgatgagctaccgttaatgatttggatgttggacaggccttgtcgtttgacatccactattgatttggaaagcctctgctggaaagcctgtcggttatcacctatcacaacatctctgttcaactcgatcccaaccagttcgtctgcctgtcctctgtccaccttgagcccaaattcctcacacacaccctccagatcttcaagtccatcacaacccaacaaactggcaagctctccagcgggcacaggtttgaaccctcttcggccagaactacagattgcaagcaaggcggcttttctaatttctccgaaatgactctccatcaggcaaccgacaagatagggggtggagtctttccgaacttgcttgaatagccttgtgaagaagttttgggataatgcagaattcggtttgattcgggtagtggaagggtgagggtcattcgaccgttgggccaagtaggcaagagagagggcgagttgaatggcaggagtatgaaacaaatttgcaggaagtgcttcggtctgacggagaatatcggcgtcgaagatgtgtgttaagagaagatatgaacaaaactcagcctcattgggagaggataaggaaggggcagacgactgagcggacgcgcttgcccgtttgtcgctatagaattgaattaaactcgtcaagactgagtgaagtgtcggttcaaacgtttcagcggatatgtcggtcgattaacgaaagagtaatgggattgagaaaagtctgacctttccgaagctgttccatctcttgttgaacgctaaatccctctgtagatcccaagatgtgaacgacgtggatatggtatctagccatcctttcgtgacactcgatggaaatatcaccctgttcgtgctgaacagtaaaatcctgtcgaatcgatctcgttcgatctcggatgaaggaatgagtctgtcgtagagtagggtcctgagcaaggagggtctcaaataagtagtttaatgtgcgctgttgagggtgtagaaaagcccccggagttcagtcagaaaacgttcttgagtccattgtgcagaagataagacacgactgggctcaaagagaataacaatcttcttactttgagagcggcaggcgttcggacgtccgtagggaggggttgttcattaccagcagccgatcggtgataagctttgacggcacgagaatgatctatcctgttggtcgttcctgccagctatagttgtgaaggaatcgaaagatccaagaaaacaagaaaatcatgagtgagtgcatcgcgcatggaagcaagtcctgataggggttctcttcaagaaataagagcaggacgaacaagctcccatttgtcaacgttcagtttggcttctctctcttcgatttcataaaccgggcacatgttttcgcaagtccccttgaagaccctaacatccgaatgaagagatggtgccgaaggatcttgaatgagacctttggcaatggcgttttgtcgttctttctcccggagtctttggagctacgttcatcacatgaacaaagatcaggcttcgagacttgaggcgatggcgacgaaaggacatttgacaagatgaaccgacctgaggatatcgatttccatctagtttgacaccaaatcgggcttttcgggcagcgttcgcatcttctccgttgtccatcccttcaatatcaccaccttcatcgacgactcgtgtcgacgaactcatcggctgttgttgctgatcgttatcgtcatcatctaccaatgcgcccatgcgggtcaacgcattcccggccgacctctcaccgttgaacgtacgagatttattacctcctcggccggaccctctgatggataacggttgtgaaaaatgagaggtcggtaaatccatcggtgtttgagagaacggacgggatgaaggtagacgagctgcatgaacgccggcactgccgtttcctccagcagcacctcctcctcttgtccatcgaagattacctctagaggaagatgaagaagctgctgacgatgcagagtcagacggagggatatgcatgccgactctgtctacacgtttgtcgttgattgatggatgcttgatggaaaggaggattggaaacaactcgcctgatggtttttccttgtagattactgtaatcttccgtagtacatcttgagagaatctctaattagaagtgcaggcacgtgttttcggctgtgcctatggtatatatgttagatgaatatatgtgtaattacataagccatcaacttttttgaagacctctcagacaaaccgtttctacttactactctcgtttcagccaacagtgtagcttgtcgacgtttgccttcgacactcagataatcatccaggttgacacatatgacatcctacgctcccgcacaggtggtcaaacaccctcaacttccgaccatcggtcgctcgccggaagcaagacattggcgtcggtacaagtcgccaacgtacatcaaagagtatgctccgatcgtacaccttcagtttgctccttcaaaacctcatcgattggcagtgacatcctcggccgaagtcaaagtgtatgctcctaggacgaacaaggttgtcaagaacgtttctaggttcaaggagactgctagaagtggagagatcagagaggacggaaatctgctcgtcgcaggagacgattctggtcttgttcaggtaagtggcctttctgtttcctcctcattcacaacgctgagtgcaagagaacaggagcatagcttcttctttagccttttgaactggataagaactaactcgatgcggatgtttaatctgtcttcccttcttaggtcttcaatttgaactcccgagaaattctcaaacagatcaaacatcatgctcagtaagaacagttgttcaatttactgatgcctgacctgattcacgcaccaacactgattcatgtatacacgctctgcttgttcattcttatagacccgttcatgctaccaggttttctcctcacaatctttcgcagcttttgaccgcgtccgacgacaccaccgccgcgcttcacgacctcacttcttccactcctctcatgactttccatggccataccgactacatccgcacagctgccttccacccgacttctccttccacgatcatcaccggttcatatgacaccactgttaagctttgggacgtacgaacgggcgaagctgaaatgacgctcggccacaccggatacgctgtggagtgtgtgttacctcatccgtcaggaggtatgcttctctctgccggtgggccggtagtcagagcttgggatcttgctgcgggaggtaaagcacttaaggctgttagcaatcaccaaaagacagttacctgtcttgcttgggatggaccgggaaggagagcactcagtggatcgctcgatcaaatggtcaaagtttgggatgttgcgagttggaaggttgttcataccatgcggtactctgcgcctatcctgtgtttggctatttctgtgagtttgatcaagcctctttctgatttcgcctgcgctcttggactaaataactcgttggcttgcctctccaatgtcttttcagcctgatgatacccacattgccgccggtttatctgactcgacattgtcaatccgtcaacgagcgcccccgaaaaatgccccaagctcaagtgcattcccagctgatgacacaccattgaacccgtctacttacacctcgtttctctccgctggagccgatcttggacaactgatccagacagctgagaccggtcgagtgaaggataaggggaagcaaaagtctgcgggagaggttggggagatcagggtgagcgatcagaagaggaacggacggatgagagtgtacgatcgcttcttgaaggagttcaggtacggtgctgccttagatgccgctttgaaacgggtcagtctacctcttcgtgtgttgtttcaagaagtagttgaagagaatacgttgcgtgaccccggaatactgatccttgcctatatttcccgtcacatcttatgtaggacctcccgccgacgacctcgttcactgtcatccgggagctctcggccagagatggtcttcgtatagcgctttccgggagggacgatatctcgctagagcctgtcctcaggttcctccttcggaatatcactgatacccgattcagcgctatcgctgcccaggtgaccatcgtcgtgctcggtgcgtttgtaactttctgctgtttcctctacttttgtttgttttgaattgtcgtcatgtgctaacttttcttgtctcctcatgtttcatagacctgtacgcacccgtgatgggccagtcgcctctgatcgatgacttgtttgttcgactccagaagaaagtagctgaagagctaaaagtccagcgagacgttgttctcggtctgaagggaatggtcgatatgttgatctcaaacgctatggtctctgtcaagactgctggagcggttcgaaaggaggattcggtgactgggactggatcggtagctgtttagacatgtcccttgtgttgtcgttttctttttctttcttttttttttcgataaatgtagatttttatcgtagggcagggatacgggatatatccacttgtcgcatgactgctttcttcgaagatttctcgctcacttggcccaccaactctggtcttgacccactctttgcattgaagccaatgatctacactgtccgttcactcggagtgaacttgaccaggaaggaaagaatgacagacagactgatagataacgaatgtttgtgctcgtgttatgatacgatcatgcgcctgttgaaaaataatataccgggatctgtgttgttgtgattattcttgattctcgacaaaccttgagtttatccttctcgtcttttttatttgtttggcttttcggctctatcccatctggttcctatcaatcgacattattttcagcagctcacctctttggttcttcatctccctggtgtcgacaccttctttctctcttcagtcttcaaaattcttctgttctgggttcgtgcataaacgttcagccctcctttcggagctgcccgagtgcaaagaatcgctctcgtgttctatatcgcctttctctgttcttcctgtttgtttggtttccccacagatgtttcatgaaacagcttcaactccccggcctcgtccaccgaacaatagtcgaaacagaacggcttccggccgtcggtttcatcgaccatccctctcggcctcagcctcgtttccatcctcggcctcttcctcgtttagcacatctatttcgtccagtggtaatcttggttccgaatctggggacctaaccgaccctcggaagctgagatctatcccgtcttcaatcgtacaccaatacagctcgccgcctccgcctccgtacttgtccatctcgggactacctctctcgatagaggaccctgatgaaacctccagagttccaggtgggttggtgggcatatcagtcgacagtgagggatcacagaaggaaagcgagacaacagagcagtgggtcaaagccaggagcagagaggagcttgacagattgcttctcgaagcagataaggttatcagagagcgagaaagaggtctgtctatctgtccgtctcttgttgaagttttgatttctctagaggctgaccggcagttacttttcaatgaacgtgaaaagagctcgagctagctgcttccatcggaaagtccttactggagaacaacattgctctccgtaagcgacacgaatctcttctagcttctctgccagagactatgcctacctcgcatagacggccggtccgaccgtccgccgtgactgcttcctcctgggtgaccgacgactcagacgctcaactggatcaacctgcccctgactctaggccagaacttcatacgccagcccggtctcgtgtccattcattcggtttgtactcccattctttccaagagtctcttgaaccagatgaagagttgttccaatcctatgatcgacctccctcgcgcgctcccgaatttctatcatcatcatcgtccgcgaaaacgaacgtgttggacgcagcgtcacatatggcttctaccactacagagtcttctcctacaagcgcaaccttctctggtacgatcacgaggcatagaaggagacaatccagtctctcggcgtctcctcaagctttggcattcttaagggagcaaaaccacgagctggccgtacagttggaggctttgcaagaagaaacggaggatgctgatcaaactggttcgttccatctcgtgtgtgatctttgtgagacccagtagaatctcgatcttaacgtttggctttctctttctcaggcaagaagaaacttcgaaaactcgaaaaagaaattggatctcttcgggccgcactagaaggaacagaagctatcgtcgataccttgcgcgagaagaatcagactctcgaacaagaggttggaaagcgaagttctagaggagacaacttcgcaaactcttctcgagacggcggttgggccgaacgaagacgagctcgactcgaacaagagatcgaggagaataatgtgaactccgaccgaaacagcagcgcgctggagagtagaaagttatccacgaacgaaccatcctctgcttcaagttcaccatcatcagaccgagcatcaggtttcaaaccgaagaacgcgccggctgaggatggttcgcccatcgaaacgtcctctctttctccctccatctcacctcgtgctcgctcgctttctcttcttggtcccgaactctctgcaaagtcgtctcctcggaagattcatccccagactgctgactctgagacggagaaggcgctgatatcacagctgttgaagaagatagaggaactcgagcatgctaatacagacatccggaaaaagagagatgagatggatgccaagcttgataaagccaagaaggaaggagatgaactaaagggagtctatgagattctcgaaagtgaggtggagaaggctgggttggaggtgattgacctggacgaacaaactgacaaagctgaagatgatagcagatcgggcagacggccaacaagatcctcgtcgcggaaaggatcgcccagtttgattacaagtgaaaacaaggcaaggttgattcccacgacacctggaagatcacctaccacatccagcctcgagatcaagttcttctcttcgtcccctccgatcactgaccggctatctgattcgaatgcactctcaccctcgccctctgttcttctcagctctccccggtcaatattgcacgatgaatccccttcaggcttactgtttcatgctgctcctgcttctgtgggcccgacgtctccctcttctagatttggaactggaaaccgacttacaatcgaacggagaagacgaactagagcggctagccctttcatctctccaaccatctcaactttaacttctccaacccgtctacctcgaggcgcgcatgattcctctatcggtcttagtcccgaaggttcttcgcgaatgcttcacatgggatctccactaaagcttcgaatcagttatactaccgagatgactgattgtcatcagcaggtccgccgaatgacactagagaatgagttcggagagattgaagagaaatcgagaacaacagactcggaatcttcactgtttgatcctgagccgaaatctggtcagccaagctggagaaaaccacttgagacggcgaatgtgtccgggacatctccttcgtcgttgccgtcaccgtcgtccatgacatcgaacagcagaacgaggttgtctggaagacattatcggcgggctcggttggaaggcgtcccacacactccgtctccatcctcaatcttttctatttctactatacgtgacgaatttggtactgttgatcctacgatggaaggctgggaggacgagccgtccggggtatcagacggctcttcttctttctctctgtctccttctcattctaacgcattgatggttcgatctcaaccggaagagctggtgatcgaccgagagtcaggcgttggacactctttagaagatcaatacctagacacgtcgactccaatcttccctcttggctctctcactcgactctccacgttttctaattcagagacattcgaactgctagatcgagccgtctcggaacgtgttgtcagatggtctgacgagtcactcgaccctaccagtcgaactggtacttctccccacggtattgttccggccgcggatcatgatccaatgtcgattgctactgcactttggtctttccttcctacgctcattccattgaacgtgtcagacccgttcgagacgacgttctatccggaacctgtcgagccggacgaagaggatctgataactgaacgaaggtcgttcagggaggaacgaatgaatgaagctaggcggaatggattagatccttatagtagggaagtactccgcgcgcctacgaagcgagaactcgctgctcggcgagtagcccttgatcgaacaatttctgtacaggataagaaatcctctggaggtgacggaaatggtaatcgagatgacgaaacaaacatcaatcgagttcgatataggagctggtcatcgagagtgatttcgtacgaaacaatggaccggataagcgcgcgctggatcgaaacattgatggatctctggttcttctgccagatcgtcgtgatcgccgtggtattcataaatgagatggttaggaatggtcggaagacacttcggtacgccctttatttaacagatgcctcgccgtcaaccaagtatcactgaatgccagtttacgtttgttggtacttccttgtcccttgacaattctagagccatcgatagacatcatccaactcacaaacaacgatgaacgagtcacagttccttacgttttccttattcacttgccaatctcaccttgcttctagctatcatcatgtcaaactctcttctcttgtcaaccgacatattctatgtcttcgggtttccactttttagtcaggctccatgttctttatcccgtgttttcacttttcaacttacgtacatatgctccatgtaggtcatcaccgatcggccatgatacccctctcttcctccatccttgctctttccataaacctatatgtatccgaacactgtcttctgccatatactcccttatgttattcccaacaaacaactccgtacatatgtctataaccacgtggagggaacttatgtgttcactttcattttccccctttttttttcttcttttgggactttgatcaaactatgaaatttagaatgatggcaacgttgatgtttatcaattcaactaatgatgaggtccaatcaacaacagcaagggtagtcgtggctctcacgaatttgaatgccttgcgacacatgaaaaagtatacaatccattgatagcttgaaacaagagaccatatcgcgaaaccccctccctaagtgaccagagtacaaagacatacaacgaatgcgagaaaggaaggagaaaagagaaatgcaattctgactgcgcatagaacgacaaccatatgtggtcaaacagaccgtgaaggaaagagtagtgaggattgagttggaaggtttttttcaccccctttgaaagatacaaatacatttgatggcgccaggttcttaaaaggcgctctgtgaaccgttgaaggacagtaaatatctaattgggttagagctagggagaaaatcgcatcattagaaagacaaacgcacgtgaagaccggtagaggcgttggattcaaagctactggaaaggctggtggacggagaggtggaaagctcggaagaaggaggggattgatgtgcgacgacgtaagaggttcgagcgatggaggaaaggtctgctgacgtaacattgaacatacggaatcagttcacatacgagagcttttaaagcgaggtttatttgctgaggtgtgaggcaggaatgaatgcatacagcatcgatgaaaggggaaaacgttggctgaatttgaaattatgacaacgtaccaatctttcccttgttcgctcgcttgacaaagttctttcgtacattcaggtcctttttgaactctccctcccggatatcagccgcgacctgagaacgaaaaggggcagaatacgttgttaggatttttcaacgaaatgaaagacagcacaaaaaggtgttgaaagccgagagaatcaagaagtgatatacccattctaatgtcaaatccaatattttcaaccagctctgtaggcaccaacccagatagatggagttcgcacgaattcatccaacatccagccaagaagagacggtcatcagaatattgccatcccctctgcatgtgatgccaaataccaaatgaaccccctctatacccgaaatcttccagcgattgaaagaaaccaaagcaagaaaagggactcaagggagataaattgagacaactaaccttgtcgaccttttggtcttcggtgggcacatgcttaggaggctgaggctgaggggtctgtgaatcaaatgcttcgtcctcttcctcgaaagtaccgacgacgcaatcgtcgtgggtgatatggtggtgacgggccgagatatttccccagccgccgtagccatctcgcttctgagactgatctcggccgtttctgcggagatgcggatggaatgtagaatgagaagggaagaacagaaaagaaatctaaacaggaaacaggagctagacaaacttagagatggatcgatcgtgagcgagagcccgagggttcaatgctttgttgcttctagtcatgactgtgtgtttggctggagtgagaatatgatagatctgagataggataggtttgattcaaagggtgatggatgatgagtgatgggtggtgggtggtggatggttaaaaagaaggtaagagaacggaaatgtttccccagtgaattctagaaggcacaagacccggaagaagacacggattagccgagatgccctgaatttagatccggaggtccgtgcggcgtgatccgtgtaatagatggcgaccgggcagtggttacaaagtcacgcagtctaaccctaacctgaactccatctcgttgttgttcttcgtattacctatcctgttctttgaaaagacaatgtcctcgttgtccatctttcttgttctttgtgtatttctatgaccgccccagcttcggcttcattctatctgtttcttctgttcgttgccgttctgtaggtcactctcttgtccgtttggaacactctttctttctctataccatccaaatcgatgactatatgcgccttcatctcttcttaaagattcgctgcctttatcctgtggcttatcctatcatcttgtttgggtgagttcactcgaggatctctcagtccgcaagtcgaaagagaagatgtctgctgacacattgcaacttccttgatatgctcgtatctttcaggagcctcgattcgagacccagtcccgttccaacagcaacgacccaacagatacagaacactcgaaagatatgtacccatcatgcgcacagacagtcaggacagcgctcaggaaactctggagcttcaaatcagatgaaaactctttcattgatctggattcgtctctaggtttatctgtgttccaaacttggcgtatctagagggaataaagaagaagagaaaagcatccaggaatcacaccaaagacatatcacatcttcagctgtgttcctcatcgataaggctcaacgggaacctcggtcgaactcgtaaagaaaacggataacactcacaataataccttcagttcgctcattccgctttcacattccctcttctttgccctcaactcgttcatcttggtctccattgcttccgtatccttctccaacgtcttgagtgctcgaggtaacggcatgtggaagaacgagtcgccaagcttgtacctatcgcacaatcgaatgataaaagatgaaatcatgagaaacgtagttatacaaaagcagtattcgtacttgtaagacgtcaagaacgaagagacatgacttacagtacaggctcatcctcatccgctagctcgagctccaaggcgaggtcatccagagcttccttctcctcctgaaagttaaagtagaaatagagacaagaaatgtgtcatgttaaaacaacaggttcggagcctacacgatatcatacgattcgaaaactcacaagttttcgcttcaattgatcttcgacctctgacagacgggtgttcagtttcgaaaaggtgttgatcctagattgatcctctatttacccgtttcacacgcacatacgcacaataaataagattcaaccaagagctattcagaacagatctatatcaataaatgacaggggtctaattgagagacgcttttaccccagttgacctcgactgcctcgtccggttcttcatctcgtttaagctatttcataaagaagcagagaattaacatgaagccagatgatttacgaatatttctggctctacaaaggatcgtatacatgagcatgggactactaaccatcttgggagccatgtcggctgattctatctggacagagtacgtttatgtcgagggaaatgaatgagagcgtgaaaatggttcgcattctccgagcgactaattactttcgatacacatagataaacctctgaataccactatctttacagccggcatacccgtcatatctatattgatcatcaatctcagctctcgcctctctcgcacttcacttgctttctaaaccaagatgtctgttaaatgggaaaacaaatattatcaacgggtaagtgaaattatctctattagtagttgactgatcaacaggtcgctgatcatatctggacgtcctttgggaacttcgttacttctattttttttttcggattacagactacaggtgaacgatccagtttctgttcactcttatgttctctcgcccaccatgaagcgctatttgagccttgctgatgtgattgggtcgactgactttaatatgcctgatgttctcaagcgtagggaccggtcggccttgttatatttgctataaagagagtactgttgtcttggcgagtgggttcttctcccaatctctttagctactcgtcttgttgaaaatgatgtgctgatgcatacggttctactgtttattcctgcgtgaatttcttagcaatcaacacaacagactttttctacgtctgtccatctcatttgaccgacagtggatttgcgactctattgactcctcccccggcagacaagccattgaaggaagagatcggaaaagttatagccgagtacgaggccaaggaagtgagacggaaagagaagtctaaggaggaaagggagggcaaagacaaagaatcagagaaggagtcgataaaggccgggaaagaagaggctgaggcgaagaaggcttcgacaccattgattccgtctactcctattacgccaagtcataagtcgtatgctctccatcgtgtgagtcttgattcgttcttctgtgcttgagttgaagacatgttgcttatgtgcttgacttcatacactttactctcgttcacttaggatatcttcaacatgcgaataagcgacgcgaaaaagaaggaaaatctgatgaaggtatgtatccgtcatatctgtcctgacgtcaactacgattcagactaatttctgcatctctctcttgtctctcatcaggcaaaagctgtttccaaaggtgcgtttccgattgcgctaagtaccaaacgtctcagcaagacaactgatgcctctctcctcatgaacttatttcacctttagatcttcctcgagctcctactggattcggccgacattgagaagaagaactgtatgggatgtgtggtgcttccatgttgtatctatgttgtattcctgacagtcgctatgctatagaacaagcgatgtgattgctaggcttgtaaatgtaaccggtcacgcgtaaccatggtcgatgacgtatgatggatcgctcggtcgtctgttcgctcggtctttttccatacctgtttcaaaggacagcccatcacttccatcatccgtccacgtcttgtccaatcctcttaacacgatgtcgactccttcgacaatagatactggcacctcccttggaaccgttcttgatttgggagagcctgtcgaggtgattgaaagagagactgttcaacaaaatgttgttcatcctccggttgctgctcctgtagttgtgatcccagctcctcctccagccccagaacctatccatcatcacaaagaagatactgtggttcagaagactacgatctactcagaatacaatcagatccctactatatctaaatagtgcgtccgctctttctctgactagaacatccttctcatcctgaaaagataaaccgaaaaccatcagagcaagtcattctatcgggaggcggggtattttgttatagagattgatttcattctattttggtgattgtttgattattcagtctggagaaccaagagcgagagcatcaggataactatgatggtagcctgagtgatgatgagctgcaagaagccaaggatagagaggccgagcaaaatgaagctgagaaagaggacgataaggacgccatcaagaagaggatgaagcctgatgaaggaaagaagactgacgaggtatgtctgatgcattcaattcaaaccttttaagttaatctgcttgagctaattttgtgaatatctcatcaatctctcctgttcttgcctccttctctttaggttaaagaaaagaaaggaaaacgaacggtgaaggaccccacgactggatacgcagtaacaatcaaggatgcagagatgaaaggtaaggacacatgcaaatccagtcgataaacctgcgtcagttttcactctgaagattgaccgttgccatatcaaaacgttctctacagaattccctctctcttccttaatgaacgccatccggccacctccatccccaaaggaaattcatcattctcgaacatcccctgttcctgcccatccttccaacatttcccttcttccatacccttcttctgaatcacccgcgctcgagtcaattcatcagtacatcgactggttctccactttcgctgtcgcttcgtctgttctgttgtgggctgtcaccgcttcgtctggcggttggatcagctttgtacttaaaacgggcttgataggcgcgttaggtgcgggaggttggtatcttggtcgggaaatcaaagacggcttgcacgccgagttagaagtagctaagaaagatttcaccaagaggagaccaggaaagtttgaaacgccgatgccggagagcacggagtggctcaacagcctcgtcggggcgttctggaagctgctcagctctggtgcgtacacgtgtcgactcaaatttagtgcctagttgtcgaagacaaaacgctaacgaggatcttgtgggtgcgccacgacattactttcgtctaacagagatgtttctcactacagctacgggaattgaggataccataaaagcttctgctccctttcttgcaggcgtcaaattcacagatatcgatcttggtaggttgtctatatgactttgtcagaaggtagtcttccgtgctactcttactcatcgatatattcaacttctcgtcatacaggagcggctccgctaagaattttagaaatccgaggacttgctgattcgccctctgatcgaaagtaagaaacgtttttttatatcaaaaccaaaagccaattgctggtgagcctgacagatcaacggtggtttccagatatcctcgagaagaatggatcaacttgggaaaagacaagtacaaatttgaggaatcccaatctggagactacaccgttagtttctcttctatacactctctacgcgttaccttctaccgactaagatgaccacttatccggaactttgcgaatcatagaatctagaaatttcgtttgcttacagtggaaggaagggtgtaaaaggggacacacggccaactaatatacaattcactcttgagctagtcgcgcaggtaagcgatcgagtagctactcttgctttcggcatcgatctcagatttgcacatgagatctatctctcacttcaaacaatttatttgttatggcacttcagataatggagaagtacaaaatcccaatccctatctggatcaggcttaaccgaattgttgcaaccatccggcttcggcttcagttcattcctatcgctcccttcgttcgaaatgtctcatttgctctcgtatgtcttcaacacatccatgttcaagatatccttgaatcgagatgctgattgataagctgtttgctgtgcgctctgtatctttctgtcttccctaaaaaatgggatacaaaaacaaacgaacggaacatagatggatgctccagacattgacgtcgctatctctattcagaaatacctacccaatcttctggatctacctctattgtcttctatgattaagctagggcttaagacgggtacgaaatcattaaccgcgcccagatcaatgacgatgaatttgcaggatatggtcagccctggtatgttctcatagcttctttcttgagcttcggaaggaaaagaaaggctcgtgggactgatggttgcttaaaaattgtatcgatcgattgctcctgtagtcgctatcggagaaactaagacacagggtgtgttggtcatcaccattcactacggagaaggcttgagtgcccaggataggaacggttcgtgattatttctatattctagctagaagcaactttcttttatcgactgaatgacatttcctctatcattaggttcttccgatccttatatcgtgtacgttcaatatttagagatagcctcacaccttcccttactctttctcgtcttaataacagattctttgtttgaaacacagaatgtcatacgcaaagtttgggaaacctttgtactcaacccgaatcatcgttggagacctcaaccctgtcttcgaggagacttgctacttacttgtaaactcggatgacgtaaagagtcaggaagcactcagcgtctgtctctgggactcagatagtacgtgacttgcctcagttccttgtatgtgcaaatctagtcaagactgacgacctactcatatggtttgatcgcactagaattaaaatcggatgatctcattgggcgaggtatgctacaaatgttcaagccacacttttcatagtgatactaatgcgacggtttctttgtgaaatacttcattttcaaccacaacgaatactcacagtaaatgtccctcttttggatataatggcgaggccaaacgtaatgatgcgccgaaaggatggcctgtctgggtttgaaggtgacctctctcattaaatttcatgattttttcaaaaccagatttagacaattaatctccccttttatgttcttatgatcagatgctaactcgatgcaaggaactatccactggtctgtcggatactacgagcgagctgctcttctgaaagaaatggagtctcctgaagagaacccggctgcacctcctacaacttctctgattgagacagagacgatgatgccgggagagaaagcacctttcccagcaaagacgcctcctcctccaccgcctgatgcaacccgaactccgtgagttatcttgaccacatatatgtcagccattggaaacatctcaaaatataccttgaactgaatgtaccttgttttacggatttatgaacacatagcccgaatccgaagtataaatctggaatcttgtctgttcttatcaaccatattaacagccttgaaaggaagcctaccgatgatccaaaggtcagctttctcctttctattccgatgcaagacatcgtatccagacaaactcttatcgattactccgatttgcttgacaggcgccccagactcctccgagtgcttatatcgagcttttcattaatgaagaattggcaactaaaactcgagtccgacaatacacttctatgcccttctttgtggttcgtttcatttgtctgtctgttatagcttgactttgcactcgacttcaaatatactcaaagccaacggttgatcgacatctctttactccaaatattaccagacactttcggagcactttgttcggaactggaaggatgcccatgttcagatggttgttcgagatgcctcttggtatgaacaggatccgattctaggtgtagtcactctagatcttatagatttgttcacgaagtcaagtgaagtcacgaagatgtttgctgtaagtttctccgatcacaactgtcctctgctgtatcgggcctttcgtgactgaccatcaagtttcaatttgtggtttagatggagcatggatctggaaacggacgtacgttatttgacatttcagaaataactcctcgccttgttatcactgacgaagtttgatcctcttcattctttacgatagaaattcacgcctctctgaaattcagcggagtcaagatggatctccctcccaacctctctggatacgaggcgggtaccattcaaatcactgagcctatagttgcagatctatcgcctcagtacaccgatttggcggaggatctcaagcatcttcgaatggttacgaatgactcatccgagcgattgcctaaaaaggaggctgttgttgatggatctagaatcacatgggatgtcgataacgtccgacttcctgtgtacagtagatatcaatcctgcctatcattccagttccagggcagtaagcttcttgggttaggcaaggagctcaaagctatctcatcactttggctccaggagctcgttgatgaagaaacgaggactatcagaatacccatcatcatcgctaaagatctggttcagcttcgtcagaatgtgagacactactcccattcttgcttcacgtgcatcaacttgactgacaaaacttccccatctctttgacaaacagtacttgaacgacttctgcgccagcacgcacgaatataaagttgttggttggctttctaccaccgttcttctcgacgccggtctggatgaagtatatccgatgctttggtcttcgtctttccccccaacatatgttttttgaacgaactgacacgcctttaccccttcaaactttgatctacaacctataacaggaccacgaggcacgaacccgaaaccaagcacaccgacacgcctatgaggtttggaatgaggtcgatcgtaaagaagaggttgtcgccgagcctcagatataccatcctgagggggtgattgatcaggtttgttcttgtttcctggtattttgtttctttttatttcgcgaaatttaggttgttgaatcatagacttattgcacacgattttttttctttgggcgtcgatttgtcttccgttgacacaggaggaattacatcagaaacaagaggtgaaaagggttgagattaaacaggagaagaaatctacccgccgacatcggtctcgaaagtacgttctatgtctattactccgacttcttcattaattaaaaactcttgcctgacactgatctgacatccatgatccttaactatgtcctgcttaggtctatgagtcacttcatcgagaagctgaagggccaccatcatgactagttatcacctttgacccttagggtcatctagttcctggtctcatgtcttttcacaactgtcttccattaattgattggccgacagctctaatatcgcttgaatttcttctttctcatccttttctatatcctcatttgctttgaatttctctgtgttgtctctctactactttgtttgactgtatctacccatctcaacatattcaatgcacacacacggatttatgtttttcactttgagacattcggtttatgtataacaagaaacaacaaatttagttttggaccacccagatgatcaaggaagtcattatttatcttctgaactcccctcctcttcctccgaggactctttcaggttttttattgtccttttcgatctagggtttcgtttaatcctcggttcgaccttaacctcgggtttgatcttctttggattctttggtgttactgcgttttttacttttgagatcttgagtactttcggagggtttcctagtagtttgagacccgcacattctttgatccattctgcttgaactttttttttttttgcgaaagaagataggaaagggcggtgttctcattagcaggcgtattttcatctatccgatagatagtacacactggttggtagatgacttggatcttcgagggtctcgagttgatgaagctaaagtcccggtaaataccgtagccattaggaggagaaaagatacgagaaagacggataacgacttgtcagtatactttaattaagagattagatgtatatcatgtgcgctacaggctgggccgtgaaaacacgagtacaaaccaattcaatctcccgcttccagacctggtcgtttccattgttgggagctatgcaacaaacggaatagaagaaaagcgaatcgattgtcaaccgcaaagatgtgaaccagcgacgaaaaacaacaaacacaagttcctctcaagactcactctccaggatccagaggacatctctccacccttcccaatccttctttccctctggtccattccaccgaatcaaagaccagaacccttctaacccaatctgacctacccctatattctcatgcctgtctttcttcatccctaagccaaatttactatcatttacatgtagtgctttccagtatctgaaaggaaccatactgtcaaaccgggtgagagtttgatggagtgtcaagggggttcgaatgtcatttgactcggacgcagcgaacagatgacctggaaagaaacaaaacaaggagatttcagtaagacaaaacttgtctgtgactttataaaaataataacggataaaaggaggcgaagcattcgatacgaacatgtatctatgcaaactccaatccttgatttatctttcacaagtttgatgatgtccctcaagtcctcgaaataagaacccaagacttcaccttggcctgccttttgtacacaagcccaaaatcgggtttcaaaaagttatgcggcacaaaaaattagcaaaataagcatagagacagaagcatagagacggaccatgttctcaagcacgatcgttacgtgctttgtctcgttcaacgctctattgactccttcagccacccatccaatcgctctaaccctatcctctttcattggagacccaggactgagcataaaccaagcgaaatgactttgatcatcagtaacctttccgtacacgtcttcctcaacgaagggctatagagggtccttactgaaagttatatagtccaatccctaaactttcacagcgcttgatgtcatcaatgaagcactcgtacgacttttcccgcttggagctttccggattagccaagttgaccaaataagacccatgaggctatatagcggaattgagtatcgcttccatcagcaatgaaccaaagacgtgaatcacaaggtcaggagtaagcttcgcactgaccaacatatcccgctttggattgtatgaaaattctaaccatctcgcaccattcgtgaggaataagaatgagactctaacacctgatcgatagagggaaggagggaaatgtaagagtaaagcagttggtttactcacttttgcaagcattagggaatgattccttgatagtcgtctctgctaacgccgtacttttccattgtctttggcttttcaggaacaaagcaaatgcattcgctctatggaatcaacatggcgagagaatcaatcaactgcttgaaaatgaacatcatgaaaatgtatctcaaagactcacccgatcttagctgcattcttcactgcgttctctactccacctgaggctgaaacgtgagcacccaccctaatagcgcttccacttctctctggtgcgatgtcctcttctgcgacagaactcttgagtattctaaccctctttgcgggagactccttctgagaagcagctgagggagctacggatggaggagatgctggacgaggcgagaccggaggagggaactcggaaggagaatgaggaggggaagatagaatggacgatctagcggaggcaggaggcgagggagtgctcatgaccgcggaatggactcttttggggcgagatttcatgatgaacaagtgaggagctaaatcaaccccctggattagatattctttggtgagagagaacagacttggaaaatgagtatgtggagtgggattgggtaaatgaatgttggcggagatttgacgaacagataatttcgtagcgcgatcaagagataagggatgtcaccatcatagcagtatattagacactcgacatccgacatagctttcggcgagaagacacaatatgtaatatctcaagagcaacaatcatagcgaaatagacgtcgtgaaaaagaaagaacgttgaaagatgcaaaaatgaaagaaagggtccgtgtattcatagccctgtaaaggcttatagagatggcagatagatagcgagcaagcggtgaaagtgatagtctcttttttactacatgaaaagacgacaatagcgatggtatgatacgagggaaaacaaagagaaatgttttttttgaactggatgatttacaaaatctatcgcccacctgccaatgctctctcgagctcctgagctgggtctaatccatagacttcatcaatcgggatctgctgactgcctgcctcccccatcccgtacgtcggctgagcttggtttttatcagttcccacaggctcaacggccggtctggtaaagatcacgaatgcaagtcgtatgtcaacgatcaccaaggtcagaccaaatgaaggcgtgcagaacaagatgaaagtatcatatacatactgttgagtgttatgtgcttgttcccatcctcgagcctgattcctaacctcttgacggaagacagatacttcatcaataatcaacgaccgcatcccctccgtactttcttcatcctcgaatgcgaaatcgacatcgaactggcacgtcggctcatcatcttacgaaagcaagctggtatgatcaggttctatatcaaaaattgaaagaaaccaagagaaagaagcgtactaggatcatgccagaccgagagatacggatgatttaacgcttcctcgcatgttattcgtttcgaaggatcaaacgtcagcattctagtcaataggtcgattgccagtgggttcgctgattgatacacgtttccaaacggtattctcggcttgataggaagcgatcggatatattcttgtgcctgaaggaacggtgagagatcgaagccagaacgtatataaagagtggcaaaacgcaatcagcagtaaaaaaaatgaggacatagagaaaaaaagaaacgagacataccctcggggacccaacccgtcgaagagtgtcttcgcttggtgtacccaagaaatgaaggatttgattgagctggtcgacgtaatcccgtcctttgaagataggtttgcctcctaaaagctcagccaggatacagcctacagaccagatgtcgactgtaggaagtgatgtatacaacagaaaattttgagcagtgatgtaaacgatgatttgatacaaaacaaaaggacagagcaaaatcttggacgtactggatgcggtgtagttggcaaatgaaagcataatctgtttagcgagaaatcatccatagtgagtttctgtttcatcatttctgaacaggttgaaaagagaatcaaatctactcacttcgggagctaaaaaatcaaagattaccagtatcatgagaagattagtgtccgagcgatgacaagagtatgaacattcggattatcaacatacctcggtaccatctcgtcataacatattccgtcatgattcctggtccgcccttgtcttcattcccgttctcggcaaatcctcgtgcaaggccaaagtcacaaatctatgattatgatagagcgcacagagaactggtcaggtctatgccaaatgatgcgccaactgaaactgttatgttacataggtatccctatgcgtagtctttaccttcagttcacaatctgcgttaaccaacaagttacctgatgaacgaaaggttgaaaaatagttttctcagtgtgttgatcaatgatctaggggaagacgcacataaggataacatgtacatacccggcttcagatctcggtgcaaaacatttgccgagtgaatgtatttgagaccacatagggtttgatagacaaatgattgaaagtgcgcgtccgatagtggctggccggatcgaatctgagtatgaaaatatttgaagtcgattcaaaaaacgatgtctctactgagttttgacttcatgacggagcgcaagattgaacaaactaacgattgcatgtaggtcggcctccatcaactcctcgtaaaggtagacttcgttgaaagaacccgcatgaggatcaaacacaatatctagatcataaaggcaggtaatctaccatgacaaaagccacttccgaaaagcgctcaaccttccaattgttaaagttagatcggaaaagatctcgacttacgttcttgtgtcctctaaaatgatggagcaacttgatttctcgaagacatctcttggacagaatcttcttagagaatatattagtgatctgtgtatatagacagagttgatgtcgatgtttccaacagagatccaatggatttggagatgcggaagatgttgagtaggcaaacaagtcagtgtccggaggaagaggtgaagttaggatacgaaagatatttttgacagagaactgtatgcctccgaatagacagacggaccttcttcacagcgcacctatatagaaacaacgcatagaaaacccaagggggtcagattcaacttacccaaagcaacaaataggaaagagagcagaaggaatacaccacgtatgtggtgcaacggtactgaagatatctggtctcccgacatcggatacttacatctcaccggttccgatatgtctggcgctgatgacacagccgtaagcacctgcgctgtgattgacgaaggagaaagaggacaaagtggattcatacagtcagtcggagaatggttgaaagagaaaagcaagaggcatatttgttagccgatcaatcaggtggcatttgtggtcagatactatgagagaagaacgtgcccgagctccttcaccatggtatacgaagagtcgatcacactgttagataaagtagagcgagatgagtaattgctctttgttcttgttggtagaccgaccactctcggcaaaacatggaaagactgaatgctgacaattgctggttgtgcgaggtgaacaccgttctttgtggagacgccatgactggggtgtgtgtatacgtgcgggtgtgagtgtatggtaagaattggagcaaaagatctaggaataggattctttttcccatcagggacaggaatgacaagcggtgaccgtcgaccattctgactgcgcaaaaggcggtggataaaaggcacgtgtttgtggcgttttgctcactactatcttaacccttcgcacttctttctgtttcatttcgggagatcactcactatacatcctgtctttagctcgcatcagctccttgacaatgtcggaagcccccaagtttactccaggatcgctatacgcaggcatatcgttctctcagtcggctgaatcctccggctcaagttcatctaatccatcaacgaatgtaaacgcggattcggcaaacgcacccaaaaagagtaagatcctcaacaggtctaccgaaatctattgagtactcaaaccaactgactttgattcgttccttcttactccatctcctctcttcaatctcataatatagactggtcaactgcgcttgcatttgctcctattcgtcgggcgcccgctcaaaaaccaaagccgcctcggccgtccgccgcgttgttctttactcctactccgaatgcttcttcaggttcgaagtcgacagatatcgtgcgagaagcagcacctgtgatccataagcctagaacagacccttccatttcgaactctagactcgcagaccagacgtatacccgggccttaccctctcttactctggaagaagatatcaatgggttcaataaacgtctgaatccctcgtcctctgcatacgactcagcccaggcccaggcgaacaagaagaagaaaaagagaaaaaaccgtggcaacccttcagaacaaaacagagcaacgttcaatccattggaactgtacgacccggcaaaacccaatgacattgaggagtacaccagatggaaggccgaggagaagaagagaaaggagcgaatccgaagggagaaaaaggagtatgcgagaaagattgagagtgaaagcgagagttcttactacactgaagatgaggaagaagaagagctggaaagagcaagaactggccgctatatcggtttgtcgggtttctactatttcattcaccatggaggcctctgatctgatctccatttctcaatggattgttacaggccaaccacctccagcgtcttatagcactacaaccccctcatctaacgctttcccagtctttcaaccctctacctctcattctaatcccttacagtccgatttagatccttcagccccttcatttactcctgctagtatcgctgctactggtacactaccgccacctcctagcttggtcgtgccacctcaagcgagtctttcaggggaagaagcttatctccgtcgagctgccttatcctcccttcaacagccgactgtatcatcagatgctcctagagaggcagtatctataccatctttctcgtcgtcgtcgtcttcttcgtcggttcctaccggcgcagctccaagtgggattgatagtgaagaattccaacgaaaagtcgaagaaaggaagagagcagcggctgcaatgtaagaactatcagttttttgacatctttttgtatcaaaccttcgtttacaatgaagtactctatgtcattcatagtgctgctcggtttgctaagccggctagcggagttgctctagctggaaacacggaaggaaatctatcgactcccccgcctccaaaagttgagagggatcccaatgacaacagagactttgctacccgaatgatggtttgtctgttctcactgatgtgtaggtgttaaaaaacctggattgtgtttaaaatcctcctctcttcgctcaataggataaatggggacataaaactggagaaggtctgggagtcgagttcgtagcctcttctttgtcttctatttgttggcaggccatgcttgtctccatctattgtaaaacagactgaactcatcccaccgtccttttctctgtttttagcgcatccggtataacaaatccccttcagatcgctcaaacgtcaaagcctaaagcgaaactatcgtcctcgtctgatgcaccttttcaaccccgagcaatgggtaaagtgatctcagaaacgacttcaagaaagaacgcagaagatttagcaaggtttggagagtccagtcggatcgtgcttttgatgcatatggtggggtctgtagaggaggtggatgacgagctaagccaggatattgcagaggaatgtggaaaattgtacgtctttctctatctgttttcattataacatggggttcttcgtcctacaaagactgtttccttatcggaaaatctctttctgaatttgattcgttgattcagcggagtggtcgaacgagtggtcatccacgaggtccatccaaccccctcccggcctgaagattccgtccgagtacgtttctccgtctcttaccttgcgtggcggatatcacatttcctctgtcacaaaagtaaactgacttctctgtgggtttccttcaaataaacccttctctcacataggtattcgtggtgttctctggtccagcaggtgcatggacggccatccgtgcattggacgacagattttttggcgggaggtctatcaaagctaggtatttctccgagaataagttcgatagaggagatcgagacaactagtcctaccctccttcctacgcttgctcgcttgtttgcctactcattttctctttatctttgaatacgatatatccaatgcgtctctccatgtctagttcttttcttgctgtcgcctgcgacaaattttataaacaagtgaagctctatacggtttgtcaagtcatctatagatttgtttcttcttgactagaccgaacaggcatcttgttcgcc

SEQ ID NO: 1213 - DNA, 5133 bp, Xanthophyllomyces dendrorhous
gtattataagaagatgagacggagagaaaaagaaaaaaaagaaggaaaaaatgagacgatatgcaaagttatgaaagaacagaacagagacatatatgataccaaatctcaaagaaacagaaaagagaaaagaaagaatccccaaaaacacaaacctccctttccccatcttctcaggggaaaagaagggagagatttttattttctaccgtctgagactacttcgaacgaacgaagatgcaggactaggggtagcataggccgatccataagcttctcggaagtagagtatcgaaaacaagaggaaaaggaaggcgccgatcaatgtaactgtatcagatgaagaagttgaggtcaaaattagcaagactaggagaccgaaaagacaaaaagaagagaaggaagaacaaaactggtagaacagaactcactgtacttgacagaaatctttgtagataaccaacgaccaccaatgacagctccggccgtacataagccgtgaccaaggatggtaccgaaggcgataacatagaggttctgattatgaccaattgacacgaatcgtttcagtaagggtagaagcaaaggaaacaataggacaaggaattagactaagagaagcgcacatgagcggccgccaaggctatggtggcgatctgacttcgatctccccattcgcccaggaacgtcaacacaaatgcttgcgcaaataccggactggccatcacgcccaacatttgtttcgccttttcggcatagcctgcgatgcctccttccatactgccggatcttgatgcggatgctgaaccagaccgggggaacgatcgaccttcctccatatcgttgagtggtattgagctggccgggctggaagagagctcttcttcgacctctcggatctcctcagccattttatcggaggaatcggtagcagacatggtcaccccctcgtgagccatccgaactccaaacaccaggaagagcacggcggcctagagataaaccaatcaaagtcaaaggtcagttctctgttttgatgatagttgacaccacatagatgctgatttccaagacgaaaagaccgttcacgtccgctcgacttgtacccccaaccgaaagcaaagccgggacaatacggagaaaccaaaacatatggaacagacttacagcaaattgggtccactctttcggaacgagaccaatgactctacccatggctgcactgaggatgctcatgatgaccagactagcgaacgctcctgcaaacacggtcatccggggttggcgcgaggccaagatagctgcaatcaggaacgtcttgtctccgatctctgagacgacctgttgggatgaggagaacgttgagtatcattttttaggcctatcacaggcagacagaagcatgtaagggaactcacgatcatgatgaacgcttgccacaaggcatctagaaggggagaagagttaagagaggatcaagatagcgcgtacagtttatcaggcttcggcttggcagcgtctaatcgtgtttgatagctgaggaggatctatgttctgcatagatgtacgcactaaagttggtgacttcctcttgagaatccatcttgaattagattgtttgtccttagatctccgataaaaagaagagaatagagaatggaaaacacgaaggaaaggaaaatgaccaagaaatgaacgaatgaacaggatggggtaagagacagtttgaggtcttgactggagagatggccgagagaaagcaggtacgtaaccaaaagggcacatggttacaaaattggtcagtttgccgcgccgccggcaaactttccttgacaagggttgccggttccgtggacttagtcgtgagagagcttgggcgaacgaggaacggcaattaggtaagcgcgttcacatcgtaaccatacgctggtaacgatccgtacgcataaccacgccgtcttttccgcccgctttttcatcctcgtccctctcgtttttctcatcaacctttctctcgtctctctcttgtcctcctcttttctgtccatcctttagatcaccatggcttcccgaatgctcagcaggtctctcaaggctccttccagggtcagtgtcctatgagtttcatttgtgaatacgcttggcgttttctttttctctttctttgggaggagaaaagaagagaaaagacagcgaattgcgtcggatctggttggcgagaacccgatcagatcggtttttcaatcataccacacgtcggaaaaaaaccccgtactgattcttcttattcttctaccaacgatcctactctccgtcgatatgaacgcgtctttaatttttcggttgaatctatcgatgaattagctcggtcgagggctcgctaccgccgcccccaagcagccgctaaccaagatctccacccttcccaacggtcttgtcgtcgcttccgttcgtcttttttctcttgtgtcttattctttctcctatgtctttttcgacactcttcgtttcctcgtgctcactcatgagtccttcgactttgttgtctggggtttcaaaacctataggagcaccagccccatgcccagactgccaccatcggagtttacttcgacgttggatctcgacacgatcagaaggctggtgtcgctcacttcgccgagcaccttgtaagtttcttccctcctttcatcctctctatcttctgcttaatttttgagactcacacgttctctccttcgtgactggtaaacgaacagtacttcaagggtttgtgtctttctcgattccttttcgtcactatttcattcttggaaaaaaaaactgaccaatgacgtccgccacaactctctccttcgtctacaactgtttttctcacatgcattcaatcaacatctcctgttcctatacaacaacactaccctgctctctatctttcatggatctccttcatttgtggttaaacttcaatccggtcccgtctacttgaactcgtatatccatcgtcaacaggtacccctacccgatccatcaagcagctcgaggccgaggttgagaacatcggaggtcgacttgatgcctacaccgcccgagagatcacttcgtacactggtcgatcccttgctgacggtgtccccaagatgactgagatcattggtgacatgctttccaaccccactttcgacaaggctgctatcgatgctgagaggtcgactatcttgagggaggctgaggaggtcgccaaggacaagcaggaggccatcttcgaccacttgcacgccgtcgccttccagggtacgtttatcaggtcttcataagatgttccgacattctaaaaaggcttgatgagagctccggtccttgaaaaagttgagccagaagtaactaaaatatctcttactaactccataccttatctcgtctttacatttcatccttcgtcgtctatgttcgacggacaggtcaacccctcggatacgatatcctcggccccacccagaacatccagtccattaccaaggatgatttgcttacctaccgggctgccaacttgcactctgacaagatggtctttgctggagccggagccgtgaaccacgaccagctcatcgagctcgcccagaagcacctttctggattcccttcttcctccaacccctttggttccaagcgagccgagaagcccaggttcgttggatctgaggtcaggctgagagatgacacctgggatgattgccacatcgccatcgctgtcgagggtgtcagcaacaacagccccgactactgggtcatggtatgtacatcttacctactctagtagagaggaatataatatccaggatggtgcaggtcaagacgctgatagatgtgttgtctctgcttcctcctcccttcaatttagaacgttatctcttccatcatgggtaactgggaccgatccctcggcgccgctcccttgctttcctctaaactcactcacattctttcctccggaggatacgccaactctttccgacacttcaacctttcttacgctgataccggcctttggggtgtccacctcgtcaccgagaacgtatgtctccttctgatgctgcgtactagtcgtgatttcaagcctgtccctcactgacgccgttctttgaccacctatcttgattttcaaacaggtcactaacatcgacgagaccgttcactggaccttgaaggagtggcagcgaatgtccatggcccctacgattgctgaggtcgagcgagccaagtcccagctcaaagccgccactttgctcactctgtccgatgatggaactaagtcgatcgtcgaagacatcgcccgaaacatcttcacttacggaaccaggttgacccccaagcagatcgaggaggctattgatcgagtgaccgtcgatgatgttatgcgagttgcgaaggagaagatctgggaccaggatgtcgctatggccgctatgggacgagttgagggtctctttgattacgctcgaatccgaaacgacatgtcgtctatgatctactaaaacacagcgatcgtcacttaaagatccctctttcttacctttctttctctctttccccatcattttgttctttaatcctgcgttttctttctctccgtcatccattttctttttttttcttcgtccttgccggagggaacgggaggaggaagtgcgaaccttttttgttatggaaagattccatgattaaaaaggtgactgaagtctgcagtgataccacgttgaggttcaaagtttcgttcgtctcccctaccatcattgacgataaaaccacgtatatatatgccagacaatgagggattcacactgctctcactatatgtctataccagagggacagacctacggacaagttatgccgaatgaacgagcgagtcgatctacctagctattcagataaatccggtgcactttagagagagtggaggcacatttgattacagcgtcattcactttcatccatcaatctcccatcaatctcccatcaatctcccatcatctccatcatctccatcatctccatcacctatccctcatcctttcccacttccacatcaaaagccacaatagatccagtcatgtctctagaggtttgccc

SEQ ID NO: 1214 - DNA, 10819 bp, Xanthophyllomyces dendrorhous
tgtctctagaggtttgccctcacagtctttcgactgacctttctcctccaagattgttagtatcgagttttctccattatgatcgccccgattagttggcttcataggtttggatcttttccgcacacttgggctcattattctcttcgctcccttttggtccggatgactaaactactgggcatttctcttttatggatctttcaatcattgactgttctggggaaccttcttgtcaagataggagtaacgccgtccatagagaagaatgcaccctctgtttcgatgatcaggtttgtccatcccgctatatgaaaatcgttccttgaatcacacgtcgttctctactcttactctcatattggtacaactctatgtcactgtttgccacaggatcaaccggaaggtgtcgatgtttgtctaacctgcttcaacggaggttgtccatcggaagaaaggcatcacgcgagaacccattgggaaaagagccagcacccgatggtcgttaacgtcagaagaacaaagaaacctcaaccagacagggtaagaaatgtagtccttttcctcaattctttagaaatataaggacacagatagaaggtgacagtggtcctggtaggtgaggatgaggtcttgggtgtttcacgaagaaattagaaagctgactattctaccgttcctcatggtggatatcctcctacacgatggaccgaacagaatgatgaggagccaccgttgaaaaaattagctatcctcgaggcgaaagaggaagaccagtacgactaccatctgagcgtcagatgctatgcttgtggagggatcgaggtcgaacaaacacccgaaatcaagaatgtggtggaaggaatcatggcttccaattcatccgccaagcagtccgagatcaaagcctgggaagaagatataacgccttgtgagcacacgctgactcttcagcaggtcgaagcttatgaggtccggtccaccggtcagtccagctctttgcctgtaattccgcgcctcttttgggtctttgctgaggcaagctcattggttattttgcattcatcaggcgccacatgctccaagtgtgagcttggcgagaatctatggctctgcttgacctgtggggctttgggttgtggaagagcgcaatatggaggaaacggtggaaacggacatggactcgctcatttcaccgagacaaatcaccctttggcggtcaagttaggaaccatcactcctgaggggactgctggttagtatgattgatcaattcttcctggtgaggcgcgttcttgagactcatcggctttgtgatctgctttatttttctttgtccgcttgttgatcggcacgacaaacgcatttcatagatatctattgctactcgtgtaacgacgcaaagcttgatccagaattaagcgctcatctagccaattttaagatcaacgtcatgagccagatgaaaacagagaagagtatgactgaattggtaagtgcgcgccgccaagagattatcattgcaaccgcgtcgatcaagtgctgtcacatctcgtcaggcttctactgattgagcctctgtttcaatttgacatgatcagcaactggaacacaatctcaagtttgagttcaacatgaaaaatgatgatggcacggaactcgcgccggtgtttgggccgggcttgacaggtctcaagaatcttggaaacaggttggtgttctctgcatagaaatctgtctggtggttctctatgatggcgaacttcttaattttttttaacactcaatcttctttcacttattccatagttgttacctcgcctcaactcttcaatgtctctttcaactcccatccttccaatacgcctacgactcggccaacaagtcccatgcttctacatgtcccagacctgcggacgcatgtgtagaatgtcagatgaggaaaatcgcagacggactgttatcaggacggtactcccacgcggctgaccaagaagatcgattccagaagggtatcaagccgactatgctaaaagatcttattgggaagggacacgaggaatttgcttcgatgaggcaacaaggtacgtagtaatcaacatcgagcatgttgaatttatggcaagtcgcaatgtatgatctcatcttatatctccttcccctcggtgtggcagatgcggaggaattcctacagcatttgatcaagactcttcgagctgatgctcttaagactaaaaacatctctcctggatctggccatgaagcagcggacgtctttcgattcggactcgaacaacgcctgcagtgtactgagtgcggcggtgttcgatacaggacggacgaacaagacagtttgagcgtaccagtggagattactcctttaggcacggactcagacggaaaaactacttacaaaaaaatttctgtggaggatagcctaggcgcgctgatggcaccggaacgtttggagtatgcgtgtccggcttgcaaaaagacagtacaggcgctcaagtaggtgattttgtgtatcaaaatatcagatagtcgattttgaccttatcaatttcctttcgttttttcatcgtagacagagtcggttcaccacattccctgatgttatggtgatccatgtcaaaaagttccagctcatcaactgggtgcctcagaagataggttcgctagtccatgtatctctcttgaagcatacagagagaattatcaggtcggaattgctactgacccgcattattctttctgtatggcagatgttcctttcattgtgggctccactctgtctctggatccttggactggaactggtctgaaagctggtgaggttgctttgccagaagattcggatgctggtatgtgcgacgtgacacctatatgagccatttcacttccctcctatgaagacaaaccttgactcgcgttctatgatcgatatggtgaacttttgaagctccattgcaaccagagttcaatgagcccgctttggatatgctccaagggatgggattccctcttgttcgttgtcagaaggctctattggcaaccggaaactcggacgcagaagccgctatgaactggctgttcgctcacatggaagatcctggtatgtctcatcttctgtagctgtctcatgggggtcattatctgagtcctaacgttccaacctggttgcgtgagaagatatcgatgcacctctcgatctatcctctgggcccaaatcatctgcagtcaaaggtccatcagcagagcaaatttcaatgttagctgacatgggtttcagtcctgcacaagctcgaaaagcacttcgagaagcggtaagcgagcgctatacatagcttcaggctcgatttctctaatttaaggagacgtaactaactctgctcccttgattgcgataatccccctttagaatggaaatgcggagcaggccattgagtggctgttctcgaacccgggagatcccggagaggaagaatcgatagcgacttccgagtctgccacagaaggaatcccatctggaaacataaactatggaggatcgtcagaactaccagccacttacaagcttaaggcgtttatctctcataagggaccctctgttcattcagggtaagtgttctgttgtttatcggttgtatcagcaaaaagtagttagagttaacaattccgtgttttgttcggccgtgtcattgcgctctggctttggcgcgatagacattatgtggctacagtagaagacaccgaatctggagcggttctgttcaatgatgagaaggttgttcgaagtgagggcacggctcattctgggctacgagagctagcatacctgtatatatttacaaaggtttgatcggataccttttccttgtatgaacatgatgaatgtccgagagaccagacgagaatagagagagcaatgtacagatggcacacaaggagaccttgagtcgggcttatttagccaaaaggtgaataaccagagataataggcgtgttaattctcaacttcttgacccaacagagttccttctaccctcttcaatcgccatcattcatcccgtctgtctcgtcctggttcttgactgaaagacatccacagtatgcaaaatcagcaggtctgtcgatttttcctccaaggaaaatgccatttcggcaacagctgtaaaaatcttcatccatcaggcggcaacgccgctcagtcttccttcggcagtcagttccttctctcttgatctatgcttacctttgtctgctctctcttttggatcattctcccgggcatactctgaaagaccgttgcatgatccctttcttctgtgatgactcacaggctctggctggaacagtgctccatccaatgggaggtttgggacgtcctcaaataatgcagtccctggaaagtttactccgtcttcgaagagagatccattgaaatacacgtttgtctcgatcatctctcgataatgttctttctcaatttgaggacagtaggctaaaggctgtgctagcttgttgctgacgaggcttcactctatgattgggcttattctccgcatcaaaatggatgcttgaacaggacggaaaacctgatgactgatttagtgcaagagcaaccgatctggaagctatcgtcctacggaccgacggcttatccaaacttgatcgccaaccaagatctaagcttcgaagagcttcggttcaaatttctcgagtccggtggaaaccaacaggcatatgttggtcttgtctcttcattcctatgggatctttgttgtctctaatgctcaaccataccttattaccgtctttctctcttctatccctacgatattcttgttttatcggtttataggctcaacaagaagctcaattgataaacagtgccgaaaatcaattgcagcaagctcgatcgaactcacaaagtgcggttcaacacatgaatactctggcttcgtcttcccagcctgctcctgcgacaagcgcattcggtgtatccaccggtgcgaacagtgcttttgggagtgcgctcaacaaacccagcgccttcggatcttcaacagcaattgggtcatttggaggtggaggtaacccaggaccatttggatcgtctgccagtggaggaggagctttcggatccggctcatcaagcgcattcgggaaaagttcgttcggtcaattctcagcacctgcttttggcagttcggcaaatacatcctcctcatcaccatttggcggaaccccagcaaattcgacgtcagcttttggatcggccgtcaaaccttctccatttggtgcgcctacttctagcccatctcctttcggagcaaccgtaggatctcccagctcagcattcggcgctccatccgctttcggagcagccaaaccgtctccgtttggtggatcaacgagccaaccttccgcttttggctcctccgctgctccatccgcttttggtgccccagcctctacatctgcctttggatcttcgggagcaacgtcaggaacagctgcttctccttctgcatttggttcggcgtcgaccaccaggcctgccggctcagctttcggtgctcctagcgctttcggagcttcctccggcggctttggagcgtttggttcaaacccacccggtggagcgacgtcaacagccggaccatccaccggatttggcgcgtttagtagtagtaacccatccggatcatcgacgacaacgtcagcttttggatcgacaaccgccgggtctgctttcggtcaaccatccgcttttgggtcgacggctaatctgggatctgcgttcggtcagccggctgcatttggaaagccatccgcttttggagctactgcaagtaacatcggtattgcgtctggtgggtctgctttcgcgcagccttctgtcggaggagcatttgggcaaccgtctgctttcggtcagacggctgctcaaccgccatcaacatcaacatcaataccaacaacggcatctgcatttggccaagcttcagccttcggtcaatcaagttcaagctcggcgttcggtaatccttcaagtccggcggtcgttcctgccgctccgacgagtgctttcggtcaatcaagctcgagcaccgtaggatcagcgtctggccaaccatcatccaccggtttctctgctttcggctcggccttacctgccaactcttcggaactttccgcgacaacggcggctccgacttcttcggcttttggtcaaccctccgcttttggaacaatgtctcaaccatctgcggcctttccgaatactgcctcttcaggagctttcggctcatcacccggacttggagccggagctggaactgggtttggatctggatctggatctggacgatcgacaacgatttcaagagaagatgatccatttgggtcatcgattagccctctggaaggtctccctgaagcatggcgtcttgccttcgaagcagatgaattcgagtttggtcaaattccagcggttccacctccgctgagtgttagataattgctttgataagaggaattacattagtcggtcgagggtttcggtgtatattttgactgtatatttgcatgaaacgttatttttttctctttgaagcagctaaacaagtttgtagcctctagatggggaacaatggacagaaaggcgaatgtgaaatccaagagttgatttgagacatcctgctagcgttaaccgagagatcgactttttttttgaatgttgaacagacaaaacatacgtaatacagcgaatgaagtatgcgcgagaagggacggaacagaagaaacaaggacaaggctacgctcaatacaagggaaatatagagaaagagggaagaagagcccaagaagagaaagaagcagtggcaaattctatcgttccgagaggaaagaacaagccagggtattactgtttttcaaagtcgctctgatgatctactcttgctcgtggaagacagtgaccggtacccaagaatcaccgcagaccttgaatctatcagggagggaggacaatttgtcgacatcctcctgctcaaggaccaagccgtcaatgtcaaagtttccctcaattcgactgggagtaacactcttagggatgaccgagaatcccttctgaagaccccaagcgaggaggaccttctgggtcgaagtcttgtatttatcggcaatggaagcaagagtcttatccttggctaaaggagagtcggtcgatccgaggcaggagtaggcggtgttgtgaatgcccttctcgttacagaaagcgacgagcttcggggtagggttgttagggtgaagctcaatttgattgacggcctaccaagggaggaagtattgagaaaattgagtaaaaagactcaaagatacatttgcaatcgcaggtaggaaagatgaaaggaagatactaacaggggtaaccttgacagtagggaggagcttgttgagactggtgatgtcaaagttggagataccaatgtttcgaactcgcttgtctccggcgttgtaaatctcttccatcaccttccaggtatcaacaaagttccagtcgtcgtaaaccttattgggcacatcagcgggatcggaagacacaggccaatctttgagaagaaagacgagataggatgaagatcagtcgaaatacacaacacctcagttggagaaggacttacgcataagccagagatcaatatagtctgtgtcaagcttcttcaaagagtcggcaagggcatcgtgcgctcgcttgtgatgagggttgtcaagcttggtggtgatccaaatctcctctcgggggactccagagtccttaatgccttgtcctacctcggcctcgttgcctaaaatcaagaaacccaaagaaacggccatatagatacgataaatccttaggaaggagtggaagagggaaatgtgtatatgcgctactgaacgaaccataagcggcagcggtatcaatgtgtctatagccagccttaagggcggcggcaacagcctttcggacttcgttgggtccagactgccacgtaccgctagaagagaacgagattggagaagatcagccagacgatcgctcgcttcgtgagtagaagggaagagacacgcacagtccgaaagcaggaattttatcaccagtgttgagggtgaaggtctttctgcaagagcgaggggagtgtgaaatgatgatatcagctcgatagaacccgatccaatgtccttatgcatcgtattctaggaagctgatctgtctggtgagaagctaacgacttacttggtccagtttccgtcagacatctttgtcgagaagtttctagtgatcgttcgggtggcggtgggggagatgattcgatgaagaatggtgggcaagaagactggtattggatggggaaggagaagaagcaaaattgaaaaacgagatggattctaggaacaggtttatataatccgaggcccgtgcggtggagtgggagatggatcgtgcggagaaagtgtccatcggacgaaccgggtcaaaatgggcagcaaaaggtaaaaaggctgatgacgctttgagctaccggctaagtccttggggcctcgagtcagcctgacaagcatctcggtgaatccgtttccccgccttcttgcctctttgggagctttctccgtcattatatccggcttatgtaagaggttttgtctgtccgcggttgcccttgatatccatcgtgtctgtattcgctcggcatgcttgtccagcttagtgatattaacgatgttcacacatgatcatacgtatttcacatcgcaacttgatgtataattcccgcaaggtgaggaaaacagtatgaattcattgaaattcacagcaaacacaactagaccgacatttaatcaacctcatggaatatcaaatgcgagacgaggcaggctttacttccagatatcggcctagttcagtgtgagaaaggcaaatcagtgaagagaaaatactccacaaggtaaaagtgaaaaactcgaaaccaggacatacgaagaaatcgtccttaggagccgtagctgaaggcttagccgaagatgaagcccagatgtcttgagtggagctagccggtacaggagtagcgtcccagatctggttcaaaaaaagtgtcgagatttggtcgttagtgggtatttactaaatatgctgcttccgcggtttttttcgaaagaggattcgacaaacttacgctcgaagacgccgcgccagtacccattccatgactttggaactctccccaatttgatccgccgttcgattgccgaggctgctgctgttgttgaggaggaggaaccggtcgggatactggttgcccccacacatcctgccctccccctccaagactcagtcctccaaagctgctcgggagaccacctgtcccagtcgtcgccgtcgtttgttgaggctgctgccaaccatttccagtccctcctcctgtatatgtggacagaggcgcggatgtggtagatgatgatgaagccgagaacagagacatgatgccttcaatcccactcttcttttgttcacttggtttgttcgccgcgccaccaaaagaagacgaagtattcgtcggtgtaggcgcgtgaaagtcgagatcaaacagagaagccgaaacgatgggtgcagctgactgaggtacagagccaagagcagaggcagaagtaggagcagaggcggatgtaggggcaggtacaagtgcaggtacagttgtaggtgcaagtgctgaaggtggagcagtagcagctgaagataacactggcacctgtctagagaggagagggtgggctatattggaccggaccgatgtcggaggagctctgacttgaggttgagtctctgccagaggtgcaggtgtagcggccaaatctggagcgtgttcggtctggagcaaaatctgaggatccgaaggaacagggccagagattgcccatcgcctcgattcatactttgatctgatgaatgactcaattttactgttgtcatcatccaacgacacgtctgtatcagtccagggtatttttataatcctaaagcacacgatcaaaaggattgcaaagaacaagaactacatactgctcaggaggaatatgtcctggtttgagatgggcttcccagtaaagattcgcaagcttgttaccccatctttgaatattcttcaaatcaaatgcaacaaccaacacccacatagaatggaaacgacaatgagcccaagtcaagacaaagtatttctttgcgacacacatagcgtgctccctgtgtattataacaaacatactcacgtccatttgctccggtgtccagatgtctagatctacagacttgactgagagccccaagttttgtaagtgaagaagacgatgagttcacacaataataagcaggcttggtagagtgaagacagcaaacagagagacggcaacagctccggaagacagacctttggagatatgggtgcccatgcttcgatgaattcctgaacatcggatgcacatgaagcagcctaagttccaagatgcccaacgagcatctgatttgatcccaaaacaacagccattcgacgagagacctcgcctccagatgagctcttcaaatggaaaaacacaagacgaagggtccagataaacaccagaagtaaaagatggcctctgaacggaccatttctcctgcagtcagcacactgcttgttgtccggatgcttaacaagttcccggagaacttttgcgtttcggtctgtcgtagctttatcctgacgagacatgtgagtgaacacgaagagaaacagaa

SEQ ID NO: 1215 - DNA, 23925 bp, Xanthophyllomyces dendrorhous
ctttatctcttctcgttttggctctatcgttcctcgttggatattgtaccatttgtttctttcgcttcttaatttttaacgtaattcattcattctttctctttctgataaagatcgaagcggttaactcaagatagagccttggactgtgagcgagatattcggtgaatatccgaatgagtctgaccaacccagagatgaatagaaagctatattcatcagagtttactgctgactaagcacggtgtatgttcacacaagcacgccagggtagccaggtcaaaagccaagaaagcgaatatggagtcgataaggctgaagaatgtggatctggctaatgtacctttctatgtgggtatatgctaatggatccgtgcctaatgtttcctcacttgtttacttatctctgtgtttcttctacaagtcagaagatagataatacttagtccaaaacagattatgatcatcaataaatctcacgaaggcaacttgaacataaacaggaagagtgcttacgcccacgatatcgacttggatccaacctcggtacagaacatgttggaagtcaaaaatcgtgataggtaagactgacagccaagaagctggtcatgtgcatatataacagcaaatctaagcagacggtgcgtagagagccttctgatcatttttattttctttgagatatatatatataactttgaatcatattcaatacaaaaccgagttcggatgccaatacaatagcaacaaaattcgtaagagatggagagttgcgtatggtgagaacgctatgtcgggcgactccttcagaaccccgacgaaattaacattggccagtgttcggataccaagcgtgtaaagggagagtcgtgaagtgtgctagctcagattcgatgaggaatcgaagagtatcaagggaaaaatgaacaacacgttttaacaatgcaacaaatttcttcgacacgaagattgtttttgaaaatgaaatgaaagtgcaagctgcgatgaacgtttcagaaacataaaccacgaatgatgagtgaagtcagatattattcaacagagtagcgcctgtgagaatcagggaacactaagaaagaattttaagtgaagaaaatcacatccatttttactcctcaggaggatgtcaaaatcagagcgagtgagtagacggatatggatgcgaacatccgtgttcgatcttgtcccgaacattctgtttagacaaactatgatcagttgcttcatctgtaaagaagagcgccgatttgtgtaacaaagggatcagaatgaacttcgtattgacgacctctgcgccatatgaacagaacccttctcgatttttatgagattgctctctctcttgctgacctgagactgaacgagtcttgtttgtatcacccaatccattagtagcacccaatctcaatcgcagaatatccaagaaagcttggggtcaatgatctaatatgaggggcaatcagcacgaagacagatacactgatatgcctcattcattgaatgatggtcagcccgcgcttcggggcgtgcgcctctcaacgagatgtatttcaatgagtctgcgaacgcgttagagattttgctaaagaagatcaaacgggatagaaaagtttgggaaaacccaaaaaaatcggaacagaacagatccaacggtttcagaaaaagggccgcccgtcatttgaactttttgacacattgcatgttcttcgatcgggacggaattcgatgaatgatcgagtacaacgtggcatttcaaacacgttggatgttgttttccgaactagttagctatactgttctgctcacaaaacgctcgaacggatacatactcgtctcgtacagaatatgtacaagagagacggtaataattgagatgaacgacgacgtgggtgttggactgaggttagacaggtacttcaagacgaatgcgactgacgaaaccgaatggcatgagaagactctgaatatgacatgagccagcactatccccgggtttggctctagtcctaacctagaccatacttttggaatcaaacaaagaggacgttcgacctgggcaggacatcatgaatgcgcgaataagatgagattgagctctattatttgatcgtaaggaatgagactcttggatgacgtcggggtcgttaaggacgatgttgatggtagtggcgatggtcactaacggagatttgacctcagccttgtttataaatgacgtccttctgctatggtcatcttatcaaatggacaaatggaggtttgaaagatgttttccctttttttagcaaagcagataaaggatagggtcagtcgccggaggcgtgggttagtttacttttagcttcgattttttcatgttccgagactgcggtgctgcgaacacaggtccacgcggcctggttttgcggaacaattagttaggaaaatttctcctttcttaatcaggatcattgcatttcttaatttaccagagcttgaaaaagtaaaaatcaccattggcttaattaattttatctttttttcatatcatcacccacgagttaaacatcagatttactggataaacatctatcgtacctaaaacaatgctgtcgtcttgaggggacgatcccgttctcccgtccttctcacaaacatgctcaaacctctccctccatacatacaaatatgcatacaacattcgccctgggacgggtctctggaaagcacttcgtcaattcagccaaatttaggtatttaatgtagccttcatctaccacacgcattcctctgcatcttgtggccatcttccggtaggtcactgtgagtagagagatcttctgatctgtgattcaatgaattatcctgttcaagaaagatttacagcaagaccgcgcaggacagcaagcaggatggattggaaaagacaataggaggaagtcgtaacagtagttgtagagagaagaagctaggatgagtttgattgttctgcgatcaagagaataaagaggccattagctttcttcagtaattgtataatcataggattgaaaaggcccgaaagcccttgcgacccctactgaaacaaaaagaagaaatagcaaagcgtgaatcagcatacggtcggttttgatctcaacgaaacagatccctctgctgatgacaatggatatgctggatctacttgagcttgagcttgttgaatttgttgagtttgtggcgcagcctcaattcttcttatcctcactgttatttccgagaggacgcgggttgttggttcgggtttgatcaactagtcattcgatgaggagtgtgtgaatgcatctgattttcctcgcatgtcctccaaactgattgttaaattgatacatcatcatatgattgaagagagatacaaatgagctcgagcaagtggtcagtaccttggacttctagaaaacaggagtctggtacgtggagataggttgaaaaactctaaatatggctgaagaccgcccgttttgcttatggtctggaaacgtaagcgccagataaagaacttaatgcatttgatcatgcaattatatatcttcttctcttttgacaacatgtgcccaattggaaaacgacataaagactgggcgggtgagtcgatctctggtggtatattccccgatggatgacaaggacgatggatagagagcagaaggcaaggcaaagatcgacagatatactagcccagatcatctctttccgtcttttgcccggaagtcgtagttaacttaaggtataactttttatatcctccgctctgttcctgaccctgatcctggccggcgatcccctggcctaaatcatttttcttctcacctatcgcctctccctctccttcagggctgtctggcggtgatcttccgcttcgatccggttttgtggtgcacctcaaccgagagaaccccttccatcctgcaatctgaccaggagcaccccccatttgaatcctccaccccatctcttttctctccctcggggctctttttctcttctccttctttccacccttcctccttctttcctctctccttcgtcattctttctttcgtccctcttttcttcctccttccacttcactctccaaccattacacgattgaaaacagagagaaagaatgggaaatcaatccatgtcattcgaactatgtcgccgaaactttgaacaacgtctaccaggagtggctgtgatattgtcttcagcatttggtacgtatactgtcttccctccatcgagagccgaagcatcatctgttctaatgccttgtcggctgacaatcgtccgtggagcgcgcgtttctactttccctattcatctcatcctctagaacctctttctactatggatggttcaacctgtcgatccgatcatagttcaccccgttacttcccatacagtcttccaagtgcgtggccacattctatctcgatctttgtacccactgaactaacccagagattcactcacttgacaaccaagcacatctagggcctccaagaaaaccgtgtatcgatcttccgccagaacagaatccaccgagagaatcatcttatagccattgtactgggtcctttgtgtcggcaggtgcgcagggcttcgaaccgagtggtcttcggcatcaacacggtgaattccacagacagagctcctcatgctatcaggtccaacctccttggcggccagatgttcctggtcctaggcttgaagttctcaacaacattgagccacgcgaaggtagtcaactcaaacttcataaacagtggccagaacctcagcagaaacagcacgcagatgaaatgcgtgttggcttgcaacgaattgagcctcacagatcgaacgacgaacggctcaaaacaacattgaacgatggtactgaccgatcgtgcttatcttatatctctctgagcaaaggctctgtccctctcttttctaatggcccaacgcctttccgagacgcccttcaaacttctatcccagctaccgaatccacgccatgggtacactctcagcttccacaacagagtccgaaatactggcaagattcccatcctaatccacatcgatatcagcccggttcaagatggcattttagtggttcgatcaatcagaccaaccgtactgcatttgatcattctgatacctacccttcccctcgacagcaactgtcagcattccccccctcaatctctccaccatactctgcagttaggtctgctcttcctacgatcggtcacgtaccgttgactcctcatgagagcacaccagatccgctaccagaggagaaggtcacagaaacatatccctcgcctccgtcgactgatcgttcctttaggcaaatctcgtcctttgcgcctctacccctctctttagaggaccttgtcgacccagcacctgtcaagagcgatactgtggatgatgatgttcggatgtcagggcagatcctcgttggcttggccaaaggaagaacgccggtattgggcttgggagtgggatctgattgcccgccaacgaagatgagcagcgtaacagtgagtgcagatgagaccttgaacgaggccgaagcggctggtgaaagggacgagtcggaggacggttcagagtcaaacgacgagattgttcgttcattccattaattaataggatttgtagacttggttactaactacccacctgtgcgtctggttcttctgtctagataccaacaactcgaacgccatcccctatgcccgtctatcggtcagcagaggcaactctgacccagttgaagcggacaaaaaaacgggcaagcacgttgcccgtctcagcaaccagtacagcgacagaacctagcttccgacgatcttggaccaggggccttccttctgcgtccgggtctgtatctacacctgtcaccaagacggcttcttcatctcagatcccgatagaacctacagctgtcacttcttcaggctctgtaggaacgagttcttcaggctctgtaggaacgagtgatagatcgaccaaatctgttactccaaagaattcgaagcggaggacgaagaagccaaagacgaaggtctcgatggagaattatgaccctgaacatcctcggccgtttggatgtgatatgtgcctcgagaggttcctgagaaaggttgttatatttcagaaacttgtccagatatgtttctgttctgtttaataggtctgacaatgaacttgtgtttttctcttcactttcagaatgactatgtgcgacaccagcgcatccatagtggcgacaagccctatgtttgtcccatctgctcaacgggtttcatgagaaagtaggttcagactcgacttgtactcttcatcttatgcttctagtttctacagaatttatccatatggtggtgggtggctaactgtttgataccttgccaatctgctgatgcttagtgacgcccttcttcggcatatcgaccatacatccgtgtgcgcggctcaggcaccctctcgcgaggagtatgtctttggtttgggtggtctgaaaagacgaaagtctttctcgatctcgactgcttcagaatcttcccatgcacgaaaccacaagaaacgaaaggtttaaatggagtatacgtatgtatctacttcaagaggattttctcttggtttatcttgtcttatttttaaatgtcttgtcttgtcttgtcttttcttttctttcctcttcttctgtatctcttctctttatcttttgttcttttcaatcagggattttcgtatacataaggaaggttttggctttttcagttttcatttccatctttcatgatctctcttcttttcacttttgatctgttgcttctctctcagttcattctggcttctatcgtgctcaatgtgtatctctttcaacctcttatcgagaggaaatctgtccatgatatcgtatatcatcctctttcatctttctattgttgcatatctcatcgtgtctcttgtccatcgttatatacctctactatgccctttcattttactttctgcatttactttctgcctcctttctaatgctttctgctgtatatcttgtttgctatgttcgagaggcacgaatgaagtgaaagaatattgaatttcgtatcggtgaagagaaggcgcgctgcgtccaagactgaggatgattttgagttgtcggttgtggaaatcattttcgcttgacagtcgttctttctaacccgagacacgctgtaaccgtctcggatagatttgatcctgacgcagccgctgtttgaacgttctcatactctgtccattatccttatttttccttatatgttctgagaagagggaagagatgtctcggttgagtcggtatctattttccttgctttctacccggacctttcaggtaaacttgactggaaactataaaacacctaaggtgactaaccgtcgtatatacctgatcttaaactgagagtcctgccagacaatctagctccttccaacgtacgtctcatctaacatggtaagcaaattcatacatgcatcttctgtctcccctttgtattagatggcctaaactaatcaagttgaaatttcaccaatcgatttggactgtctcaatcgccttgactcgatatagtcaaagatcaaagatcttcaacttgatttttgcttcgggactaccaaaatcctctttccaatctctcgtcagccctctgccccaacctcgtcatcttctgtggttcgattggaacagtcttactgactttggtctcgaccccttcattcctttcaactcttccatccaacctagctaactccacattaagtcaacttcatcaaggtctccttaatccactccaatgtgcggacctaccatacggtatcccgaaaaacaaggatgatttcaggatatgtaaaagacaagaagtcgaggatggtgttttcaagttttttccggtaaagaacgggaagagctcggttgttggaagtgtttttgattccaagaccaggtgagtttcttctattgacctcttaggatgcatagtaatcgtttctgatcggtgtcgctgttgtccgtcttctagagaaaacctgtacttagtgagttctcacgcagagattgaggccatcgctctcgacgcttgtctctgactgaacgcctctgggtcggttttcatgtgttgtgagtggacaacagcaatttaaggcgaacggtgtctggcagcccatctcggtgacggtacctacgatagaagacacggatgatccaccagaaccctttgaggatgaagtactgagcgactaaatcaaccttttcaaacttatccttctcttcctccagctgatcctataaaaggtgtatcaaacgtttatctctgtatgttcgtagtattctttacaagaagatctctgcgactagcctctgcgacatttagcaaatcctcggttgattgttgatcgagacgagcaattcgctcgacagaacagcagacaagagagaaggatatatgccgaagattctcttacatgttttttcggactgcttacctgatcggttatctcccgaattgctgtctttagtaactacaaccttgatcctcatatccttcgaccttcaaatcgttcttcgctcctcatctactcagaagcagacatctcttgttgaatctatgcatcagtgcgaaagagaagaaacgaagattggtgtggagaggtgacgagaggccttgcgatccagtgttccttattctcccgcgtagcgtgtgcattctatatggtggttatgcgctagataaagcagagaatagaataacgccagaagatatagttgggtatattaaattggctaatggcaaggatatattcaatatccagtcctctatattcacttgtcgacataagcttgaactaggctggagaagtagtataggcatgattgtctctgtgcatgataaataacaaacctgcgctccatcgttctctggtatttttcttttgtctatttcttttttcgttttttttttttacctaacatcagaagaagcaatagtcgatcgaaaggacgatttgccattcttagcgaacataattcgagcctggttgctagtccatttatgtcagcgaaaccgagttgatacttgattctgaaaatacgaaaacagagtgctgagactcagcgagataacagaattgactgccgataaacttgctcgtcatttctgtgagcaaacagattagatgcagacgttcagacagcaactgcaaatgattcaaatttgggccaggactttgctcgaaggtaactagaaatgagaacacgatgtacatgaattgcatatttttaaatgaccctctccgctccagcaggaatgatctatcgttccgaccaaccaagaagacaaaagaaggaagatccaatagtgtgtcagtgaaggtcttgatatgaaacaaataaacagaaaacacaaagaggaggaagtgaacaagaataagattttacctggttcctgccaggcgaaagagtaaccctcctgagcttgtcggccaactttgccttttccttcgcccttctggccgccttaatctctgacttagtcggcccatgcttgtctctctgccgctgctcgtacgccaactgattagccttcatcctctcgaccgatagctcggcatacctcctccttgctgtcaacttgacctcctgctccgtcattcgtcgacccactcggggttccaggcctagtcggactcgggtttctctcaaacgccaagcctcaacagcctggttgatcatctcttgctcctcaaccaatcgggcagcaactcgggccttcatctccttctcaagcttcgccctggcgtaagggttggcgagctccttgccaacatagatttccatcggcaaattgttcaacggattcttgagatagagatccggaacgaaattcgacgtagccgagatgttggtcaagtcttcacgagagggaggtgaccacgtcttggcggcgaccacagacgccggcgtatcgacataggtgactggatggagcagagaggtgagaaagagaccgagatgaggtggatgtaccctctcaaacaaggaaaagtaaaaaaacataactcactcttggcgggctcaggtacctttacctccggccacggcacattgaactttcttaagaactgcggctttaatctggggaatgtcttgagggctactcgcctgaaagtccacttcctgggcagaccgtaagcctccttttccagatcttcaggattctcccagaagtgcactcgatcctttctgtcaggacccatgacaccatatctgcctattcggctagcgaatattctgcaagtagtcatgatagtaggaacgtggtagtcctgtcagaaacgaacttttacatcaattgttgggatttcgttgaggaaggagtcttactgtttaggcagccccgggatgtgcacttgcttctctccgttagggccttcgattgtctcgggagtcacaccattctgtctggcgagcggcaaaaaggtttcggtagggatcaggagctgaaggttcgagcagttgatgctgatttgaacttttcgcgttctctcgaagggaggatgaccagcaggaggttgttggagaggatttattggaagcgggttcgaccgatcatgctatcgtgtagaaaaatccccataaaaagagagaacaaagcaccagttgacttagatcgttgatacaagccgatcgagatggacaacagtaaactattgagaattttgacgtacctcgagtccctccaagaagacccgattgttcttcttctcgaaggaggcaatcgtccaaatcttgaattctctacgcggcctgataattccatcctcggtaacgacttctgctgtagaagaatcatagtcctcatacagcattcgaggagtaccgtgtcggattcgaaccttatcaccaacggtgaagttccagaacatgactcgattggtgggatgagtccatttggcaacatgtcgtcgtcccgcctagaagagattgaggggtgaatattgagaaaagaaaggtacgacaaaagggagacaaggaatgatcagcatttgggcatggaaaagtttgatgggtcttctcacacaacaaacaaacaaagagaagaaatcgacagagaagggcagggatagagcaaggaaaattatgtccagcggggtaaggaaagataaatattatagaccaaagtatgactatacaaaggcaaaccaaaaaaagaatagaggaaggagaaaggagaaaaaggaagaagaaatagcctcaccaaacgtttcctcatcttgtagaatgtgttggacaacatccaagggaactgagtctcgagttgtctcctgtttgctctgatcaacttaataagcttgttgttcttgatggtgctatccctgacatttggaagctgcttcgcgatcacagggtggctccgcaaaggctgcgagaagccatgcttccgatggatttttgtccttcggaagatatattcggcaaagaaccggggagagtgaatgaacttgaacctcatcgcacagagacagagtggagagtgtgtgtgtgcctaagtcttgctggtcgtcgttgtgggaggttgcaaagaaggcaaaggaggtgaagaaagtgaaagcgaaagcgttctgcgtggtcgtggttacaggcacgtgtaacaatgtgatctctaatccttctctcctcttcaaaggtatatggttggaaaacattacatagagaacggtcaagaaataaaaggcaaacgagcacacgcagatgagaacacagagagatacagctaataacgaacaaaaaaaacaaaaaaaaaagagaaagagaaaagagaagagaaaatcttcaccactcgctcaccaacgtgcccaggccgaggcataactaacgctactatctgacgggttgaggcaagccgaactctgtgcatagcgcacaaacgtgatctctggctgaatatctgaagatatttgtagctctgccatcgctcctagcagtactccgattgggtgacggccgcagattgtatttttggtcctcttgagataccaagcaaagtctcgatggacattgctcatcctcccttcaccttctagaatgtttatcgcctctttatcaagagcctcgattgactgataaatcggtcgatccgggttcaaagctctatgtgaggaaagcgagataaactcgtccgatgaagcggagggggtgtagtgagtgtaacgaaagcgagagccccttctcagaaagataaccattcgataccacacattggtctaaagatcagctcgaggtcgtcacaacttccttctgtattagttgttcctatcagaagcgcacttatagcttaccaatgacagaaatccgacgagactactgtgaatgtctccggatcattgatatctgcccggttcagagaaacaatagcgaatgatgcatcttgccattagccagacataaccatctgtctttctgcagaactggaggagaatataaacgcacatggcgcaaggatctttccaaatcgattctcttccgatagcgagattgaccctaccagtacggggacgattttgatggattgacttatgaatcaataaaatcaaagtaaccaatcaacatgactgaatcagcagttggagcgatcaaggcgaacatgataaagtatagagaaagaaacgtgaaagatgttccgtactcttgaaagaccttccggacaaagggaagatgcatttcaatcgaatgctcatcctcatcctgatcccttgtcatttcctcgaattctccggtctgtttgagctgttggataactatgccaacagatagtacatacacagtactcccatcagctttccaggcttccaaggcggatatatctccttccttccacataccatctaaatctaattctagagaaccgactggagtctcgtacgtcttacatctagataacgcgcaggaagttaagtagtagtgatgagatggacctagaataaacactcgtttgctatctcaacgagaagattggttgtgacgtttagtggtctcatcatgattctactgtattaaagggaaaccgatgagcatacatgccggtggtatcaatcgaccggtaggcccaaccagcctatacatactcatcagcaagacagtatcatacatcagattaaaatgagatgagatgtcagagtaattgtttgcgaacaagggcttgactgtgatggaacgacaggtctgactgactgtagggcccgaatatgagaacccagcatgactggtattttgccccatgactcatcgtcagtctcatcactcatatcttttgatcagcttctcgagggaagggagacatcaaggaaacaaaaaggacaccaacggagcaatcaccgctttacagcctttaacaggaggttcaaacaactctcctctatcgcctacggtcgacgatgaaggaacatttcccaaaaatccatcaagttctcttgataacgccgaacctaagaagagttcatcattgtcagtatatttatatgttatcgacaagcaagtccgagcagggtgagttagatgaaaatcctgttctcataaagcagatagagacacagaagatagcaggggaagaaggcggctgtaccagactttgtataccaatctccagcatgtgaggcctgtcgagtggacattgcttctagttttcagagttttttctgtgtatcttatttcccaggcgtatgagtttgacggatgatattcgcttgttgtcaagatatgttattttaagttatatgggttgagacggcaagaaatgagatgaaacgggatgaaatggaagaagatgaggtcgcgcgcaaattacccgtcgtcgtcatcatcgttgtccttcatatttgctctattcgttacttgcttcgcactctctattgccgcctattgaagcaagtatttactccttttctttacagggacagtcacaaagtgagaaatgaatatgtaggatgttttcactcggattgcttatccatcgttgcgatgaatgaacagaggaacgagaagcaggatgaaacgaatgatcatacaatcgaactataaagtgggcaagaggaaaataaagccacctaggtctactctactcaatcatgaaggaagaaagggaaaagagaaagatgagaaatgtatgaagaggaagataaatggaagggagatggggtaaagacagaaggatgaatggagagaggagaggaagaagatcatgatttttattgaaaaactttttagatgtcggtcttctatgctttacttgccctttcctcccaacttggctttctcgatagcagctgtaggggaaaacccggagagtgtgtcagtatgtttgatagaatatggaaaccacgaaagaacgagaagagaagaaaggacgaaccctgcgatcgcttggcaagcatgttcttgtagtcaacaatggtcattccctgcttggtcaagttgatgatatccttatccttaacctcccaaatctcctcggcgacctgggagataagtcggaagtcgtgcgagacaatgacaacacctccagagaagtgcttgatggcgtcggccaaagcatcaatcgactccatatccaagtggttcgtaggctcatcgagaagaatgaccgaagggtactccatagccaactgggaaaagacaactcggtttcggagaccatcagagagctggccgataggagacgtttgatgggctccagagagaccgaatcgaccgagctgggatcgccagaactggatgtccttatctgggaacttctggtggaacaaagatccaaagtgctccaaaggagacaggtcgtaaggaagctgatcggcagagtgctgagagtacttggctaacttgagctgggtgtgtcgaccgatggtaccctctaccggagagagctcaccggtgatcatgttcaacaaagtagactttccggttccgttgtctccgacgatagcgactcgggagtccatatcaataccgaaagagagatccttgtagaggtagtccttcgactttccggagtacgagaaagcgacgtcggagaaagcgatgataggcggcggcaacttggagacatcctcaaacttgaacgagatctgcttgggcttggcaacctcctcaatcaatccagcggcctccatcttgtcgataatctaaaaagagaaacaaaggcgataggaaaagatgtggcacgatgagtggtggttcgtttcgtgcagctatgagaggaccactgaccttctgcttggacttggcctgcttgaccaagtttgcataggtaccagcggaagcactgagaaaggatggcggttgaaagcgttggtctcagagggcagccgaacgcttgatcaaacaagcacaaaaaagaagaggacgtacatgaacttcttgatgtgagcaatttcctcctgttgcttggcgtaagccttcatctggttggtctcgttctcggccttggttcggacgtaggtggagtagttacctccgtagtagatgagcttcttctggaaagtgaggtccatgatgttggtgcagacagagtccatgaaatcttgcgagtgggaggtctgaaaggaacaaagggatgaggaaagagagaaaggggtcagcgatgcgcttcgacaccagtgcagtggaatcgacaggtttgacgtacgaagataagaatgtggttgtaagtcgaaaggtaagcctcaagccagacgacggctccgagatccaaatgggatgtcggctcatcgagcaacaacaagtggggcttgatgaacaatgctcgggccaaagcgactcgcattcgccaacctccggacatgtccttggtgggcttagccatcatggcctgggtgaaaccaagaccgtggagaatggctccggcctttgcctcgaacatagaggggtccatctcctcgatctgctcgtagatagcctcgagggcgagctcatcgacggagtcctcagtcgacatatcctcggcaagcttctcaagtcgctcgaccttggccttagcagaggcaatgatgtagtcaagagcgttggtatcggaaggctcgacggctcctcgaacaaggtagatctaatcaaaattacccaagaatccgaccgcaacaggacaggatagaataaatgttgggtttagattcgaatgtctcgcagatagaaaaaggtacagaggaaaagaggaaaagagctaacatcaatgtgatcagggatctcgatatcccgctcagcgatggattgaaggaaagtggactatgaaaccggaaaaacgatggacaggacaaggatcagcaaaagaacaagacacattagttgtatggatgatcggctaacctttccagatccgttctctcccaagagaccgtatctgtatggtgggatgtttgaatattaggatttattgtaaatatcatgcatttttagatgataaaatgacctaccgctggccgtagctaaagaagataaacgaagaacaagacaggtcagaacagtgatttcagagctcattgttttaacgctcaggtagcagaggagaaacatacttgagggtaacctcggcattctcaatcaagacacgtccgtggaaggagagtgaataagagtcgattcggatatcacgacccttggcgtcagacaccaacacaccagtggcggatcggtcggtggcagcggagagcttggccatggacatggccaaatcctcggtagaaccgttggccgaaagcgaggtgagaggagtgctggcggcggtagaggtggtggtagaagatcccttcttagaggcgcccttagcggcctttatagtgtggatgtgtttcagatagagagaggcaagaggggtggaataaataacatttgatgaggggaatgggttgatagagagaaagcaaacgcagatgaatcgattggaggaacgtgcgatcagctcgagtgacctaagattcgcttgattttgcaccaaacgagctggagaacaatatccagaaaagcctaagctcatctggcatgaaatagtgatcatcttaccttctccgcgagtcgctacagaggacgagacgttcgagataggaaaaaataaaggaaagaaggagcataaagtgattagccaccgaagtatcttcttcggttgtcgccatacgatcctgctttcctctctatcaagacgaaccttagccttagaagcagaaagaggagccattatgggttacttggatatgtaaacctgtggaaagagaggggaaaagaaagaaagagaggagaactgaaagaccaaagggtgacttggagttggtcgtttgtaggtgttctctttttttttttctctgatgatgttggggaaaaaaatgcgtggttacgtaatcgagttctggttagtgttagggttgggtatgtatgaaatcatggtccgaacgacaagagagagagaccatatgcgcagagacaagtagcggaacacgtacaagatgtcacttgaggtaggtagacacatgggaacgctaacaaccacattttataacccatgttgttgacgctttgaactgatcggtcgggtgattgatacactctgtttgcagcttcctccttgtcggtgttggtccaagtcactctcttgagcgagtccttgatcagacagcttatggtgtaaagtatcagacggcggctacaacgatgttgaatgaagaccatagaacctttctaactttctccaagagatagtgtccgagttctttagtacatgagggatcgatcagttgtataacagatccatgctctcgagcgcttgtgtttgaacctttcagccatcaacgcctctttccaggagaaacttgaggtcttcaaaaagactgcaccaactgatccagattgacttgattccactacgtatattaaaagatctgtgattacttgagacaatcttctcagaccagatgttcagatcgccaaagaaaacgctctaactcgctcaaggagcaagcaagacagttttcagagggtgagagaaagcgatcagatacgtcccacagccccgatgtcgtccgtcggctactctgcaagcaaagagcgtcaagagtcaatccacttcatcgacggcctgccttggttcgtgagaaccaagagcaaaagaccgcatgtcctccgtgaaggggtgtgggtggagtatcagcatctcgctttatgtggtgtagctagtgtaaactagcaagaccagttatatctctatagaaatgaatcctgcagagtctgtagagaggaagatgcgcgtcaaagcgagataaggttagctatcggagggagagtgcgaaaaccatagagggaggaaagtgaactaacgtggtcaatgaataaaaaccaagtctctgagcggcaacttgacgaaatttatacgctggaggaagcggaactcaagcgtcacgcacgtgacatgtttaaactccgagctctttataaacaccctcactaccgtcactctctctttttccaaccaagacacctccctttagagtcgcttggcctctatccttttcgcggagaaacaggtgctcgggaagtgtcagaccaatctagctttgggcctgacttgttcaggtcgccgtcctgggttcatactcttgcttgtgccacggacgattttttcgtcctcacactgggccagatgatatcttgtcgagacggaatattcttttctttttgcttcatctcttcttcattctcgactttcttctatcgctcttgatatatagaccttgtaaagctttgaacgctttaggatgcatttatgtctggattgtatgcaggattaatatgaaaataatttaaagtcacgtgacactcgcatcagtttctgcaatcacttcccgcgatcatcatctacatcatcagctagcactcaacatcaccatctgcaacacactgaaccggatgcacagaccattcaacattctctacctcggatccgatgtgttctctgtaggatgtctctctgctctcctgaaaaacaaacgtcagttgtcaaaaatgtcctcaacatcatgaacagtcattccaaaggctcactcttttctcatgaggatccctcctcacacaaacatgtacacgcccgtagacgtttggaataggatagatgtcgtcacccctccgatacaagcatacggaaaaagaaagcagaatctttatgaacgtgaatctatcctatactctcttgaagagaaaagacacatcgcctcgagactgacagatgtaccctttacggacaacgcctggggacagcacctctcatgaagtttgcaatgtcaaactctatagaggtaacgaccgttccagaagagggcatcagatcctggcttgtcagtcggttctcactttcttcgtttgcgtgcacctacttggctaaacaagactgcttcttctgaactgtttttgtaactatgatcatttactcatttccgcgtatgccttgtccgacagtagcttcctcaacactaccagacaccttcgccgacgaatattcttctgaccgcctcgttcggtcacattctaccttcatctcatctccaaatgtttgagtcaaatcgagccctcaacgtacacccatcgttgttaccgaaatatcgaggggcgtccccgattcagtacgcgctgatgaaccaggatgagatcactggggtctcaatccagaatctgagtgacagaggagcagacacaggagcactctacaaacaacaagaattcgtgcgtcattccgtttccttcaatcaggattgcgaaccagactgatgcagatcccgtccgtcacatcgtatgcgcgttgggtacaacctggggttcgtcaggctatcccaccaaactcaacattcgaaacgcttctatctccattggcgactttaggaggcgaactcttggttcagactctcgaaggactactagcaggaacggtaagtctgcgtgacttcctgttcccactatacttgtactaggcatacgtgttgaacaccacctctcgtcttttcttcaaagctggaatcgataccgcaaacagaagtcgggaagtcaagggctcggaagatctctcatgagctcggcgcgctcaattggaacaagctgaacgcgtccatggtttatgcccgataccgagcaatatctcatcaggtttgcctcttctatctattcatctgattgattaggatcattctcgagtgaacgagtttccctgaagagctctcttttccttacatttgaatctcgcagcaaagtcttcatacctttctccctcccgctcctcttaccccatcctcacattcctccgatgtcattctcacaggtctattcgatatatcgcttcctccggcccctgttcccttcccgacgaagtcaagtcaacaaccttcttccaaaactgaccttctcccaggccagacattctacagcaaagcacagaacgcactagtcgtacagacggtatccggtcaggtcctcgttggttccgttcacgtcgctaagagatcaaacagggtagatgccagacaggcttggttgggttggaaggatcaaggacgaatcaccgatggtttcgttcagtttgtaagcccacctggttcggaatgaaagaaaactcaagacaagaaaaaaacccatggtcaagtattgtcgaggagggtattcatgaatcacatatgtatacatgttctaacaggagaacaatcttatttccaaagtacacatccacccttgtgcaatgccttcgagactgctttgttatcctttctattgggcacaatcgctaacgccgttggataattctcgggctgttccatccactgaaagaaagaccaaacaagtaaaggggacgacaattgtgatcagcttgctctgataagcgcgagtacaagagtagtcggagatcaacattttacgagtgaagacgaacaagaaagtatttggacccggttgtctccaagtggtcgattgttttttgaagagtgttcatgtctgtcgtcttttgagttgggaacaaaaagagagagtgagcgcagaacggggcgcagataactctggatacacatccttcctgaacttacctggtatacgagctgatcaatcgattatagatcgagacaacaacggtcaacggtcaatcctacagaggctgcgaagaacaaagaaggaagaggcaaaaccaactttacgcatatttggcagatcctcaagataagtctgcacattcggttcatccttgaattgatgaaggaccgccgtagaagcgtgagaggcttgagccatgagtggaccaacaggccagcccaggttctttactggtcgtgtccatttgaaagggaaaacaagatgaagaaagaaacaacaccgagcgataaattgatccaacaagagtgaagaggagagcatgagaaacaagatcgttcgaggacgaatgaaagagtcgatggaagactggaatttttacctcgaagagatctcgacggagaataatctgcatcctcagcggtccagccggatgggattcagtgggcacaacaacagcggcagttgtggtgtcgactggaatagaagagctcatcatgcggcgtaagaatcgctgtgagaaaccctgtgtggtcgattgcatcgaagacgttgatggatagaatttccgtagcgacagaatctccttcaacgataaccgaccaaaaggccttttctatcctgaccatcatcacttcaaacgttcatatccacatcctctctcgctctgctttgtagatcaaagaaagctagtcagttagacgagctctcgccatgcggatctctttactcaaccggccgttattcaactcgttctttggcatcatggacatcaaacaaggtctgctcgcgattgttttctctcttcgcttctttacggatagagatttgatgccaaccattcatgatgtgatgcaaatctatcgcgtttcttctcttgggtcataggtgctctcttgatcgtcgctttcggggtacgtcctatccttgtctcttccgtcatcatcagcttgctcgtccaaagtcccaacgtcgcgtccttatcggctaacgtctcaatcctctgctctttcttgtaatcgcatcgaccatccttcactttttaaaacgtcctgtttcaagctgcttaacaagatagcaggtgtctatggactcttcggagcactcttctctggcggtaccattggacaacttagtttctatctctattcgaccgtgacgcttgcggggttcgtttggggtttgaaggccatctccgaggtatgtctccttcagctctttcttcctttttatcaatccttcttcgttgtggcgaggataaaggaaggttggcggacaatctggctgctcgcggatggttgtgaagacgtctataatgtacatcgtgacgtcaatctctctcagccacgaacggatgctagatgaatgatgttttttgttcttctacttaccgactatgatcctaactcttcctgtatattcttctgttctttctgttctacgcccgcacaggaacaaacgacgaatgtgttcaagttttcgcatctgtatattctcgatcacctcgtcaccaccttttatactttcctcttctccatcgtctggtggttgtatataccccatgacggtcgtcgagtctccaactcacccgcccaggcggcgatgatcgcgctcgctaagtcaagaggcgagctgctgggagaagacctatcagacgaggagcgagtcagaatcgcggagtcattgtgggatcacgaaaagatctttgctgtgtttgtcttaattgcgtgctgggcgctgaaagtaagctggatttcatcactatcgtctccttccttccttccttccttccttccttctcttgaaagcatagaacgtatttgttgataccattcttaccactttgtccggttcgtagatttactttgctcttgcactgtactcctttgcctcgcatcttaaacacaactcctatcggggtcttcctatgacgaatacctcttcgaccaacatgtcttcgattggttctaattctgcaattcccatgatgacgacgacgacgtcgtcacccaaccacatcaggtcaggatcgaacggaagagaagaagatgaggaggaaggaaaggatgtctttaaatgggatagcgaggatgaggaaggcgagtcttccaataaaccaaagacaagcagacgggcggatgaacgcgtgtgagaatgtaaactggtgtgagaaggcaggcatgctttcagttataaaattgatatcgttgtcatcaacatatcctttctacaaaagaaataagaaaggcaagaaaatccatcggcggaaaagatgggcgggcgttacacgatacatatacaaaaaaatggggtacaaaaagtggagctgataaagaacagcggatgaaggaacagcatagagagagacgagtaacaattcgtctccgctattcaccttcatagcaaatcacacttccttcggacattccatcctcttcttggagtgttggttgatcagatctagatatcgaatccaggatcatctgcccaggtatcttcctatcatcattatcttcatcgtcatcgtcatcgtcatcgtcgtcaccactgtcagatggggcgtcggaatcacccagctcagctccatcaaacagccagtaatggctattttcgaaatttaacccggggttgaaggaaggccaaagaaaaataaacatatgaatgattgaacaaatagataaacattgcaatcgagaggagacgacgaagagggataatagaatacatacgtgtttccgactcttgtaggttccctactaggt

SEQ ID NO: 1216 - DNA, 24933 bp, Xanthophyllomyces dendrorhous
ttccctactaggttcagccgatgcgttctgggctcggcctaattcaggtattggtatgttccattcaagtttctcagagagaagacgcacgatcccatctgcatctccaagaagattaatatccgggtcgaaatatttgagaggggtcttgttgataaggatttgcggaactgagtgaggcagatgggccaacacttccgacacgggcgccacttgtaggctacttccaataacgagtagtagatctacagattctcgatctgcaaacagacagcggtcaaaccgatcgtccaatggctctccaaagaaggtgatgtccggcttgatcacagccggaggaaggttgctcctccatttcaaatcttcctcttctccctcttcatctgaatcttcccccgcccaacctccacgtctctgtttccctcttcgtttcttccgttctttaacccgctgtttcacttcgcgctcttctgactgaatgcaaggagtacatcttgggattgtccggcgcatgatatccgactcaatggccgagcctggcatctgacggcggcatcgaagacaagatgccgttgcaaaggaacctaagttgaaagccaggtatgatcaacgcacttgagaagatgaagtataggaaccaagggaaaggaaagagctcaccatgacattgcaagacgttcttaattcccacttgactttctagagctatggaaatagttccaaacatgtgttatagtagatttctcaagctgcaacaagaagaaagttcgaaacaagcgcttactgtcaatgttcctacaaaggtatatggagagtacaattagcgaagaaacaatacacaagcctaaaagaactcgagttgaatttactgagtatagtttcttaataatttccctttgtcctccaggagtttgatccaccgatgacatggagatggctgcagatacgaaagtggttaactcatatttgtaaacgtttgaaaagtccaatcgtaataagatctgcatcttacagtaaagttggaagctaattgatccaaatcaatcgtcaaagaccagtcgaatgaataaaggaatggcttgatgaatagtaaacgaagtgggatgactcacgatatatttgactgattgcaagaaggacatatcatgttcggaagataagcgaggcagtcgttcatcaagagaaagacataactcactgagcgaatgaactggaacagaaagatgtcccgaattcagtcagctgataatcacaaaataagaacctcgcttatattcatagatcccttcacttactagaatactgcaggagtttctttgaaatatgagagttcaaacctgagccggtgccgcgacactacggttaacctcaagttactcttgcagccagtctatgaaatatagaaacacatgagagacttacatttgttggggatcatctaaatcatactctccttcatccttaagcttcgcatacaatcctgttgtacttctaaaatctacccaaaaccaacacgcaagagtttctttgatttcagtatctggattggtgcatccaatcaacgagatgatggaagaaataatcgacataccaggaataccacaactaacactaattccagctccggtgagcaccaatattctcttacttcgacgtatgagctcgatcgcatctgtccaggtcgaatactcccgaagtcgctccctttttcttagcctagaagagcatattatcgtatatgaggttagcggatgcggtcgcgcaatttgagtctgggacgatgagccgtacgttttagtcagtgctagtttgagtatcggcatgagcaagaattcatcgagatttggatccctgtaataagttggctgttgtatgatgttcatttaaataaacaataccaaatgaagacagaaagaggttcgtataacaagtcagatatgtggtctgtaacgtcgaacggaagtgagaagatagaagagtttaaacgcacaaccttcatttggaaagcgttcaataaccgaagtaccgagaacttcagctcgatcacatatcgcttgacaaaattcaacaagcctcaagagagcacacaatccacaataacaagaaaaacaatgctcagcaaggcactcgagggttattgatgtctcgttttccaatactcgagattcacctttctctttcaagtaggccgtcattgtttcgatctcctcatctgaaaaccgattaatcgctgaacattcacaggcgttattgatagaagaactacttagcaacaaacacattccatgcatactgtgagataaacaagagcgacataccctgccactgaaaccaccgaagatcatctagcctactttcataagattgaagttctgattcctctttctctaataaatcttcctgtttcaagagcgcgcagacatgataacacaacaggaagtcaatttgtacaacatctaggtgttctagaagaggagggggcaagatgaacccagagaagaagaagggaggacgaacccaatcagcagagtcaatactatccgccagctgggcttttagcagatcatccgatatctctcctccatcgacggtggtcaatcctgcccgctccaatttatccagtaatatcttctttccttcttgctcttgctctaatcttcgcttctttactggtccatgtagatgcgcttggtcttccccttcctcttcctcttctgttcctggtccttcaatcctttgacgtatcatgggttcgtgtctgggctttgaagtggatgaagagtgaaaggtttggttgatctccgcttgtgtagccgcagagatacgcgaactcgcgtctacgttcgcgtccaaatcctcaacgtggttcacctcgtttggggtgtcctccattctttcttttaatagatgtaaatttttctgctttgactgcgagtttcccttctcttcaggatgcaattcgatattcccaggcggaaggatatgcccggctgatctgataatcatatcaatcttgattgcctctaccggcgttcctggcgctgaaaacaacgcacctgccggagctgaagctgatccggagaacagagacgaagactgagctgatggaccgtttgtattcgacctgttcttgtctgatgaaccagatcgtgaggctcgatgggatgaatcggacggcatggtcgagggttgatacgtataaaacgcgttcgaaggatagaatacaataagggagatctatatcgaatgacgataacaaattcaagataagaccggaaaaagacacgccctaaagattgaagatccgttctcgaggtgatactgagcttcagaaagagagtggatgtttcgaaatttgggaacaaataggtgatggaaagagttcggcttggggttttggagaatgtcgcaattacgtttaaagtctttgatcgatcaacattcgggcctgtctatgaatctatttattacgtctaatgtatcgttatttagtagttgaataaatctcatttttatatgtcttgtgttgtaacgatttcgatatctcagtcagaagggcgcagaagatgataatacaacggaacgtaaaagccatgatattgatagcatcaagtagagaaaaacatacacgcgagcaaaaacgtcggtgaaaatattggaaaaagagtgagaaaaccaccgctggcgaaagaccgccaagggtgcctctatcgtaagaaaagaaaccgttctgccttaaaggatagaaagactttgttgacttagaagcactttcggtggacgatggaaggtccagcctcgtcgtactcctgctttgagatccacatagattggaaagtgctgagggaagccaagatggatcctccaatccagacggagtacttcctctcaggaggagcaacaatcttgaccttcatcgacgacggggcaagggaagtaatctccttctgcattcgatcggcaataccagagtacatggtggttcctccggaaaggacgacgtttccgtagagatcctttcggatatcaagatcacacttcatgatcgagttgtaggtggtctcgtgaataccggcggcctcgagtccgaggaaagagggctggaagagagcttcagggcatcggaatcgctcgtttccaatggtgataacctgtccgtcgggaagctcgtacgacttctcgagctgggaagactgagcggcggtctgcatctcctgctcgaaatcgagagctacgtagcagagcttctccttgatgtctcgaacaatctctcgctcggcagtggtggtgaaagggtatcctcgctccatcaagcacttgacaaggtacccggtcaagtctcgaccggccaagtccaatcggaggatggcgtggggaagggcgaaaccctcgtagataggaacagtgtgactgactccgtctccagagtcgagcacgataccggtggttcgaccagaggcgtacaaagaaagcacggcctgaatggcaacgtagaaagcgggagcgttgaaggtctcgaacatgatctgggtcatcttctctctgttagccttggggtttagaggagcctcagtaagaaggacggggtgctcctcaggggcaactcgaagctcgttgtaaaaggtgtggtgccagatcttctccatatcgtcccaattggtgacgattccgtgctcgatagggtacttgagggtaagaatacctcgcttggactgagcctcgtcactgccgcatagaagacatcaggttaataacaagagccggttacggacatcaagagatgtgaaagatacgaacccaacgtaggagtccttctgtcccataccgaccataacaccctggtgtcggggtcgtccaacaatggagctgtgaagattggttaaccaattcagaaagaggtacgatcagcagttgcgtcatccatacaaggagttgccactccgtctttacgaatatcaagactgagacgtgaagcatgttcttggatcgcttttgctctgtcatgaatttaaccaagctcgacgaaacgatactagtacttacgggaagacggctcggggagcatcatctccggcgaatccggccttgcacattccggatccgttatcaatcacctaatgaatgataagaaaaccattacaagagacaacgaagaaagcggatatgagccaaggagccaattcgcatcatgaagatatttagaaacacatacgagggcggcaacttcatcatccctagagttgaagaatccatcgcatatccatcacacgatatggaaaaaaaaggatggatgataaggccgcagtcaatagggtagagtgaattgattataagatggccgaggtaaatccaaagacggggaaggagaaagacgaaagcaagagaaaaagaaaggggcagtgcacaatcaagtgtcaaaaaagacgaagaaatgatgatttaaaaaaaaaagaggcgaaacgcagatgaagtgaaaaagaaaaaggaggcgatgagcctttccgatcgccatcttctataacaataccacacgcatacacttcagaaagagaaagaaagcatgtcgacgtacatggtgggctagactgtttctttttaaaggtggaggaggtacgggagttttgttttgagagaaagagagagtaagagtgagtggtggtcgggaagaaggaaggaagaagagaaagaggagggaaataaagagatggggcctgggcacggacggttgtgttgacggctaaattacggctgtaatttagaatataattcgatcgcagtcgtaaccacgtgaaggctagctgactaagccgtgcggttagacctccagctaatccatcagtcaagtccacagaggcatcttccatcccatcttgtgtgctctcagtcatatcttctcacagacacagtcatttcaatcgatactatcttatacctttatctaagttaatatggcaccggaagtaagtttatttggttctggaccagctcttccctgattagaccgtacaactcgtctggaggctgacttccacctctcacttccattcacatataggctgtaatgctcttgtacgcctaacttatgctcaggatcatcaatgcacacatcttcttcttgtgtctctagcatgttaccctgtatcttacgtatcgctactattcaatttttttaatccgtctatgtaggatcgactcttcggagtacatgcggaacggagatttcacaccaacacgtatgtaccttgtttcaacttgtcttttctaggctttctatcaagttgtccgctcttcagtcaaaactgatcttgcagccgttctaaatcgcgtttttcgttactctaggttttgaggcacaactagatgccatctcggttatattcaactcaaaagttaattcaaatcctgaaaatacagtgggcgtgatgacgatgggcggggctggaggaaaagggtgagatcattcatcgccctagccagagcacaattcgatttttgactcgatagggtgcgccaaactaaatgttccctccttcctgtctatgataacaaatccggtttcatcagtccggaagtattagcaacaccaacaaatgatctgggcaagatcctctccgctctgcacaaagcgaccatcggaggagagtctgatctgcatacaggtattcaggtcgctcaggtgggttgtcatctgtccttttcccatcttgcgagttcttcatttgatgatcgttccgttttgatcacctcacaaaacagctcgccctaaaacatcgacagaataaaacgcagcgtcagcgaatcattcttttgctcggctcccctctgtccgaatcggcaagtgagaaggagctcgtcaagctgggtaaaaagctcaagaaaaacaacgtggcggtggatgttgtgaccttcatcggagatagcgaagctgatggggtggtcaatggagaggagaacggaggagccgaagccgtgttgggacgcttcgtggaaagcgttcagagtggagagaacaggttaggcccttcatatctcatcttacgagatgaacattcttaaatttgacagcttgaacgcatctcctattgtctctgccacagccacatcatcaccgttccggccggacctcatcttttgtcggatatcatagcatcgtcgtcaatccttcgtggagaggatagttattcgggcggaggcggcggagatggaggtgtgggcggaagtggaggtgttggtggtggatcgaactttgagtttggtgtggaccctgatatggatcctgagcttgctatggtttgttctttcaaatgagcgttgtatatgtctgtactatcatcgctataaactaatctcgcttatcgactactactcatatccacaggttctacgaatgtcgatggaggaagagcaggccaggcaggctcgagcgaacggggcagaatctgtatcgtctgctccgttggccactgtgccagagacttcttccaatgctgctcccgccgagattgtatctgaatcgacagctttggcgcctgtagagactacatcatcgagtagagtaccagcccaagagacagagaacgaggacgacgagagcgatgcagagctgaaggcagctcttgcgctttcctcaggagccgatagggatgttgagatgggcgatgaagatgaagaagacgatgaggatgaggaagaggtgtgtttgttttcttctgatagtcttcctaatctgactctattgtgatacgctgtctaaacctgtctttgtcggattcctttgaacaggcgattcgaaaggctattgagttgagtatgcaggaggaccaggagaagaaataaattcagcatcttctctattttctctatcctcattctttctttgacctgtactctgtctttgagtgtgtgatcttgatgttcatgcctgtgtgtgttctctgagatgaaagacgaatatatgcgcacgctttggaccttaaatgaagatgttgagatacttaaatacgggcacgcctcctaccctttgtgtgcctaagcgcagtcgattcggattgatttcctgtcatacaactctcgttcctatccctttcacattaggtgtcagccatctctcaatctctttatttactattcattgcccatcacctacctcttctcttcatcaaggcgttctcgacgatagatacagatacttgtactcaggatctgttcttcaagaactgttatcagtggccaaacaaggcgtttgagcaatcagcattggttcgggtatgtccttttatcttgattcttctgatccagtttccttgtcaaacgatggttgtatcttttgtttgggacaaaagaggaagtgaagaacgaagaggtgaaaaagtgggaagacggagagacggagagatagagagatgactctagaaggtctatcaagagatgtaccaagataatcctttctgtcctaacctttcgatttgtttgttctggcgtgcgtatatacgacagattcttatacgaaagtcaagcttaactttggatcaaatctcgaggaacaaattccttagctcagccatctcattcagccaccttctcttctctcaagcctatactgtctcactcataacatcccagaatccgagaagattttttgcccttgtatctatcatcacaactttccagcggccgacataaccgcctgatccaagatgtcaaccccgccgttcgaaaccggattctctcttccaccgaacgacgcagcaaccgttcgatcgtctgccgtcgccaaactccgccgagcagcttcgatccctcgaaataaggacggtcgaagaacggaaataccgaaggtctcattcccacctacggagtctggtgaaccattgccacccccgccagccgtcattgtcgttgaggcttctccgaacatcaaaacgagagaaagtactgaagacttagaacagggacacctctccgaagaaagtaagagatcaaaatgggcagatgaccaagcgaactttcattcttttgaacttgaaagtagtgttggtgcagaagccgagttgggtaaagaaattcttacagaagatcaactcaaccgatcccctccctcgacgatgtcatcattgccaacttcatcgcataatgtccaagaagaaactcaggtcgagcgacagcaagtggaggatgggtaccgaccatccaggctgcctactctcatgcagcgatcagcctcttcatcctctcagaattcatcgcattacccacaaagatttcctgctcttccgtcactctcagatattcaatcccgacatctgcttcagcgaagtaattctgcaagtgcacgacaggacgccctctcaagactgactggcgtaccgcccccgccctctacgtccccagctcctcctgtgaactcggttgaacaatctcttcatagctttcatctgtctggaatttctcaatcagaaggcgactcgatgacgaacaatattccctctctcactcgtccaaggttgggaaggagtttcacaataggaggtagccatccgggtggtgagcgaagaagtgtggtcggtagacgaatgatggctcggttaggaagtagaaccgatggaggatctacatcttccacatcaccctctctattgctcgttcctgaaacgccccgttctcgatcaccttctcctgctctcttgaatctaatctcagatgaatcagcatctccagatgacccagacaacccagatgggaagcatgatggggacgaccgagcagagcaagttgaggaaggtgtaggggatcacatgggtgaaactgaccgggaagaaatccttctcccttcgatttcttccgctcgatctgctgcatttactcgatcgtttgagaatccgaccaattcttctacgttcttggagcgtaattcatcccggccgttcatgtctcacggttattccttctcggagtctctcccttcctctcgttcaggatctccccatcctttcccggactatacccgaccgagcaggctggggtccatctcggttacccaaccttccactctgtcaaattctggcagactctcaaacgcttctagcctgacattcgatagacaatgggccccgtctcccgacacaggtgagccaacagatgcatttgaattctcggatctgttgaggtcaaattcgagtcgaaccgcgaggagtgtgagtccaagactgcccattgtgtctgacggtacggacggtagacgagaacgccacttgggagttccgtccctgccgagatcacaggaggaggggttggaggaggttgaagtattgacgtcttcagtgagatcagtcaattcttcgtgtagccaaaacaatcagttttcagcggctttgcgtactacgccttccatcatcaccactaccgtcaacaacagcagcgataatgatagatacgacagtgatttcagcaatgacgggtctagtagagatgtttccaaagtgcactctagatccaacgcctccccaagccactactcaacacctacctccgagttttctccctctattcctatcttaccacccggcttgaccgcgaatttgagaggcttaggtccagacggggttgaaaggggaaatttggatcggtcaaggacgggaagtggagatagtttcccagcgagcgttgcgccgagggatgaacacaaagcaagggcgcgcagtgtgataagtggttctcctgcggacgaagatcagtatcaggatgatagagaaggtacgtaaaataaccttgtttccttgatcttctgtgaattaatgcttgtttcattgccttggacttggtcctgtgtttttcttagtgtcaggacaagacgaattcctaactcctcttgaaagcgttgagagtttctctagaccaggatctgcatctattgagattgaacaattgtccaagatgccgtcttcagcactcttaggcacacgtagagatgacagtccggtgagctcccgaggcccagatgagagatctattgaatcaggaacttccgcggcgttggattacgccatgaggtaagataatgatggatccttgttacatgtgtttctcagtatccctctaagatgtacagctaaccagttcacctgtccatttctcctatctgtttcatgattgagttgggcgagcgtgggtgaaaatgcttcgagttcggctgagactgataagaaacacggacacaaaaagtcgctgtcatttgtggaaaaattggagcgaattgctaaaggaacttttcgaagccggtcgtcttcctctagccaatcaagtcattaccaacccaggtcgcctgcgctagagacacgagaccccctgagctcggcgatgaaccgaagcacgtcgaaatctacattgcgctcatccggatcttcttccgggcaacgacggacctccagccatcagactcttgaagatcgcacttccggcttgaccgttgaacgacactctacctctcaaccctctggcggacttcaacccccttctcaatcggtcaactcctcgcctactttcggctcaagacttcctccacctagcccgacagaaccaaagtattctgacgctaaattgatgccattccctggaattgtccaattggagatcgaaagggatagaaaacgagagaggagcattggttcggtttctccttcaatagaccgatatgtctcgtctgacgccggtacgccggcatcgtacgtgtctccatttgaggtcacgggtgatttcgaatccaccttatcgccaggaatatccccagtggcatatttcgatctttctcctagaccaccgtcccctaattccaagaagtcttggctgtccagaaagttttccactggagcgtttaaaggactgagcgaagatcgaagaaaagtcttaaactcgccggacgatcatactagggtgatcgatggagggatgctcggtagagagctgtcagcttcgcccaaagcttccccacattctttctcttcagcgagcagattttcatctcctaaagagtccagttcattattcgccactactcctcacagcccgtctccttcctcgccccaaaattctgagccgtcaaggcagtcggtacggtcgtcacctccgttgacccatgtgaataccttccctgctgggtcaacacacttggtcgataccatatctgtgaaatcagctacgacatcgacgctgcccaaagtgaaggggatcttatcaagcgctggattaacaactgtgaccgagccttcggaggaagagactcctcgtccatccacatcgtcgtttgatatgtctcgcaagacatatcgggctcattcgctacaggagaccgttcaacctatgacaattctcaatggacaaacgggctcatcgagtgaagcgcaacaagaaacaagaaccaatggggcgccctctttgcttgatttatactcaaagaattctgaaggcgattatcagtcggcatctcttcatcaaaaagaagatcagccaacttgggagcagactgaagagaagacaatggatactcaccaagagtcccaaagagaagtcactgcttcttcgccttcgtctttcgaaacacgttctgctcagcctcttacgttatcacctcagacggcacagattttgggtcgattagactcggttctggccctggcatcgacacaacaatcgacaagctctcaattgaatgacccgccgaggaagctattgctccattcacctgtgctgcaagtcgtgaatgccaacgcagcgaaggatcgatatttgttcttgtttaccgatgttctcgtcattggttagtcatttcttttcgccttcatacttataaacattatgtggaaacagtttcacgatctgatacagttgcacatacatttcccccattagccaaaccaatcttgtctgaaggacaaatgccctcgctcgataacaagttcattgtcaagagtatcgttgaactacctaagttgaaattgagcgggttgaaagacggggatgcgacttcagattctatgaagaaacagcacccggtaagcactttgtcaaccctcagctgctcatttatatgtaactaaacctttctgatttttcttgattcgtttttctcgataccagattgtgctcaatttcatccagatattttctcaagacccacaccgagctgtcgaatacctcatttcacaaagcaacctgtcaagcgccagtatctctggtttcctttttaaaacaactgagatcgatcgcaccaagctgggcgagttcctctctcaggaagtaaatgaacgacttctagaggggtttgtcgccagattctctttcgctggagtccgaatcgatgaagctcttcgaactttccttttgtctattcgactgccgaccgaagcgaatgccaacgagaggctactctggacatttgccgctcagtggcacgaggttaactcagaggtcgttccgtttagcaagcaggtctcaattcagctcgtgcttgcgatcatgcagctcaatgtatgtctgtttttatgagctcttttttgtgactatgaactgactgcttgaatgtttctcaccctttattgtaggatgctctcaatccaagcagctctggttttggaacctttgcttttgctaatcaagctatcacagtggacgatttcattcaggcatttcgagttcacgactccaggcggctcgttacgaacaagtacctcgagtctctctacatctcgatcaaaaaggaaaagctttctcaggccttatcttcatccgaatctcacctgcaaagggacatatacctcttgccaagtcaattgccttccaagcttacttacatggttccttcagaattgatttatatcacaatgcccgaaatggacccaaatttggtaatcaggttgcacgggacggggctcacttttgatcctcctgttcttacattcactcaaaactctcgagcttcattcaccgtcactggtcagtcttccgcccttagtcttttcttggttgagtgcaaattaccttctgatgctaatgaaaaatggtggactttttgttacgtcttggattatttaggaacatctctggggacgaaaactatgcttatatcccgaactggagattcttctcctttgtacaatagcctgccgacgagtaaaacgttcctcgtcgaaagagcgttccagagagctggccatactttccagttgtcctttatcagagaaccaaccaaccaaaaaagaaagtacctcatctcgttcgagtcgtcttctacccagcttcaatgggctggaagtatccaaggacagatccgacgatcgacggcagcgctggagtacaatatagaaaacgagttgttacctgtctcggtccagaaagcagccagaacggtcgctctgcaagtacttcgagatgcgttggttgccccagagtcggatacttccaagggggtttctgggcttcaaaaggttccgtccttctctcagatctatcgtaagtcgcttctttttttaccttgatcttgtattgaaatgagccgatttcttaataattatacgaaccgcatttttaacagctcttcgagcaggccgatgtgagatcgaactcaatgagcaacttggatcgactaaatctaccaaggctccttctcaaaatcgagcaggcggaggaaaaacagacctcccgactgtcactgaattggaagaacgtgcggccacgactttctttactgctcgaacaggccatgagatcatccgtgaatgtcagcaaaacaggttagtatggtgctctttgtctcgagtttgcatatgtggtcaatgatttgttgacccttggttatatatctgctctgatgatcaatgctcaatctgacagtttggtcccactgatgctatcattccttcaagccggattgaagccaatcgatctacctgctgcttcacatgccgttagtttaggaattgataccctttcagcccctccgggccaccgagggtatggatacttctagacaactcgtctccttcatttggaatctcttacggatagtgaatggtgatttctttatctcgtcaaagaccgttcaaaaaatgtatactaatacagcgcttccggtgccaaatatcagaacggtctaaagagagaaaagggctttctgtcctagatgtaaaactaaaataatctacgttttgaaaattgtgaggaatgaatgtaagggtgtcttatgacgaacatgaattatgcttataggaacggaacaaacagtcatatacaacaaaaatatacaaacagaggagaagaggtgaggtatacttcgctagatcttatgatgaaaactatgatagaagcttctcaaaacaggcgtctttgaatgagataaattagagaatttgaagcgtagcctatcgacttgccttctccaaggtgtggttcaatctgagctctccctttttagatagacgagcaacgagtccagcctcgagggaagtgatgtatgtcgtatacttttgatgctcttctttgagaaattcttttttacgtcgataattgtcatgagctctactaccctgcaagtgtcgaggtgacagctaataggaaagaatgaaagtaaagtttggtcagtaagattcagaggaagttcagacgggcttcgttgtttatactgttctctctctatatatatatgccattgaaaacaccgaactcacaagtgacgattctgccgtcttatgctccgcgatatcttcatcaagcctcgtcaagtactttcttaacgcttccaactgagattcttcatcatgtctactaggatacagtggttgcgatgggggtttccactcattcacatgagctgcgtggccgtttgaaattaatgagctctggcgtttcgtgctgagcacagattctgtttccgaattattaccgaaagatggtcgaccccagccgtaatccatattggacacaccaccagtcaatggctctttggaaactcgagcagcccagtagttgcaggttgagacccactcttcggtcaatgtgtctgtcccgacttggaagtaggtttgggctccggatggaagattgatcacgaagacaaatggtctatgccggttgtaaccaggggctggtagagtcttagagagactatgagagagagagaattcgtcgactatagtcgcgttggcctagaaataatttcaaaggcagttcagcattgggcctgtactttgaacaaaaatgagaggatacgattctgaacttactagccagttacctccgccaacggtcttgtcatttgcagagttcccaggactttcaaacgtgaatgttttgaagctccctttttgaacaaccgcgaacaaactcctccacgacttgtcctttgatcgtctccctccagaatccatgtagtatttccgagtaactaaaccttctttagcccaaggggagcccagaagtgctagctcttcgtctaaaatctctccgatggtggaagcagagacactactgtgaacagactcggcatcatgttccttgatgatagtgtggctcagattggaaacaaatcccatggaagggttggattgataaatagaatcgttgtatccctacctccaacgaccagagctggtcagcgttttgcgtttttcgatgtttccatgtgaatctagaagaaataaagatccttacctctcccattgacgtagctacgcttaatgttggactcagccttccactcgagttattaatactataaggtgatccgagattgcctaagcctcctgtaagagacgtgaaaccacgaatactgccccgtttgagtgaattgagtcggctggccgaagatgactgggatcgaacactttgatttcgggtcatcatttcaggagaagtgggcgaaagattcccagatagacgttcatggtcagacgttgtgtgaagaggttgtataatctcttgactcttgaccgagttatataagtcctattgatgaaaatagaaagaaatggctcgacatcaaatcaacgagcatttgtcaagccgattgttagttgtaagacacctaccttgagggtagactccatctcatgtgaccatgactttgagaacatcgaaccgagaacactagctgacgagtttgagactcctaagcccgatatactcattctagaaactctgggatcataagagacgcttccaaccggggtgccaaccagtggactgctcgcgctagatccgaacgacatggcggtcgaaatcacactttgtgatgatggttgatgaaccgaatcaagcggcgagtttgatctggcttctggggtggaaggtatagcatttatcaaactatgggacccgttcggggttcgactggatttcttggaccgaatcgagatacggtcagaaggtccggaagcgtcatcgaagacatcttgagtttgggtgttgaccgcgctttcatctgagatcggtggatcaggagaagacgaccggaacgaaatcttcgactggtcgaaggagggaatatcagtacgaatggagctcattgtgttttcaacaaactggtttcgagtcatttttcgatcctggtcggccacatgaagatcggtattcagaagaagtagactgtatgcgacttggtgcagtatatctggcatccaagagcgatgtctgcttagcattgagaattaagaaggcgactcgaagaaaagggaaggaaacaaaggaaaaatgaatatacataccgacagacccgaacaacgtatccggattgcactccatatatctttcacaaaaagcgacgataatccgatccagttcctgcgtttccgctttgaagtataactctgatgtcagtttcctatatcgagaggatattgtcgttgtcagcgttcaccttctgttacgattagagtgataagagcatgacggaccgaatggcttggtcgagcttcattcctgtgaattcaaatgattccatatagagcgacgcagctgctacattgatcggatctctaacatacagagagaaaaggaacgaacaagaacacattgggtccaaacaacagcaacaaggtaatgccgcaagtcagtacttctgaagataaaaaaaacgctgagagagatcaagactgaccgtccacctagaaactctgcaattcgattcgtttgtacccatttacaccccaaatctttcctcaggatcttatctaccgcctctccagcttcatcccgtatctcctgatgctcgtgatcgttttcgtggccactttccaatatttcctggatatcaatctcatctgtacccttcagtttctctatcttgacttcttggctgtcaccatctgcatcatcaacgccgagccccaaaccatgtaactccctctgcccggcgttaataccatctgaaataggcaagccatcgtgaggcaacctgggcaagacaggcgaaggcgatgatgggatcaatcggatagtgttttgtacgtctagcgcgttgacaggttgtgcttgctggttcctgatagagttgatatgatcgccagtaggggcacttaatgtcggcgagatcgaacgaccaaagttgtacgcgggcgtagaaccatctaggctgatagatgaaggcggtgatggtgatgtcaaacgggttgtagagaaagagggcgacgacaagttcttacgcgaagaatctattatgtgtgatgatacttcgacacccttgatcgatttgctgccagattcgacatccaactttgattctttatgaggttcagaaatcgagcgtatcatatggttggctggcttcggggacaaatgatcttgagaggtcgataggatgaagggttctataggaggaccaagtacaggcccggcagtagattccatggactgtgagtcgactgggctcttcttgatcgaacgctccacctgtctggacaaatctttcggagaatcaactagaggagatcctcttgtgttgccaccatgtcgtagctttgaaggcgaatgttgacctcctttttgggcgatcccatccaacaatccctcaagatcacattcccaagtcccgattcccgatatctctcccaccgaaagactacctttctgatggttcccggtcggtccagtcggtccagtcgagcgagacaaggaatctgataaatgatcatctgccaagaacgtcaagtcaccatcctgaacgattgtctcgtctccagtcggtgtgctcgatcttgattccgaagaggacgttttggttgacggcagaggcgaggtttcttcttccacttgagaacgagtatcggtcggtgtgagatccaaacttgattggtcaactataccagcgctcggttgggaaattacttcgatgaatgaggtcaacggagatggtgtagtatccaaaagtgtccgatcgtgcttcttgccgctaatcaccacgaaagacctttctttctccagccgattcgtactcgttgtaatatcaacactagatctcggacctcctgcttccatattagatgcctctccatttgtggtcacgctcgcttctgaaagacgtcgagacgtgaatctgtctgttgagtcagactcaaaagatttgacggacttgttctcaccgaacagaagatcaccttccggctggctcctctcttccggcccaggtaacgtcctaatcggttgtccttttgttacagctggttccagaccagaattccctaccccgccatttgagagaccgctaggcgaactgttgaaaaacctagacaacgcgttcttggccttcgatcgaaaactccttcctggtgaagactctctttctagcccttccaccttaggtttggctccatgaggagtttttaagtgttcgactccgccatttgctttcatctgtcctacgcccagttgtctagttgatagcttatttgaatccttggtccgcgggttattcgagaggggaaactgggagtgactgttatgagagttcgtcgttcgacctgaaaggctagatattcgcgcaaggtcgggctgagggctaacagcgatacgagacatcggacgaatatcagacatagatcggttcggtttaggtagcgaagatgagagagaagatgtggatgaagaggctactgctgctgtgggtgacgataatgttggtctggtcgggagactaggctcgtcggatggttgtagaaacgagggtcgatttgcaatggatggcattgatcctttgctattccgtgcctgtaaaatacacgacatatcaaaaaacatcgtgttcatacgaaaaggaacaagaggaaaacccaaaacagaaacaactacttgagtgattcgaaagactcaataaagaaaatagagcttgagggacgacgtacgagaacacctaggtctggagaactagcagtcactcctttcttcgaaagaggctttctaccctcatcattcatcgcacttaacaacccattcttttctgagctcgatgccaggccatctgtttgaatgataagctcgacctgatctttgaattgaggaagttcagcacgttcctcctctctaccctccggttttctctcctccaaaaaggtagcagaaagatcagaaggattaggtacagaagagggaggtacaggcgcttgatgactcggtttcaagaacactggcgatccatctaagctcctgatagtgtcacttctgatccgtaccatttcgaccgaagatccttgtagcggcacatctgaacctgacggtgaagccgaggtcaaggccaaagccagggtcgaagtcaacgtcgaggtctcgtccagattcaagctggaggtttggtcgatcaaaggagagcaaccataattactatgtttatttactggcagaaccttagatgaattcataggtttatcaaaacgatcagaccgaaatgagtgagtcgaaccaaggggatgatgggagtggttgaaacggatggacctgatgaaatggactgatgaccggatatttaatctgtcaatatcaacattctttacttctgagtttgacaagatctccatttcttcctttcttctgtttttctatcgttctttgcccttccgatgttttctctgacggcttattttacctgtcagggagaacaagccaatctgtaagacctctattaggtcgcgaagaatgagggatatagatcgtagcgagaagagggagaggcgagaaaagaaacaagcgaaaacgggattgcatcttcccgagcaagttttgaatggatttttttgctatgaagtttgtgtatggatgcattttctcagtcttgcacaaatacaaacaatagatgaatgaatcggaatccaaacctgaacggtaactgtacggatagacatgcaaatatacatgacagagagaacgagaacgaggagaggtagagtgtttgagtagaaaagagcaaaaatgatagggatatgcgaaacccgtttgagaaatgagaagaggaaatgataaattgtgaagagaaagagaaaagaatcctccaacccagtggctcggaggaaactgacgattttcagagttgtaactcctgcttgcctgcttaaccgacagagcgggtacgacgtttacttcgtctcctgtgtctcctgagcagggccagaaggaggcactccacccatagcgacagcgaccatgcctaatacacttcctccacccatctccttgatctgtctttccctgagatatcatgaggaagaaaagaaacaaaccggaaaaaacacaagcatccctagtcagtgttaatcttgggcaagaaaaaataagcaaaaacgaaccggtcctcctccatcattcgcttgatctctccctcatttgccttccagtattgctgttcttgcagatacgcagattgggcctgagctctcttttgatcaagatatgatggtggtggcccgggcctatcagctttggccaccggcacgaccggccctgtcggttgttggggacctccgaagagggacgagaaagagaacttggatgaggacgaggaggacgaggcagattcgcccttggcgattgctcgtttgccggcaggggtggccgcccaggcgtcgtactctgtctgtcgccgtctggcttcgatcatgttgtactccacagctacgtccttaccgtcgtaagcgtgcaggatcggtcgaacgtccttgggctgataaattccgacggctgtatatgacaaaaacgacagaaaagattgttgagcaatctgcacgctttgtaagccagagaggaagagagacgacttgcattccaaaaagggaatcaaagcgaccaaaccgtcgtccccaggggttccatcccacttaggtacgatcaacgcgttatgtggctgggcggcggcatgtgctttgttggtgtcgagcatgataactttactaagatctcgattgagatatgacagatcctttaccgtgtttcctccattggtggacgaaagatcgagtcgagtggcgtccctataaagtcgatatggcatatacgctccgtacggatcaagtctctcagcgatgggcgcaccattcttaattagaaagggtcagtagtgtactgtttcagttatcgaggtcacaagagcaaggaggtaaacaaagggggatggggatgtgaaagcttacaatcgaagattgagtggtgaagagcacgatctcataaaactgggacaagtagctggagagaaggtaagaaggaaagaggaagctgaatcagtatatgatacaaacgaatgcagagaaggtcagacaattcatggtactcacgcaataaagtaatcggttcccggcctctttgcagtcctccacccatgctccttatcccactttgagcaggtaagaataccatcgagctcgacaagcaaggtatacggtctcacaggaggaatcggaggtggcaagagttcggtccaggcaggttcggtcaggtattggacctaaagggagtcgatggatgagagataaaagatgtgagcctttaacaataggacgtgtttcagagaaaagcttttcagacgaacgtaatggttagagaaaattctagacatcactctgtctttgagagaaggctcaggatcttcaggctgagaaagagaaaggcagggtccctttagccatcgacacgcatacactcatatggatgcgaagacaaaccttgattttcaggcgttccctctcttcttgagagagccctctggagagccaccaggtacctcccacaagaccaacaccaagagctcccaagagagccttatcaaacaaggtagagccttcattctcttttgttcgcttcgcacccgtctttttcggcttaccatcctcgcccttctcctctggctcgggaagtgccgagggatcaatgtcgagtgaaggcagaagagaccgatcgaatttttcgggcacaaactcttcttctggcactgaagatgaagtaggggctgaagtggcgctggatgatggtttgatcgaaggagcagtctcgggtgaaacataaggggaagcgggagtggcagaggcaggagttgaggttggggccgtatcagaaagaggagtggtaggagtcgactggggccgaacgagcttggtgggagtgtacgcaaacgtacgaggtctcaaaagggcccttctggagacgggggccgatctgatgagagatctagagagatgcatttaaagagatgagatcaggcgactaggaatgaagataatcactgaaccggtggactgtattgagtcgtcttgatgcttgggtgaaagaaaaggtgatgggatcgaatgacggcgaagagtaggaaaatgaagagtgtggctggtaaatcacgtgggttgaaagcagggctgtgtcaaattcatcttccaagttgtgactacttatgaccaaccagtcaggcaatcggcgactcatgctgtctcaaggttgttcagaagctcattgtaacagcatggacacttgtgcacgtacatttatgaattatactgtaagaaccatgagcgcttactctcgcatcgactgtgatttggatccatgcccgtcaggccggctacccatagacttataaggatgggaaggttacagtgcctattgtgctgggctacaaactctcttggctgatgtcggcacaatctccattacgtaatgaacgccaaaagagattcctcataacgtcaaccagcaaagacaacggatgtcgtggtttgaataatgcatataggatgctgtagacgaagaccaagtgatacacagtgagtacaagataacacatagcaataaatcttaagcttagttgagacccgataagacttactgatacatggtgaaacactcatccttatctgacgaatactacgtgctatgtgcatcacaatacacactatctactacgcactatatgctgactctcagcatacgtccaagtactgtcacattgatacagataagtctcgatccggtcggacgactggtgatcgattacgacaaacaaaacgatcaaaagcgagcgcagtcagggcaaagcacacgtacatccaaatgtatatatagacaacaagctcaagctcgggcctgggcccttgagtctgggcctataggcgattcgattacatgttccttgtaaccagaccgcccgcccttggttactcgctgctcctggccccaacacaccaacacttccgtctgtccacatcgtcttcttgccctttttgctcgtctcatagatccagaactcagaatccagaattcagaactcagaactcagaactcaggataagagcaacaggaagaaaaagaagagaggatcaaggatcacatcagtttcaaaggacgtcaagctttggttttcctagagactttgcctgcgggcttacctgctgcacctcttgcgtactcgttcccatccccatcccc

SEQ ID NO: 1217 - DNA, 2085 bp, Xanthophyllomyces dendrorhous
gccctcttcagagcttgcatcgatagctgcaagacagacataagtactcttatcgttccctgtaggaactgtttcttgtcgagataggtatttcgtgtgtgcgtatatatttgtgtgtgtgtctgtgtgctctcgtctgcccaacccaccttctcattctcttctttatgtcccctttgcttctgtctacagaccaatcacctagcaaaccccgcatgtatccatctcctccagtctcaccctcggctcaaaccgttggtcttccaaagcgaaccccatctccaaccgacaggctttcttgtaaggatcattcacaccgaggttacaacaggaggactcgtacaaagacagccgagctcggcccttccaaagaccaaagagtcaaccattcagaaggggatctcaagtaggtcctcctggctagatcgttctgaaacatcaggcaaactgatatttctcttatcaaacactctcctctccgcttctcttctttcagacaggtctctccttcatatcttcctcgccgggtgccacccaaccggatggccagtagatcgtcgtctttcatcggctgtacaacgaagactaccgtgccgacacagaagacttcgagacagcagtaccctgctggtctctcgatcgtctacccgacccctcatagatggacggctgatatgccggcatcacctcatctgtaccgcgcatcttcgacacctcgccagccatccagagccgtcgaagaacccacttcgaacggacctaggcacatagccgtcaccggcagacgtcgcacgacggacgtccctatgtcgtcatcctctctttcatcctccccattgtcatcgtcaccttcatctaccgagctgactaccagttcgggaagccctaaacggccttatcggaatgcaccaagaatcatatcatacactctgccaccagaagtcgaaatgtcttggagctcacccctcgtatcaccctcgctcaacgccggtccggtattcttctctgcgccctgtaaatcaattccggtttctactccgtcttcatcacatcccttcattcgacaggaaagcgaagcagagtttcatctccgcggcgtcctcggcaagtccgacaagcgtgccattggtgtccgaccatctgacagacgttctatctcatttcggtcgtcgtcctcctcggcgattctttctgatcgagaggccgaagcaaagagaaagcaagccgagagggaatttgcggaagacatcgctcgctgggtagatggcgcaccggagattccccgggccctactttcgactgataagacgaaaaaagatcaagcagcgcacacggtcgtggggaacgttgccggttttgaaaacagaggcaggatgacaagaccatcgattcaggacagaagagtcactgcacctgtttcgtcgttttccatgcttcgaactgcctcgccggccggattatccaccccatcctcgtcctctaggcactcttcccctgctcgccaatcacccgaccgaacactgtcctcgaccaaactcattaacgacaacaacagcaacaacattactgggctcaacaaaaaacggacccactctacgtcatcagctcattcgatgccctatgtacaaacgcctctcggaagatcattccttgggtcatttcatgctactccgccaacgccgacaactgggcttctctcacctccttctccacactcagcgaggatcagcctgtcgagctcggttgtttcgccgagcagtactcgatttcccttagtcgagtcgagatcgactgcatcgataggctcagccgtccctcctgtcagaggagacttctccgaggacacattcgactctgagtctttcccctcgtcttcttctatcaatagtggtcttgtccttcccaggtctcaggcccgagccgaaagcggatttgatctcgaccagacgatggagcgatgttctcgaatcgaaggttatatttctttccaggaagttggcatcggaaacatctttgatggcgatgaggaagaggacgagccagctgagcaggatgcagggtcgaaacgaggcagctggtgggggt

SEQ ID NO: 1218 - DNA, 2369 bp, Xanthophyllomyces dendrorhous
atcttctatagtccttcttcctataaattattcctttctcgccttttttcgtctcgtttcctgcggacagtttcgtggcctgtttatcttcgtcattctcaaatatgccctcctcttctctttttggtttttccttcttgggcttttctttctaaacatccaatacatactatacatattcataccaaagcattctttccgcatggttctcctcgggaccctttttgttcttgtcgccttttgctcctcattttcttccaccctttcgtttgtttttcttttcttttcgagttcgttttgtctcaggacattccttcctacatgacgcagtcttttcgcctagttatatccgtgactccatatatatttgttcaccgtctcgtgctttaggaaaccgataccagctacgtgtctcagcagatgagagaatatcgttttcagagaacatcgggagacgagaagagattacacacagtgtgaaaggaatcgtcaaccggctaattttgtttggcaaaaacagaaaaaattggttgactttcggtttttaccgtcagcattctttttttttccaattttcttaagatctccatctaaatcccctcccgttcacttctttcgccccctatcttcaatcagcaatggtaaccaacacattccttcaactccttcagccttccgctacctcagcgccgtcgtcatctgatctggatatcgtcgtactcgatggtggcctcggaacgacactgagagacactttcaagaggaactgtgaaggagacttatggtcctcacgattgttagccgaagatccggatgtcatcaagcaggctcatcttgccttcttcgaggctggagcagagattgtcttgacttgcacgtttgtctctttccacttatcttctctttcttttggaaccgcgtgataagcggatagatggatagatgaggagatggagcgcgcgcgagaggggctgacgtagagaatttcctttgcttcatttgtggtagataccaagcgttcataggcggatttgtccaccagaaattcaccgaagaggaagcaagaggatacatgaacaaggctgttgatctggctgccgaagctagagatgagtacgtcaatggggacaagtatgataaggcgacctcgaagaagctagcggtcgggttgagtctgggaagttatggtgctatcttgtgtaatggtgaagagtttaccggttcgttaaaaaacattgaaaacgtcttctttctctctttctctctttctccttctctatgcctttcgtctctatgctgatgcatcatgtgtgtatgtatgaaaataggcgcctacccggaatcagaacaatcagtcgcgtatctcaaagaattccatttggaccgactccgagtattcctcccttcgttccccaggattgatttcattgcgttcgagaccacacccctcgctaacgaagttatcgccatccgacaagccatgaccgagctttcatctctgtccatatcggtagcaggtggtggagatatcccgttctggatcggattgacttgtccggctggggagtgggctgacaaaggaggggcgaaagcggctagggagtcactttgggagggtccgggtcgattacccgatgggtcagtctctccttctgtttctctctctgtcttttcttcaaatgggttgatccttgtttgaactcgaagattgattaatttttctctcttgtcctctcctcttattattctgaataaaacaaacctccctttagagtggcgctgaactgtacagaaacatctgttctagcatccatcatcccccatctcgcaccttcgtcctcgtccgaatccaaaccgaacaagcccacgttgatcctttacccgaactacaacaccgcctatatgaacgagaccgacaacgctgcttcgtactggtttgtctcgtttccatctcctcttcttcctctttacattgaaaaagagatacagaaagagaaaaagagagagaaagaggcccatcgtgattgtaactcacacgcaaacacatactcacccccacttccactttctcgctctcgctgcgcgaaacatctacagggacacattcgacaaaggctccaagccagctcgtcttacaggccccgaatgggcatcccaattgatctccatcgcctccgaggccaactcctctggatcatgggccagcaaaatcatctgtggaggttgctgcggaacgcaacctgatgagatttccgagctgagaaagttggccgatggcggacggtgaacgtgggcgtgggcgcgggcatgggtgtgggtgtggggccgagcgtacaggtagtaccaaaaaccaagccaaggagaggaat

SEQ ID NO: 1219 - DNA, 3856 bp, Xanthophyllomyces dendrorhous
gcgggcgggcgggcgggcgttcatcttccaaacatttgggtttaaaaagatcgacgatcatcggttgtagattatcatcttcttgttttcttgtattcgttctgtttacaccgaacatgttctctttgacgtgtatccatatgagcattcttgttcatctgttcatcctacctgtccggcccagatcgctctctctcggtccatgccttgccagtcgcttgctcagattcattaacatacatacacatacaagtcttctttcgaaaacagaatgcgagacaaagcaaggaaggtgcaagaagaaaaataaagggcggaggagggaggggaagaaagggaatctttgaatgtcattggctcgagaatcaattctctagatacacccccttactgagtaagctcgacggcaaacccgacagccaacttggagaactcgagcatgtgagtgaacgagaactctgggtgatcgaacttgtcgttcgccgagtggatgttcttgttcgagttctcaaacgtcgactcgatcgtgaatgacgactggaagccagctttcgagaaagacgcatggtccgagcaagcgtacccacacttggtctccttccaagggatgttcagatatcgatcgacgatcgccttgttgaacgcggtcaagtcgggatcgacaaagtcagtgatgataccgacgacctcctcggttccctgcttgacccaagcggtcatgtccatctggatcattgccttgacggcgacgccgtctgctgccaacttttggctgatcgcctgggaacccaaaagtccgccctcctcggcagagaaccacatgaactggaggggggtctctgggatgtagccagaagcgacgagagcccggaaagcctcaagcgtcgtggccgttccacttccgtcgtcatcggccccaggggatctcaagaagggaagcatgttggtactatcgcagtgcgctccgaccacggtgaccggtgcctttctgttctccttgttcttcggggtgaatgtcgcgatcacactggtctgtgcccaggtgtgagggaacgcctgaacagagacgtgctctctgacctccttgggagcgtcggcgatgtactacatggccaagaacaatatcaatgaacagagaaaaacaaagacgttttttttttgcaactggaatgaactttctacatccaagggacggtatcgttcgaacgagatagacagacgaacctgctctactttggccaagagccactcagagctctgtttgccggtgtctgaccggtagtaccgagtatagaacgaggtgaagtctaccaagttcttcttgggctcatccaccgagagatgtttcaagattggtgacaccaaagtcgagttaggggtcgggtactctattttcatatatgattagtcacacaggccaatcagatataaagtatcagcagtgagtccacctaatgataaatccggaagaaatgttgacgcactaaaggttttgggagcgctagcacccgagatgagtgaaggacttcccaaggatggcgtttcggtactatcgatccgggatttcccccaattcaaacgcccaaagagtcagtctcaccgaccgaagcccggcctgtcaaatctaaaaagaggaaagacagacggaaacgtacatatccataaaccttcttcccttgctcttggcgatgatcttctcccgctcagtcatccaaacaggcctttcgtccgctccgaactggaccagtcgaaggtcattaagatcgagatcgaagccttggttggtttgaaaagcacaagaccaagaccaaatcggttaactttccgttcattcagtgggcatctgggtgagagaagatcaaacacgaaccagggacctttccctcgtactgagcgagttgaacagagaatcggtcgtccgagagacctccgaggatggcctgctggggcttttggtcgacgttcagactcaaaggaagagcggcagcgagaagggatgagcaagcgagtatgggtaggagtgtgtgtgtatacatgatgtaggacgatgttcagatggtctatgggaagagaagtgatggtcagaaagatgggtggacagaggcgatagcgggaaggatgatcgtggaagtgagatgtggcgtttggccgtccggatccggacgtgacacagcccggacacggcgaccaccgacgtcagtcttcgggtacatatgttcttctgtgtctgatcacgtggtccggactgggcaactggcacaattatcagaacgatctatgtgtaacagagcaatgaccatgtgtgcgcgcgcgtgtgtgtgtgtgtgtctgtctgtctgtctgtcagaggcaatgacaatgacagagagtgagagcaaacgttatcaaataatatactgaaacacagataaagctctggcccgaaacaagaagacgtatgtcaaaccaagggtgataagaagtattgaagggggaaatacagatagtaggaaggacagatggaaagaaggagaaacagaatatctcgagacgatttagtggtcgatgatggaaaggtttccggtgaccagcttgttctcgaggatcgaaccatcagggatcgagatcttgttaccctcgttggcgacgatgatgacggttcctcggagggtgaccttctttccaaagacgacgtctccgttgatggtgatgtgatcggcctcgaggatgttggggatcgtcttgaatcgcttctggaagttggcgaccttcttgaaggtatctccaagcttgacgaccggggtggttccgaacaatcggttcgggttcatgaccaaagctccgtgctcgagcgagtacagattactggtgatcaagagcaaatcagagcacgacttgacgggcaagaatcggtttcggggcacgttgattcccttggcgtttcggaagtgcttgatggcggctccgacagcggtctcgagctgaaggacggctcggccgtcgtcggtgaccttgttgttgacgatgatctccatggagagctcctcctcctccatcactcgcttgacggccttcaagttgacccacactgatgatttgaaacaagagtgaataaaaaggagacataaacgcctgatcagtttagcgccgatgtgaaagacaactaatgttcaaaagaagaaagccatacagttgttggtgttgaagatcttgaacttcttgatggacttgaagtcctcgaggtgctcgtcaggaacctgggcgacctcgagaagtcggacctttccatcgacgttgacgagctacaagacaaaagtcgaagattacctgtcgtcagcttgatggaactcggacggaatgtcagaaacgattggccactcacagttcctcccttgacatcggccttggtcttgtcggtgacctccatgaggtactcggatccagagtccaccatgtacttcaagatgttctggtcgaccacggctcccaagttgtcaacgttcgacacaaagaggtactccttaccggcagcgatgagcttgtcgatgagaccggtgttgtggagggcatcgaagatctgggaaagaacaaaggaggagatcagcaaagcggtcaacatcaggtatgaagaggctccgaggaatcataggtcgacatacatctccgtgaccgggggggtaccagttggacttgtcggacacggcctctcgggcggcaggaaggagagactccttgtcaactcgggggtatcgggactggttgaaggtcaagatctggaggttgtggttggagtacttctggatgattcgggcggtgtcgtcatcggtgttgaaagagttcatgaggatgaaggggacgttgcagttgtctttttggg

SEQ ID NO: 1220 - DNA, 4792 bp, Xanthophyllomyces dendrorhous
ctctaaaggacggccgatgatggacgaaaacagaagagaacaaggaaacggtttacttactgacagagttgaggtgctcgatctgtcgaacggaaagatccaagaaggtcataccgtctcgaacctcgatgacagacttgggtccaacacaacccatggtggttcctgtagatggtcggagcgcaagtggacgaacgggtgagcaaccttggctgactgtcaactgtgagagccgaaagctcgacttaccgagacctccgttgagcttgaggacggcgagcttgttgaggatggatccatcggtggaagcagggagatcagcgtaggggacgatctggtcggcagcgggggggttgacctggtcccaatcactgtttgcgtccgaagaaatcggtccaatgtcagtaagaatgacgacagagcgactaaaggcgagctcctatgcttacagcttctcccccttggccttctcgagaaggtatcggttgaagagcaagaagaaagagttcatctgagcctcgaagctctgtgatggtggagagggaggatgcatccggatgtcagctgagctctcgatgagggtttgttctctgtcttgatggaaaacaaaagggacgaaccttcttctgggcagggtcctgcacgttggcgaccattctggtaagctcgtttcgcatggccttggcagcgacaccggtagtggccgacttgaagtcctgttcaaaggcgatggaggtaacgagaggacgcagagagattcgttaagaacgacagaacgaagaaaagaaggagaccaccaagcgtccaaggctaggcaaaagataggacctcgaccaaaaagaaggaacaagacgaacgatcgcggagtgtcctcgctgccgggacgaggacttgctgtgggacgaaaagaacggagacctgtcagcgtgtgcgttctaacgatcagaccgagtgaacgcggactcgtagacctacacagagggagcctggagagaggaagacattttgttcttttcggaggatgagaaactgatgaacggaagcgcgcgccagagagaacagtcgaacgaaggaacaagaagaagaaagagatggagcgtcaatttctgaatgcacgtttgaagaaccggatccacgctcgcgagacagagatgtcaacgtaggctgtctgtctggatctgatgcacgctgtatgataaagataggtacaggatgtactcactctaaggcataagaaacgagtgattcgttccaatcgcatgtgttcaaaataaacagaccgagtgaaggaagaatagaaggaggaaaaaaaacaacgggccagatggggaatgaggtcagctctcctatcacttattcttccctcgacactttcttctccttcttcttcttcttcttcttcttctgctcctcctaaaaagagacactctataggatgactgtccaccaagacgacgcaacgaacccaacgagatgtgtaagcaaagaaaagaggacgaacgaggtctggtcggaggtggtcgttgatggaaggagagagcaaaagatgcgatgggggaggagaaaaagagaaagagaggaaagaaaaagaaagaggcccggacggatttagctctctgccttttgggcgggcccttgctgcgcttctctcgtggggcggacagagatggggttagtaacccccagggtgaaaactgagacctcacccttggacttgttcgtcttcgccgcctgtttgttgtttctctggaagaatgttgggctttgttttgttcgttctcgttctcgttcttttttctttttgcaaatctcattaaactcttgatgtcggcaacgtttctgttcggtctgctgctgctgctgctgctgctgctgctcctcctcctcctcctcctccttcttcactcgctcgttgttgtattttgtttctctctctcgctttcttccttgctgatcggtttctcgaatgaacgagcgaggcagatcgaaggggggaaaacaaatgtccgtctcagatccaaccgacccatccctttcctcttccggccgtgatctggtctcgtttctttcctttcagaccttccccgcgctttgcacgtggaaatagccggacggacgatcatcatctatgaaacatgcacagagaaaccccacacgataataatagtattcaccaaagaaaagaaagaaaagagagaaagaaggaaacaagaaaatgaagaaagaaaaggaatgaaaagaaagagagaaggagacaaggagacaagggtagcagttgtaactttgaattcagtattgttttctcttcttttttttttgtggaaaataaaaacaaaatacaaaaactcagtcgtaggcccacgttgcgatcgaatgtaatgcaattcaagaaggaagaaaagaaagagtagagtaaaagaccgtctgctctctactctctactgttcactctgcccgccctttctttcattttcttttccttttctttctttttatttaatcaaagtgaagcggtctgtctacccttctcgggcttcccggtcggaacctcgaccgacaccgtgctctcctcggttccctccttctcggcctcggcctctgtcaaagcagattctagaaaagcctttgaggacacggcaggccgacgaccttcgagtgccagttgagcggccataagatctctgaacctcgagttttctcttgtcgactggttgggtgttgtccagatataaaaagagagagagagtgtgtgtgtgtgtgtgtgtgtttcacgagttggagatgtcaacgacttgagcgtacacactctcagaggaaaagaaaatacgagaaagaaagagaggagaaacatacgagatcagcgtaaagaccctcctcggtgacccgtccgttctcgagcacgatcacccgctccgcctggctgatggaactcagccgatgggcgaccaggatgacggtgatcgatgattttgcgaggatactcgagatcgcttggttgaccttggagggatgaagtgaaaaagatagagtgagttagcagagagggactggataggggaaacagagagtggtgacaatagaggattagagagtcgcacctgatgctcggcagcagaatccaaagcagacgtagctctacaagtcacaacgttggcagaggggagaaaagagaaaagaaaggtcggtcaaccgaaagactctcgggtcgatgagacaacacattaaataaaggaaaaaagaaggcggagcgacgtactcatcgagaagcaagactgaagggttcctgagtaacgctctggcgatcgagatcctctgtttctgaccaccactcaagctggccttgccgactgaaaggggggggggaggggagaaggaaaattgtttttttggatcgtcaaaaccacttcttggttagctccttgttctgacgcatcgtctctcgtgagcaagaaaaaagttgggaatcaaaacgagaataaaaaaataaaaaaggatggacgaactctgagtgctcaagccctctgggagaccaaagatgaaatcacagttcgcctgcttcgccgcccttagaatgtctgcctctgaagcctctggtgtgccgtacgagatgttctccgcaatcgtcccggtgaacaacggcgggtcctgtgggacgatgcccagtttgtttctccaggacgtggtggtaaagttccggatatctggtcgttggtatgcgccgaaaggacagacgagagtgagtttgaggtttttcttattattattattattattattattattggagactgaaggagaagaaagatagaactgaccttctccgtcaaaggtgactacaccagactcgggatcgtaatacctcaaaagcaatgcgtggatcgaggactttccgcttccggacggaccactttaggatgacccaaaaggagacgacaaccgagcgttaactgacttttcttgttgctctcaagtacccggcgcccagtgtttggtgcctcgagaaacgagtagaagaagaagaagatgatgatgatgatgatgggaaaaagagaagacttacacgatggccacgctggttccctgttcgattcggagatcgaccttctggagcacgggcgcgttcttcctggacggataagcaaagtcgacggcctcgaacacgatgtcgccgtttctcgaactaggcaggacggatcccacgtccgtcttgatggcagggactctgtcgaggagctcaaacactctggacccagcgccgacgcctttcatgagaccggtgaagaaaccggtgaggccggaaaccgatcctccgacgtaactgttcaagaaggaacacaacggtgttcatgttgagaggcctgttcttttgttatggtgaaatagcctgcacacaacggaaggggaacgtacccggtgtaaatcagtagactcgtcaagctaccgacgctgatctctcctagagataccaaatgtccacctgttgtgagggagagaggggatgagggaagagcgaagggtgaaaggtgaaaggttaagggtcaaggacagaacgcaaagagcaaaattggaatcagtcttgtcgttccctttgtttttcttgctctccatcctcgtttcaaatacacggatgtgggtagactgaccgtatccgagaagacacaacatggtcaggtttccggtcagaccggtcccaccgaaaaagatcccactcgccatcgcttcctttcgagcgagctggaggacgccgtctacctttttagagaacgaatctgcctcggtctttctgttgaga

SEQ ID NO: 1221 - DNA, 1070 bp, Xanthophyllomyces dendrorhous
ggggggggggggggggaagaaaccagacgatatgtcagcgcgcagatgataagccatggggaagtatgtttgacgcactgtgtgttgaaagcggtcaccgtcctgtaagccgacaacttttcctctgcgacctagcgcgggatggatggcacgaagggaaaagagaaggggaagggggggagccggtcggttagtctgtctgttttgagctgtagatgtgaaccgaatcgggagagctgtctacctttgtcatatctcccagagcctcttgggtctgcttggacagacttcggaggtaccgaccgtagaacacctatgagcgaagcgagcgagcgagcgcgagggaggagaaagacaacgagataacgacgaaacataagctgatgggcgcatgtggtttgacaagacggattgtgagtgagggtgaacatacagcaccgagagagaccggggggacgacggcgagcatgacgagcgtgagttttgtggagatgtagaccatggctccgactaggaacgtgttgccgtggtgtcagcggttgtgtaaaattattacgaggaaagagaagagggagagggagagagagagagacacgcggtcgagcgcggagggagactggattggaacttacctccaaccaaggcagaaatcatggctcttagaccgtcactcaggttgcttgtcacactctctcccacgatggttgtgtcactgtttgtgtgagggagggaaagagaggagggaaagagagagtaaggacggtggctgctgattatatgaatgcgctctttcaaagtaaaagagagagagaccgacctgcccaagcgagaaagaatgtcacccgttcctctgtcggcatattcgacctcctgtctgaggatatttttgtaggcttcgtttctgacacgagcgatgattcgctgaccggagagtctcattaggaatgctcgcccggcattggtggcagcgccgatgatgaagaatcctgtgaggacggaggctgcgacggggaacgacattcccaggaatgaggtctgttttatttttatttattttttggggggggagg

SEQ ID NO: 1222 - DNA, 639 bp, Xanthophyllomyces dendrorhous
gagagagagagagagcaaggaaagaaagagaagaaggaaaaaaaggagaattcagacttacactctcgggatttgagaaaaagtcgatgagctttccgatggtgagtgggacggacatgctgatacaactgctaacgaacaagagaccgatcgcgatgttgatcgtccttctctctggtcgggcgagctcgagtaattttcggatggacgacgaggtttctttgtttagcccgatcgaggagggaaggatccgggcgagagggcctttctttatggtcgagtcggacgctgacggttggacgatcgatgttgccgagctggccgccgtggaggttagcgggggtggtggtggtggttgtgtttgcggtggtgacggtgatggcggctgtggtgatggtggggatgaggagaacgtagttgttgttgctgctgctgctgttgaccgagaggagggggaggaggaggaggaggagagggatacgggcgtagtggtgagctgccgacggaggtgtattatgtttgatagacgagaggaagccaagggtagagggatcggacggggggaggacgagagagagagatcggttcggaaagagctgctcgacgtcgggtttgccagccgcgaggtcgatcggaggg

SEQ ID NO: 1223 - DNA, 891 bp, Xanthophyllomyces dendrorhous
gaggaagaggaagaggaaggcggttggagggataccaccaggatgaggttggacgactgggagacttgactgccggccgactgtgaaccaagtacagagggcgagcgggaaaagttgcttttgggggaaggtgtgtgtgtgggagtgggagtgtgggattatgcttggttgtttctatctacctatctatctgtctctctctcttcctctctatcttgctttcttcctcgagggggggagtcaaagaaggacgagggagagagaaaccgaacgagatgacgaaaaaacggggggagaagaagaagaagaagaagagggagtgcaaggggggttaaccctaagaaggaagaggggagttaggggtagcagtcacgtgatctggagagcgcagactcccatcttttatcgctcggcgcctcgtgagaaggaggggagagaagaggagcgagagaagagagagcagaggagaaagaacagaagagagaaagaacagaagagagaaagaacagaagagaaagagcacacacacgcactcgatctcgctggatgcaccggggacaaacgcagggaagcgaggaagacaggaagagatcaagggaaaaagaaaaaaaagaaaaagactagggaatgtttgtagtgtccaatagaaactgtttctattgatcgctgtattaggcggttcgatagaatttgtagtgcgttccctaatgtgttccctaatgcgttctgtagtgcatcctgtggcgatctctgtcgatctctgtagtcacttggctaatcatcggcctaatagattgtccaacacgctttctattggattccctagtatattctctattgcattctctattgcattctctagtacaaccccctaatacacccccctaatac

SEQ ID NO: 1224 - DNA, 425 bp, Xanthophyllomyces dendrorhous
tccacggaaagacctcgttggttacccacgacggacggggcctcttccgatcgctcccccagaacctaaagtccgtccggtaccactccctcgccacaaaggtcctcaacctcccggccgaactccaggtcacatccaccaccacccagtccggcgtcgtcatgggcgtccgacaccgggtctacaccgtagaggccgtccagtaccacccagagtccgtcctgagcgagggcggaatggaactcgtcaaaaactttctcgacatgcacggcggcaaatggtcagactgcccagagtttggcattagatcagacatcgacggcgtagacacccccaagctcgttaaacaggttgaccaacagacccatggcgaagacgtcaaggtcgaacccactcctgccagcacccccgcctccgcctccgcc

SEQ ID NO: 1225 - DNA, 3924 bp, Xanthophyllomyces dendrorhous
acgcccaacgtctgttggacgtcgactcggcaagctcccatctgtccaccacgcccgcacagctaaagacccatctgtccctcgagctcgccccaccgttgatcccgctcgtcccccggttgctccagtcagctcccctgccagccatcctggccgaggtcaaacgagcgtcgccctccaagggtgacatcgccccagacaccaacgcgccctcccaggcgctcctctacgcccacgccggcgcgagcgtgatctcggtgctgaccgagccgacctggttcaaaggctccctcgtcgacatgctcgcagtcaggaccgcgctgggcgagttgccaaaccggccggccgtgctccgcaaggactttgtcctctcgacctaccagatcgacgaagccagattctacggcgcagacaccgtcctcctcatcgtcgccatgctcaccccacagctcctcgccgagctctacgcccactccgtcgccctcgggatggaacccctggtcgaggtcaacaacgcggccgagctcgaacgggcgctcgagctaggcgcaaaagtgctcggcgtcaacaaccgaaaccttcacaactttgaggtcgacatgagcacgaccagccggatgaacgacgtcctcaaacgcaccagccgccaggacaagcccatcatgatcgccctcagcgggatcgcaggtagacaggacgtgctcggttacctcgacgagggcgttcagggtctcttggtcggtgagtctctgatgagagcaaaagacccaaagcttttcattcagcagcttctcgatcttcccaccgaggtccatccctcctcctcctcctcctcttcctcttcctcttcctcttcctcttcgcccacccccacaccaagcgcaccgctagtcaagatctgtgggattcgatcgacagcagacgcccagatcgccatctctgccggagcagacatgttgggaatgatctttgtggaaaactcgaaacgtcaggtctccgttcagaccgcttaccagatcgcccagctcgtccggttcgctcggtacgccaacccgccggcgacttcctcctcatccaccacgccttccccgtacaagcccaaaggttggtttacacaccacgccgacgcgctgtctgcctcacgcaaacccgtcctcgtcggtgtcttccaagaccagccgctcgcccacattctctctgtcgtctctgaagtcgggctcgacctcgtccaactacacggccacgagccggccgaatgggcgtcgttcatccctgtacccgtgatccgagtacaccatgtccagacaacttcttcgtcgccgtcgccatcaacaacaacaacaacaacaacaacaacaacatcatcatcatcatcatcatcatcatcatcatcaccgaataaaccgatcatctcgccagccgacgtcacgaggaccggtctcaacagacacatcctcctcgatgccgggctttccggcggtggaacgggcgagacgttcgattggtctgtcgccagagatctggtcgagagcgggagggaaaccggaggaagcgccctgcccatcatcctcgccggcggcctgacggaggagaacgtcgagcaggccgtcaaggccgtcagaccctggtgtgtggatgtgagtagcggggtcgagttgaaagagaccggcgcggtcggtaaggactgggcgaggtgtaaggcgtttgtcgatagggctaaacgtgcttgatctaggagggggttcacagagagagagagagagaaagggaggagagagagaaaaaaggaacttattggcgccaacatagaaattgatatcaacatgccatcttgccagctatcttgattacgagtacatccttctgcttgcatccatctacttgcacccatctacttgcacccatctacttgcacccatctacttgcacccatctacttgcacccatctacttgcacccatctgcttagacacactttatgagaaacaaaccaaacggaccagtaagatagagtaaataacaagcgcactctcgacgacttccttacgtcatccgcctcgcttagcctttcccctccccccgcagaagccggtgttcatctcggccaccatctctttcgtttaccccacactcacttgcatctccatccacacatacatacagtacatacatacatacatacattcatcccatacaatggcactcactcttcagtcctcaatcaagctatcatcaggttaccatatcccaaggcttggtcttggtgtctaccaaaacaagaaggattgtgtgagctcttgtgtggccgctctaaagaccggctatcggttcgtcctttcccttcccttcccctccctccgggtttcttctcgctttcttctctccctccggtctcgccctctgtcttgtttctctcgctatagtcgtcgaccaccaccgtgtcgaccacctggcagagaacgagcagacggtagggtagaatacatcctgtgcccgtcagacgctcactcttgttctcggtcctcccatgtggtaaccatctggttttcttctttcacgctcgctctttctgtctttcttgtctccgatccttgtctgaacgatcggcattggcctaccacgaaacgatccgacaaacagacatatcggtaggttccttctcttctctctatccttcgtgcttcttctatcaagagaaggaaaaggaaacgaaaaaaaaacatgtgatggaaacacggcgctaaagcaaagaaaaataataatatttggttttgaacccgggactctttcctactttggcaataacgatcatgttgtacccgggtttctcttttccctttcctttccctaaccaccccttttctcatgagcagacacagctctgatctaccgaaatcacacagaggtgggcacaggtgtccaggagagtgggatacctagggacgagatcttcatcagtacgctcttctcctttcgttcccttttcctctttctctttccttttcgttttctttttgcgctgttccagcagctcggagggacgttgctgatgggcgttctgttttctcttctcttttttttttctgtcggtcctacgcatcggatcagcctccaagatcgtctcgaaagatcaggggtacgaacagacgttagccaaagtcgaccagagtctgaacgaactaggtgtctgtcagtctttcctttcctttccttttgctgttcgtaccggagatcacggtggtggtggtggcggtgttgatgatgccagctagctagggagatttatgattgacgtttgattcttttatattaaatttatctctctctctctccctctctctcttttccttcgaacgcggcttgggcgcactaaagcatatattgacctgtttctaatccatgatcctgtatgttcctactgtctttctactcgtcccctctcatccctccttgagcgcgcgctcacacacgcacacacgttcgatcatgctcacaccttcgttcatccatctagctcggcgggtcccaaaaacgactagacacctaccgagcgttgatcaaatccgtctcggacggtaaagtccggagcatcggggtgagtaactacgggatcgagcacctcgaagagctcaaggctgccaacctggggatcgcgccggcggtgaaccagctggagatccatccgtactgccagctcaaggagatcgtcaagtactgcaaggaaaactcgatcgaggtcgaggcttactgtccgttgggccgggcagagtacttccacgacgccgtgatcgcgggaatcgctcagaagcttggcaagacagaagcccaggtgatgatcaggtggtctctccaaaaagggttcgtctttgtttcgcttccaagtttcacacatacacacacacggaagaggaggaggtgtgtgtg

SEQ ID NO: 1226 - DNA, 1470 bp, Xanthophyllomyces dendrorhous
aacaaatgacggcgcttgacaaactcgatcgtggtcggtacggcgctgtctcgtggggcgggaacatcatcgtttggaagaattagaccgaagtaagccgggggggggttcctgtttttctttcttcttttttttcttttcccttgaaattggatagaaaaaaaaaacagacggaaaggaaaaaagaatggaaggaaagaaaaaaacaaagaaaaaaaccaacgtgttcttttatacccaatctgcttcaacttgtattccctctgtttctttttgcccgtttgctttgtctatcttatactggtgccacctggttgtaactcgttatatcatcatgtacttttttttaaaaaaaattctctcactctctcgcgccttttctttttctttttgatttctctctttcccttagaccccggctttgcactagtcatgacaggagggaaacgaacgggccatgaagagatatgtgtgtatatatatatgtgtacgcttcgtcctcggatctttgagaacaagaagaagcagcagcagcaaaagagaacgagacgcaagagaagaaacaacattcgacccctgctccgatacgttccaaggcagaagaaagaaaagcagccgatgcaaaggtaggtccgcccctttccctttctcctttcccctttgcctttccctttcccttctctctctctctcactttctatctaaaagatgacgtcctcgtctccgtcgttctctagcaagctccctccgccagagatctcggccgccttgggcgtcgcccctgccgctcctacggcctcttcttcctctcgcgtccgtttctcctcggcaacgagatcggcagcggcctgtttctccttcttctttccctgtacctttttcaatcggaagaaatcctctcggtcggcttcgtccaactcactggataggtccgaccacccatcgttcagaccgaggatccataccggaccaaccagatagcgagtcagccctcggctttctcaacaaagaggaaaaaaggaagaaggggaaaaaaaaagaaaagaaaagaaaagaagaagagcatgcacggacctgacgataaagttgacggtgtcttctaatctcggaatgacgatatgctcgatcgcgttcacccgtcggtttgtcgatcggatgacttcgtccaagatggtgaatgccgtctggacgggacgaacgccaagagatagagtcgtacatagtaagccgtcgtgcacgacgaagaagaagaacagcaaagaggacctggaacccttccgataatcagcaagcgtaaccgaattcgtacctgtagactcgccaactcgaccaacgtctctacagccttcacatacgtctctctgcatttctggacctgctgtcctccccgacccaaacccgtcaggttgaaatctacagagttccaagacccgtcttgctgtcagtcacacacacacacacacacacaca

SEQ ID NO: 1227 - DNA, 9301 bp, Xanthophyllomyces dendrorhous
cacacacacacacacacacacatatgcacacacgcaggatgttgcctcttccatacgaaacaaaagacaaaccgtttccgcccgatttcttctcggcctcgaacgtcggtaggaccacaccagacacgttttctgactttgaaaccacagtgaacgaagccgtcctcacagactcttggacctgatggcagattggttgagcttgacatgtacacacaacaagaagcagaaagtggtagaaacatgagatgaacgaacttgataggagatatcaccggtcgcgtaggttacttctgccaaagagaacgatgcaagctgaaggactcttcccatccgacgtttagcctgaggtgattgacaaagcaagagaagtttagttgatggcagacaaagaacatggccgttcacagaagtctgatttgccaagatggagagtgaagtcttttgcccaagggcttcgccgtgcgatgactatcactatcgagatatccttcatcgtttcctctccaccagtatgaacagattcgttctcctgaaccgtgattaaatcggcccgttcttatccctgactggcctcacacatcgagccaagctgagacactgacctcgtccaccttcttgagaatcattctgaatcgggtcatcagggcatctcgcttcttggccaagagcgaatgtccggtctgagcgcctttgagctgctgcttcgtgttggtcaacgccatccgggttgggctgatacgaaaacgttccctcgtctatatcaacaaagatatactcttcatcggacgcaaacacgcccacacagagagcaagagaacttacaaaggtctggacatggcgagtactttgaatttctactgtcggtcgagatggaagagatgaatcaaggtaaagatgagagacgctggtgagagcgagatcggctcggccgtggttacgccatcagcaatggtcgatggttatgagtaaccacgcgctctcgagcccaccgtatggtgtcttttccctctcaagcaagcagagatcgtggttatcggatgtttgtacttgtttgagaagaaagaggtagtgggtttcaaaattaggtatgggatgtctgatcttaggaaatgttcttgagcaaagagaagaaccagactcttcttccactaagagcgcgcagaatgaatgaagcaggctctacgcaaacgtcgctctatgcgctagtctgaccggccattcacatagagcgacgaaggatctgccccttcaaaaacagaacaagctgataacctcagcgaacacattcccttcactttatgttcttatagggctgagagtatgtatgttgttgtagaagcaatacgagacaatccacgtgacatcaaatacgtgtggctgtgcgacacagcttgccttcatcacgacgtatcgccatttcatccatcgtttcagatatcctcccttcctcttcaactttactatcgttatcccaaccaggttggacaaggaaagagcgaggaaagaaagcagagaaggagcataggagcaaggtcaacatgtccggtaattcttacgctccagatcaaaatgctctcgcttcaattgctatcgtctccaacaattctttcaacagcgacgatcctaggcaggtcagattgacctgttctgtctgctcggccagtgcaggctatttctcgtctgccggattggccgttcacaatcgcctagttcatgttctcaaacttaagttccttcgaccgccggacaagaacggtcattcgaccggtcagtactactcagacttgcatccgtagaaacccgggatttaaagatcacacaatgccaaatcaagtctgctcactgatagatatccgtctcgttcgtttagtccagacgatttaccgaatggacggcgtgtttggctgccctggttgcgatttgttctaccatatggaccctttccttgtccttacacatgctatcaacgctcatgggtataggtaccccgccgctccggtcaattctgagcaatcggcttctgcctctacgtcgacactctctgtacctcagaaaccaccagcgccattagcaccaccagcgctccagatcaaccagaatcaacctggcagccaatctgagaactcgagaccaagcagccggatagaaacctcggcgccaggggagacactgatagcacatacgaacggacggaactctcaactcgatcttcatcactatcgtcaacagcaatataatcatcgacagcaatatcagcaaaactacgcaaacaatcaacaaactcagaactcattttcagctcagaacacccctactaatactcttcctatcacacatctagcccctgcaacaacggctataattcaagcctattataattcgtcaaattcctatctggcccatcagcctaattcaaatgaaaggaccaatgtgaatccaggttcggtcggcaggcaggaacccagaagagaggtcatgtccgtgaaccctgcagcatcatcagctctgtcactacctcttgcggatcattctgctgctgcttcccagtttcaatcggtaacagtagtaccagaatcacaaccaaatcggcctgaatatggtattggttggaaacacaatctatacactagacaacctctacagcccatgcctcaacataccataccttttgcacggacgtattctaatgtgtcaaatactgagacgtcggacactacaattgcctcgagtagtgtgccacgttcagttcctcctacgaaccatagtcgttcgtcaacagtcgtgtggccacagcagcaacagcaacagcagcaacagcagcagcagtaccaaccatcactaccatcaccacagcagcaagagcagcgacaaattccacatcaatcagcatacccatcttcccagattcagtcatccgtccggatcttgccaagcgttcaatctgtcggcccgtctatatcgggactatcaaccgttttaactcctggagagcaaatctctcctaactcgacacaatccgatacaaacaatcatactgatcgttccgacccctccttcgctcctcgacccttatcgcaacgccatactaccactttcaatcaatctcagatgcccactatgcctctctctcgacagtccccatcgctagaaggaagaggtgattcaatcaagcgagctcagacgatatctccgtccctgacagatgagcaaaggcacacgatcgctcgattatccgaccacccgaaccattccctctcttctcctgtctacccgcagtcaaaacgatcgaactcgacgaccactaatgctccagcgaccagaaaccaaaatggagaggaaaatagaaggccagcgcaaattggacatgtattacctcccaaaccgacgttgcctcctctggaaaactcgcccaaggtatcctcaggttcttctcatccggccaactttgctccttcgccgtctgggatttctctaaccctggctcctacagctgcttctgggtcggttatcatgtcgactgaaagcaacgttaataaagccgcgcgcgaatcggaggaaagtctgcttgcacgtgggctttatcctgtgtatttgtcggcgaaaccacagacagaaatgtttaacggaacagaaaacaggtccaacagagctgatgggcaggttccgtcggtcgttctggggaaaagagaaagaaaagacgacaacccagccacagcccacgctgtctctcgtcaacgtatttctccgccccaaggaggaagttcaaccggctcacaacataacactgcaccgacaacacagagccttccctcaaagccaatcttggacgttcttccccattctacccttccatttcgacctttgtctgcccctctttctaatgaggattcaacgttaaatcaacttcaagtaccacagacaaagtcagatgatcaaacgccatccatcagcttggtcttccttacgttgatacatgtcctccctgtgttgtacagcgacacgcatatgcctacctatctatttcaacaagtaccacctctgatctccttgctgagagcctatcacaacgcgctgaataaccagattcaagaagctatcttagcagaggcgagaggagaaatgccagagggatggagccagaaagaacggaagaagctctggaatttaaaagagaagtgtaaactcgatccacgcttcaagagaccaggggaatatgaaatcatgttcaagtactgggtatgtccttccgtcgttttctagatacggaagtttatcaactttcatcagactaaagatgggacttgtttctccattcaatcttgtcatcatatgcatctgaaatcaccgtacagcaccaaatgacaatgatgctcgtaaagccgcatcaggtttcggcgatcgttgatcaattgaatgcgcactttcctcaacacctagagaatagcaagactcgaccggttcggcacgtgttggaacaaatgctgaagcaggtggttcaattcgttcagtcatacaaaggacctccaggaaagtcagtactttcttaccttacagaaccccatctagtcctttggcgatctgccttgttcaatatttctgacatgtagaccgtttcgtgatgttcttccgacatcgggatgccgtttgacgcgcgtggggtcctcttcttcagcttatcttctgcactttacaacgctagaattactgtgccagcttcctcgatcaacaaacatccggcgacgttgacttttcctttgtggactgaaaactcctgggcgattgttcactggtatgctatttttgttctgactaaatctgttggtccgtcaaacatgcttctgatatgctagtatatacaatcttgaatggcggttaaacccagggctcaacgagttcacgaaggctggcagaccatgcggactctgtttcctgatgaacccgtccaagctacctctcatactgatctttcttcttatacttccacatctgcttggacctttttctcggcatcatcgagggttctgaccgaaccacgccccacagttggacagaccccgccgatttcgatggaagagacacttcgacgaacgagaaaattactggatggccttgagatgagtttacccgtcgataaagacagagctcaagctcaaaacccgacacaacagggaaaagaaggaaggcagggtgttgtgtaaaatatatgtttttcaaaatgtttagctttctgaggtttgaatgaaggtcatctgcaacagcaatggtcaaatatatcacagctgaatgcacagtatacagctacgttccttgctgatcacgttgtgatcttgatgaacacgaagaagtgtagaaaggaacgaagacaacaagcagaagatgattaggatgctatatcgtttgttgcgactaaaaacattcaacccaactagccttgatttgaattcatcaaccctaacattgataagattcatcatcaaacatcggcaggacgattatttgatcattagttctgataacgctactaccatctcaatcatggtatgttgcatttaattaaaccatcataagtataccggctaacgttgagtctgagcggcactttgtatagtcagccacggtcgatatccctgctcaggttaaagagaaactgaagaaacttcggttttccaaatcaaactcgaatgctgccatctcgtgttcgtccatcttctcaattctgatgaaaatatccttctcactacatattctgatcaacccacacatacatacatttggaaacagtcaagatcaacaaatctgaactcgtcgttgaggaagacgagtcatttgattcattcgacacgatcgaagagcttgctgaagagttaccagggaacaacccaagatatgttgttgtgtcatatcgacttgtacggtctcatcctcttctctctctattgctcaggctttctgttgttgatttttgatatccaactgatcataactctgactgtcctcttctttgatttttttctctttcaaacagacacacaaagacggacgtttgtcaacacctctgttcatgatcaattggtctcccactggagcagcgcctgatgcaaagactcttcacgccagcgcactctccttgtttcagcagaccgctgatgtttctaaggttcgcttctatatattctttctttctctccttgtctgataaaatcggagcttggcgctgatagataacgaacttgggataaacggtaggttgttgaggttagagagggtaccgaaacgctaaccacagagttcctagaaggaatcctactcggttgagacgagagggacaagtcttttatgttttgtcacgtgtttcgaataatctagttcaagaatgagacgcgatgagatggatgtacctgatacaacgtgtgcgatgcgctaaggatgatgatatgatagagagcagaactttcgttatgatacgagaggtcaatcgagaggaagacagaatgaagtcaatttcgaagaagaggaagatattgagttacttggcaggagtgcccaaggcgcccatcaatctatctaggtcaccgaggtaaacactcaacaatgccttcttttcttggacagtccttactccatcgctctttgattcagccatattccctcgtccattcatctctccccatcttgcatctgatcgaacacctctaggagatcgagctgcgctcggaggtctagattgtctaattcgcgaacttttagacggcgatcgggagggtgaagggaaagaagaggacgaggaggagggaagcgacaagtcaggcgaaagatgagggttggatagaagatatggtgaagtggaaggtgtcatgtacggagacagactaccatcggaagctattgaaggggaaaccgttgaattggacatagtaggcgatggaagaggaagcatggtaaatgacggtgtctgtgatgaagataagaatactggatgaaccgagagaggttcttcgactggcttaggatgatccgtcgaggggagtggaatagaatcaaagttgaagggtgattgggatgcgctagctttatgggaagatgcttcggcaggaacctggacacgacgagttgaactctgaggttgatgcgatctagtcagagaaggtattgtagttgaatcagagccgttgtcaagagaagcaggggcggctctccgatgagccgggatgtcttttggaggaagcatgagaccagaagagcgagtgcgctctctatttttcttgttttcttcgaggttgagcctgtcatgagaaataatcgctcgaggagaactgaacagatcttctttctcttctggtcctcctttcctggctggaggaaggactctatctgttctatgagattgaggagtagacctagccgatagtttatttaaagttatccttgatgcagacgtcctccgatcatcctctcctttagccatattcttatatcgtgaaggcgtttcgtgtccatttgaagttctcgacggactctgaatctgaatcacaggccgatgatctgcaacggaattagccggagtaacagccggtaggtcttgtacacacgtcgaagaaagcagagtagatgcagccggtggagtagtaagcctcctattgatcggacttggagacgtcgaaggtgaaggcaagagactggtgttgtttgaggaagcaggagctccggttacttttaagataccgagagatgattgatctgtagggagataagcgtctaaggtttgtatagcatacgctgcacgtttggaagctctgtctgatgaaattctagaagaagatgtcgattgagcatgtagaacaggtctaccccgtgttttttctactgttgaatttgagatattttcttgatcaggacgagccacagtcgccgaagaggaagtagcaaagtctgattcgcttctctcggaccgtctcgcaggaactcttacgagcttggaagtaccgggcgtgtcaggggtagatgctcgtctaggtgacggaaaagaagtagagatccctaaaccatgcgaagcgagattcgaggtcgttgtttgtttatatgagacaggcatttccgaggacgacggtgtggtggttatcaaagcgggtggcttcagatcggtcattcgtgcagtccggcgaggggatggacttgcagagcgttgtgatatatgtttggcgatcgagacaggggtttgatgaagataagcatgttgagatggtggggacccaagcgaactaggcgtagatggacgacgagcatgagagttggaagtcggatgaggtgagtgcttgtcaactctagttcgaatttgagtagatggagtctcgacctgatacatcctggatgaattcggcgtactgggtacatatccttccgcatggaatctatcttcatctgcagtggtattggcaacgttggtgagcctactagaaggacggagctgtctaggcgaggctagcaagattggtagatcctccagattaattcctcctctcaattctatcggatggtctactccgctcgctcctatcatctgaccctgggctctagcctgtccttcagggaggaggtaaaagaagaggaactctaaacttttcacccggacatctttaggaacggtctttcctttgagcatgcgcatgaggcattcgagcccgccggcttgctcgaatgttcgagtgtttcgggacgaatcgactagagcagcgaatagagtgtccagcaaagttgaggcgagtagggaagataaagaaagatcagtttgtgctgagccggacagagaggtcgcaaaggaggggacatgtcgggttagtagcagaagatcgaggatcatctagtcatatagagagaacaagataattagacagaaggatagtcaggaaataatacacgcaagggacggaaaacgtacctccatggttgaccttctgcccccaatgaggttcttgctaggttgatgcaataaacaaaccccttgaacaacttgaaaaattcctatgagttcagatagcgtcggctgaaagtcaacaggtttagctattcacaattcgattgaacagcgaaaaaagacgaagaagcatcgacgggtaagtgaacgatttgtctatgaaaccaaagtgagaggagcacaaacccgagctaacgacttgagagtgaaattgagggagtaacctagatgccagaggaatcaatatgctcgccactgtagtttaccagacaatgcaacatattcgatgtgtttaagaagaaaggaaagagagagagagagagtgtg

SEQ ID NO: 1228 - DNA, 53126 bp, Xanthophyllomyces dendrorhous
ctgccggcgcccgggctgccgacagaagactctccgctcaacggagagccggcaagatccatcgtggtttccctttctctggcagcataagcttcggcatcagcttttgcttgagctttcgctaaggcggcggctttcttttcttctctgtccctcttagctcgttcttttttctcagcggccagagctgaagcagcctcagccttagcttgcgcttgagcctggtgttgagcccgggaaagctgtcggctagagagaggggtttgggaagcagctgagctaacggagccggccttctgaggtgtcgctgagtcgcctttgctcttcctgggttgacggctcggggcagcggtgatgtgtttgggtgcctgaggaggggaatcagcggtgggaatatagtcgatgatgggccgcatgagatcctcaacatcatactgcttagatagagcgagaccacgttcgatagggatccaggttcctatatgacaaagatgttggaagaagttagaacttgtttagagaagtctatatagaataaatagagacaaagaagcgaagcgtaccttggtattttccgtaacctccttggactttctcgtgttcgcccttctggacttcccgctccagaactcgggttcgttgaggtttatcaaatccggccaccttcagaatctgagtggcattcagccaggaatcggatcgtcttctcatgacagccacacctttacacaacctgtcaggaacggaagacgcttgtaagatgttaaacttgatcgtctgggtgttttacaatgaattgatgtaaagctcgtgaaacgtacatctcgagtactctttaggacattgatattgaaaggaatacggaaagagacttctgtcagtactttttttatcagatatctatcggttcggtctgtctgtctctctgacatgaacagggcgaccggctagtcgaatcttttggaacgacgacttacgggacgtttgagtacgtggcctaaagaggattcatcccagaagatgacagaaatgatggtatcaaaaggaagaatcagcacctggttccaaggttatactgctactttgagcaccgtttcagttgatataacgcgtcttgatcttggtatgtatctcatccaggaggagagatcgtgagagtgcgaaaggacactggacgcgtaaaggaggagggctgaccttaaagatctgggtaccatccgtggcgatacctgcaatctgtcctttggccatatgtgatgaacgactgtgtatctgttcttccaacgaggttatgcttatatgagtatttgtgtgttctattgcaaagagagattctgaagaaagtgacgaaagaaggatgtatgcgatggagaggtaaaaaagaggcgagccaaagacgcgcaaggaaaattagtaggtcggctgaagagaaacgttcattagaaatgttgactacaaaccgtattagggaattgataaagccgactacaaaaggtcagactggccgtaaaagactacccaaacgattacagaacagtatagaaggcgattatagaaaatactacgaagaagcttaaaagcaaaaagtcttctcaatattcgctctgcatttgaacaggattgatcatctccttaaggctttctgaagatcatgctgattgctcgtagagtgctccgatcgcccaagacctcgttctctacaagtgctagaccttcgttctcgatccgacacgcttccagttcggctcactcagaaacagtcagcatcttacctcctcggttggactacaaacctttgcttagctcgctcgagtccattcagcggaacgcgacggtcaggaatgcatcaatttcagtcgaacagatcgctcaagcagcttcgctcgctactcgcagggccagtttaatcaacgagtcgaatgtgctcaaacaccaacgttcaatcatcagcaatcgagtcagaaataaacaaccaggcgcggtggacgatgctaaacgactgaaaaaagatatacagaccctgatggctactttggccgacgtcgagagttccctgctcggtctttctttgaggattccgaacgacacccacccagacagtccgctcggtccagaaaaaaatgcaaaagtagtagctactctaggcccggagcccttgccggcagacccaaacagagaccatcttattatcggacggcaattaggggtgatcgactttgaatctgcttcgatcgtgaccggttcgaactggtactttctcagaggcgcggcttctgtcctcgagcaagcccttcagtcatatgcgctctccgtcgctgtcgaccatggtttcaccccggcttcctgtccagacgtcgtccgtgctgatatcgccgctcgctgtggattctctcccagagacagagatggctcctctcaggcataccagataacatcaaccaccccggacgcacagcaattttgtctggcagcaacggcagagattccgctcgccggttcattctttgatcggaactttttctatcctgaacttcctcaacgcgtcgtcggtatcggcaaggcctatcgaccagagacctctggggggaccgacgtcagaggactctacagagttcatcagttttcaaaaatcgaactctttgttgtttcggatgaacagagctcggaacgcgagtttgacaggcttgtctccctacaaaaagatctcgtcgccggtctcggtttgaccgtcaggtgagtctcggtctgtttgttcgcttgtagtcggtcaattcttcgtctcaactcgggcgctggatgtgactcttatggatgaactccctctcttttattctgtgatagagtattagacatgccgtcagaagaactaggcgcatcagcatacagaaagttcgatatggaagcttggatgcctggaaaagctacctggggcgaggtccgtttttagttcttctcgtgtcccgttttccctaacttattctccactgtgtaccttgtttcctttcattttttcttttccaaagatctcttccacttctaattgcacgtcctatcaagcccgtcgattattgatcacatacaacacacctaaacccgcacttccaaccgacccagcggacaaatctacaccatctctgccaccgacgacgttcgctcacactcttaacggcacggccgctgctatccctcgtttgattgtcgctctgctcgagaacggagtagttctctcctctgctgaacgtccagaaggatcactgacggaaacagtcaagaataaacttgacagcagacgaagaccgatggcaaccaggacaaaaggcgcgaggaaagaaacccttgatgaagggatttggatagagaagatcaaactgcccactgttcttcgacggttctggatcggaaaagaacagattggagatgtggatattgaatgggtttaaggaatgatgatatacgatgaatgttgatagatatacattatttgtacgttcttgttgttcgtacggggtactcggcaagtcgcaaccatgtcgatagctcaatccttctttcctttctatctattctgacgatccgagcgtacgtgctgacccgatacagtagatagtgagggtaatagaatcattaggatttccctatcctcatcatgatagaatgtattgctttggtgttattcatagacaagggatcacgtatgccctatctgctcggtgtctgtctatatgtttgcgtcatagaggtatcaaacaccgtgagtggaggcaggacggggaactacttataatctatctcaacctaatctccaatcagacatctcctttctgtcatcgcaatccgatctcatcaaaaaccgatatttaactaacagaaccagcacaccatggcagctctcgttacttctgcgctttcaaaggcaacgacggccgtcaagtcgacacttgtcagtcagccgaaacaacccgacgactggatcaagtggacagaggtagagaaaccggtagagaatgaagaggaaaagatgttagccagacatctttttatcactactactttatcgtgaacaaacttagcttactcggtaattgtgtttgcggccatacagtacaaagctgatagagattacgggtcgtatgcaggctaggaacatcaatctccatggcaaggccttccgagtcactcatgttcgccacctctctccttgtcttaggactgcccataggttactaacataaacaatcccctttctgcttcctaaacaaatattcaccgtaggtgaagtcgctcgcctttgtgaagggttatttaacaatttcatccgatcttccgtcccacttgcaatacggtctcttcgcttcacccggcaagagatttgatgtcatcgggcggtacgctaatgaaccagtacatatactcgatgacaccattaagtctcccagagggttgggaatcaaagtgtttggcgtagagggaaatccgattgagggaacacaaggaacaggctcgatggatttgcattttaacagcgcgccgatgcttggttcgttgctgatctgtcttgtagcaccctggggttaatgctgttggtctatacaaaagaaactgatctctcttccttttgggttaccatagaactcaccgatcttgacacctgtttagaaatcttcgatctgcgagaacggtactgggacgacaatgccgatctccagaaagagttggccaagcgagcggatacgacaaagcagtcggctccagcgtcattacctaacttgccggtgatcgggctacagatgtacacccagggtaagctactgtactcactgactgttctagccatcgaaatgcggactaaaatagatccaagaactgatctctaaatccaaaatgcgcatgataaaccagctgccttccgatttggaccatatgttgcccatttctcgctgaagcccacaaacacgttccaaacgtcgctctccaactctttacagctctcgtctaccgcgtctgctgatgaacactcgattgaacttcgaacatacttcgcaaatcatccggctcaatatgatctcttggctcaattttcatcctcccttgaatcacagcctgtcgaggatgcttctcaggtttgggatgaagcctatgctccttggatcaaacttggagaactcgaatttggggtccaagatagtctttccaatgagaggaggcagtggtgggagaatgagattgccctctctccattcaacgcgcttgaggaccaccgcccgttgggttcggtcaaccgattgagaaagagggtttatgaggcttcgagaacaaggagggcggcggtgaacgggacagaagttaaattccccaagagcgcgacagagatgccaaactaagaacaaactatcaagatcgtcatcctcacttatgccttgagtttcgttgtttaactgcactctggatatttccttcttaatcctatgtatcatctatcgatatgtattaacacagttatttactacacgatgttcgaatgaaagatgaaaaaccgcgcgtctgataagatgaaatgacgttttcaattttatctttttaaacttcgttcttacccccaaaaatcaagggtcaacaatgcttttcaccgaattctatcgtcttttccgtttattcttgacgacgaacaggtgattaggaccaagctgaagatgcaagatatcgtctctcgccttcctccggagataggactccgtatcattctgtccttgtctttgcccactctcgcctcgttccaggctgtatgctcgacatggttacatcttgttcaagcgcacgaggatatgatctactctcggttggctgaaatttgtgctatctcgaacggttctggggagaagaattcgctggacaaactatgctcgaggcttgagagcagatattttggaaagatgacctggagagaagtagagaactggaaggctttttgtaagtccttcgaccactctctttatctatgtctgtgtctattgggcatctcttcttgaacaacttatataatgattgataaacgatccatctgaatgactatccttgagtaaggtcataagcagtctagactgaacaagaacaagtcggatcctgccatgtacctatccagaatctatccaaacgaaacacctccgagacacgcctggcggctgaaggttgacttgaaagagcgactgctgctgacaacacatagatctccagggttgaaagttcatgatctcgattcaatggccgagctctttgtaatccaaacggtgaggatcgatttttctttcgctttgatctcaagcttttttttggatttaatctgtttcttcgtgttcaatcgggtttgccggttaaggtgggaccgtatactcatctagaatacgaccccgacgcaggcatcgctgttttcgatgaggatgatgacctagaaatctggaaactacaaaaaccctctcctggacaagatctctcagacttcgctcggggtcaattcgtcaaatggaacaaaattcctgctattcctggaatgagagggtttcatctcaaagacgggtgagttaaacagagcacccctttccatttgacaaaagtgatttgtgaatgctgataaagttttccggatcaaatagaatacttgctgttgtctcccaacagggcaccacgacatactatgacctagtgacttcacccgatcagcctactcttcttcaaactctatcccacgatcgaggtgccattggatatctcgacaaaacaccctccacccttgtgctttgccatgatgatctgactcgatgttactcccctctcaacggttctctacttggcacattccctccgccgcctactgtttttcttgcgcattacactatccgtcgaccagaagcgcgaaggggtttggatgaacttgtgagcacggacgttgtatatacaggaatgatcgaatcggttgatttcgaagagatccgccctgcggcattctatggtgggaaagaatggaaggcatgccacgtagacgggccatatctagtcatactttcagacatgtccagattgtttgtctgtacagactatgaagctgtcttgagagcactggaaggagaggagagggagagaataatgaagagcacttgttgtgtcttcgatatcgaggttggagagataaatctagacgctgacccgggaatggagagatatacgggtgataccaattggttatcagtatgtgatggaagagcggctttcggagcaatgtacgttctttcttctgtacacttgaacaatatcgtattttgttttacaatcgctaactcaccgtgtcaatggccttccaatgcaaacaaacgaaagtgatcacgtcatgatccttcctttgccaccaaaatcttcgaccgcctacgtgaaatctccgcatgcgcttgctctcccaacagctcgagatatggagatttcatgtctctcacttgtcccagacggtttatttaccatatggggatacttgcaacgcacttcctcttcacccggttatcaccggatgatcctcagaaatgccgttagggtcctttggtttgatgggagaggaaaaaagattgaaagtgaagatagagagttagcgctcgagaagtcggctactgagattcagatggaggctgaggggtggactgccagtgacgatgacggtgaagagtggactgatgatgatggtgtagaagagtggactgacgaagaggatggttagagaatgagcgtgctcaactgactttcacccttctccagaattgaagttatgcaaaatggatgcataccgtctggggtcaaagaacgaagaccacacgttggattttaaatgatatcaaattgcaaatagacacgaaagatcaaactcatatatacacagccagaagagaagaacaattcagactaaatatctgacagtctcttccgtttgaggactgttcttgagagatcttttctcaagcgtgatgagctttgataaacttgatggcgtttgccgaactagcacgatgattgacgagacgagaaacaattggaagcaatccgtttaataactccttacgatatcagaagaaagaaacagaggaaggagggacatactctgtagcaggtttgacaccgatagctttgtcaatcaacttccccgtcttcttttcaaagacaaagtgcgagcgtttcgtactatgaatttagaagatttgatttgataggaggagaaacctctcgaattgatgagctgaaattcaaataaatagataaatcggaaaggagacaaacgagttcccgttggaacatccgagcacaccaatcaagtctgcttttggatcagagagcagagagtagttcaacgtgtgcttcgtaatccacttctgttgagccgtcggtttatctttgctctatgatacaaagatgattgacaggacaagagggcatgcgggtgttatgtttcgtgagttcatgacgttcatgatacatacaaacgctcaggacttacaaggccaacgacggtatcttttgtgggttgagcagacgagagagatagaaagagtatggtaagtttcgtcagtaagaagaattggtaagagaaaaagtgacagcagcacgtacatcctaaggctaagaactcatcgtttgaatctctataaagacaggcttggttggtacatccgggagtatcagctcgggggtaggtaaagatgacaaggccagtctcatcattgacttagtggtggtgttgttgttattgttgttgttattgtttcgaatggaaagcaagacggtcaacaggatgaacatgtgcgaggttgcgataggttccctacagaagagaacatgttgacacaacagagacgatatcttactaagggtatggacatcaacatcctcatccttctcgtttctataagaatattccacgccaattcagatgccaagcgtgttgcaaagtattcagcttcgagagaaggttcttgaaagggagagaaggactaacttgaggatgatcgaagacagggtctgcccgagatccagaggacctatcttttctttgtcttctttcttcttctcggctttgtccttaatctcatctttgtttttggtaccagctttatctctggacagagcgctcgttctcttcgctggctcgggatgaacagcgggctctgactctgattttgacttcttggacggagcaggctgcgtttgatccttattgactcctcgttttttggtgccctagaatcaaaataagcagatctcagaccatccatccagcgtatcattttcgaatcgtgagagttaacaggagtaagctcaagccatagatgttttttggatggcgtgcgcttgagaagacttaccgttgtcaaggttgcgtcggaggtttgtgcttggatccctcgcagtcgactggacgttctggtaggttctcgcacgactttcgtagctggctctgaggacatttctttacttcgcttattgaacttttagatgagagggtagagaggagactagatcagaggagacaaaaagaggattatctcaaggacatgttcaatgattcttctatttctgcaatgaatgtttgatcggagttgaccgttgatgtgttagggttgctatgttgtcactcgtagtgcacccacaataaggtggatgagaccgaccaggcaggaccataaaacgaggactacaaagaaggtatatcactattctaacgcgcgaacatttctctgtgaacaactcgaccgaattttccatcactccaggtatcagcatggacactaggttctgtctctgtggtatgtctttctctgggtttatttctgacgtcatatcgtcgtccgcctatagcaaacgactactcgaacgaggactccgtatatgttgatttatagttgttctcctcgtcatatcgcaaataaccgtgactcgttgatgatctttttaaatcagtggaaggtatgatgtgtgaaacctcaaacgtgttttacgacaggacagatggggcgagtcatttgggcctcgcacagctttcgtttcgccacactcattcagccatactcacactcgctcggcccttttactccgaacgcatcattagtttttcttctcctttttttttcttttttttcttagtgaagaacatacggaaagatttctattccacatacatttcaactttgttcaaaactctcacccaccttctcttacacactctctcttatatctgtaaagatgcctatgctgtaagtttccaattcaataccagcacacacggtcattctcgtcgggcatatacgctatggcggtctcttctgccctttctctttcttgctcttttcctttttcttcccttttcttcctgttttcttaccttcatacgttgcttcgtcttcatttgcagtgacgacccgtctcagaagtacaagccgtacccgtctatcaatctgcctaatagacaatggcctagcaaacgaaccaccaaggctcctatgtggctcagtactgatctgagggatggaaaccagtccttggctaaccgtaagtgattcactttccctcttttccctcttttccctcttttccctcttttccttcttttccttctcttctccttagttccttttttttaatagttgtttgctcctttttcgtgcgcatgctctgattctatccaaacgtcacactcatcgttgtatttcgttttctcatcttcctagccatgacgccatcgcagaagatgacattcttcaagatgctcgtcaagattggttacaaagagattgaggttgcctacccggcagcttctgaaattgactggagtttcgtccggaaggtggttgaggataacgaagctggagacgacgtatttattcaggtcagtccacttcttcgccactttcccctgtttctggaagaaagacgtattccagaaggtacttaaccggcgatttccttctcaatcctcttgcgcctactgttaggtccttactcccgctcgagccgacctcatcaagcgaacattcacctcaatcgctggcgccaaaaacgtcattatccacttgtacaacgcaacgtcgcccctgttccgatcggttgtcttccgaaactcgaaagaagagactatcaagctcgcaaccgaccacacctctttgattcgagagctttgtgaagagtacaccagagagcacggaacaaacttcaggtatgaatactccccggagttgtttactcagaccgagcccgactttgctatcgaagtttgcaacgctgtcaaggctgcttggtttgctggaaagagtcaggtttggggtgggaagtctaaggttcccagggaagacagaatcaccttcgtaagtgtttatttctttttatctttctttgttcttgacccgggtctagggtgtctgtgtgtgcgcacatcgaatgctagtcacaacgctcaccattttatgctttgacacccagaacttgcccgccactgtagagatctcgaccccgaacggatatgccgaccagatcgagcatttctgcaacaacgtttctgagcgagagaagattattgtttcccttcacccgcataacgaccgaggtgagaatgattcatgagtctacctctagcttgaaccaccttgtcctgactcgcatatacactcatggttttgataaaataggaaccggaattgctgccgccgagcttggtttgctcgccggagcggaccgcattgaaggatgtgttcttggaaatggagagcgaaccggaaacgtcgacttggttacccttggattgaacctgtatactcagggtatccaccctggaattgacttctctgacttgcccacgattgttgacgtcgttaccgaatgtaacgagattccagttcaccctaggcagccttacgctggtgagctcgtgttcaccgcattctctggaagtcaccaagacgccatcaagaagggtctcgaggccagacaaaaggcaatgagtctgatggaaaacaaggagccaggatgggacatgccatacttgcccattgacccggccgatgtcgggggaacctatgaagccgtcatcagagtcaattctcagtctggaaaaggagggtgagtatagagaggttgttctctactattgttccttttctgcttgctaatcatcgttgtattggcctttcctctcgtctagaattgcctacatcgtcaagtcttcccttggattggaccttcctcgtcgaatgcaggtcgcgttctaccaggttgtccagcgaatctcggaagagaccggtaaggagcttaccgtgccagatatcacttcgaccttccagaaagcgtactctcttctgcaggcgaatcagcctcgattggctcttcgagcgttctctttgatcgattccggttccccgactccgggaagtactccccgaaacggagaggacggagaggaggccccggagaggacaaagtcgatcaccgcaaaggtcaccgtcgatggggtcgccgtcaccctatccggccaaggaaacggaccgctatcctccatgcttaacgccttgagcaccgttcttggaatcgacctctccatcagggagtattctgaacacgctgttggtggtggttcggacaccaaggcggcttcctatgtcgaggtcattggaccggacagtgatccaaaggataagaccaagggtggcttctggggtgttggtgtggattctgatatcactgtgcgttcttgattctattcagatatacaataacatcatcatctgaccaagcattttcctttacctttcttcgtgctacatccaacagggctctggattgaaggccgtcttgagtgctgctagcaatgctatcggtgaccgaaagttggacatcggagctttgcttgaaaaggccacgaagaactagttttcttttgtctctttccttagtgatctatgatgtaacgttaaaagaaaatgatttcctccaacacaaagagagaaagagttttcattgtaccgatgtgacttattgtacttgcgaatgagggatgtttgtaagaaatgagaacacggcaacaaaaagacgggagaggagtcatcgattgcgcaagtgccagtgcttcaactgtgaatgaggaccgcatttggcctttcaccaaaggctgaaaccggctggctgctgcgcttcctcctacttaagccttccacgactcgttcatctctttcatctcaccaacctacccacctcctactaccaccacccatcgccacctcaccttacacgacacatatacataacacacacagcacatatagcacgtcaatatgcttccattcgccttcctgctcacagcagccacggcactctcatccaccgtgtctgccaccccgctttacactcccgcttcggctcctccttcggtcaggtccactagggtgtcaggcgacaaggctcctattcacaggttcgctatcgatcagggcattgagcaggtccaggacgggtacagttagtatctttccttgtttcttttcctttcctcccttcttctgtcgttcttgtgtatgtgtcatttgtcgccacgtttcggaaagaaagttgatatgaagatgagatgtggcggaagtttctcggtgtgatccgataggcctgctccggttggggagagaggtctatgtggcaagatctctcaacttatctttcgaacacatgtcgagcctctcaactatttttcttaatatccttgacaatactcttcctctgtttatgacgttcccgcttatatgtcttgcgtgtgtatttgggtagaagattggctcaggaactaaacaatgctttcttcttactctagtcgttgtccttaagcccgaagcctcctcggaatttctcacgacccacctctccaagatcgcagaggagcatgccgccgatccgttctcacgctcgttctctgacggcgaagagcatggtatcaagaatgtctatggctcggatgtccttcagggatacgctggaaggttctctcctgacctaattgataagatcagagaggagcccatggttgacttcgtcgagttggattctattgtcaccactcaggagaccgagctcggagctccttgggtaggtttttcccttctgtaatcatgagagatctagggcttactagatctgaacatgtccacagggtttggccaggatgtcccaccgagagaagcttcggctctcaacttttaccaagtacgattatgattcgtctgccggagagggtgttgacgtttacgttgtcgataccggtatgtcttctttcctctcacctgtaggatcattgatagtcatatgttttaatgctgatcaatcttgtttcccatatacttttaggtattaacatcaatcacgtagagttcgagggtcgagcctcttggggaaaaacgattcccaagaacgacattgacattgatggaaatggccacggtacccactgtgcaggaactattggctcccgaaagtatggtgtggccaagaaggtcaagattattgcagtcaaggtcttgggaaccaatggatctggaaccatgtctgatgttgtcgatgggtatgtctgctatctccttactttgatttttgtatggtcgttgctgatagacggtctcttctcattgtttgcagtgttatctttgccgctgaggctgccgccaagaaggccaaagctgctgaggctgagttcctcaagagcggttctacctcccacaagggatctgtcgccagtatgagcttgggaggtggaaagagtcccgctttggaccgggctgtgaacaaggccgttgagggtggacttcactttgcggttgctgccggaaacgacaacaaggatgcctgtaactactcccctgctgccgcccagaacgccatcaccgttggtgcctccgagatccatgatgagagggcctactttagtaaccatggatcctgcgtcgatatctttgctccgggactcaacattctctccacctggaacaccaacaacgtctcgaccgctacgttagtgatttcctttctttgccatcgactcctctggtatttaatttgactcgacttgttctctaccctgacagtttgtccggaacctcgatggccactcctggagttgctggcttggctgcctacttgattgctcttgatgccaacaagaagctggcttatcaaccggaggccatggctgctgtttgggaggctgctaagtccctcttgccttcctacctcggtgctttccttcctcgagctgagattgctcctgttccccataagccgatcactccggagcagctcaagaagttgatgattaagcttgctacccgggatgccctcgtcggtgtccttcccgaaggaactcctaacctgattgcgtacaacaactacacactttctggttgaggaatgctaacatttgaagggtctttccctctacgctcttgacatacactcttcatatatccttctccttcgttgtatatgtctctgttttatttttcatactctcgacacgctgtttcaatactctgtctttcctcttttgttttgttctttccatcaagccttgcgctctggtagccccatatttcctctctgtcctttttaacatggataaaatgaagtgtaggttcaagaagtgaaaatctcagcaaagcgaatgacgaacctgggttgttggctatcctacttgataacgcatttcatatatctcgcctactccgagtcttcgatgctctgttattcgttcttgcgcttgtaggctgtttctttgtcgttgagaccaccatctcatacatcatcttaattctctctttcattgtgatctataaacttcttgatggagacagaaccaatcttattgaggatgtatagtcttggcgcgcaaacctgtagatcaacttcatgtcagaacacatgttatgtacaagattcatagagcccaaatcaacctattgaaagaaaagaccagcggtgtaaagaacaatacgatgacacaaccagagaatcattctttggtataacctaatgatattcggtctttcgtctgctttcttgccctgttgtaaaaatcgacctcaagtatatagcacaggttaaccctaatgtcatggttacgtaagtaacattcaatcaatccgtcacgcccactcagccagacatgcgcgtctctgctggccggtctcagcctggccggtttgggaaagcaagagggagagacagaaagagcggcaaagaagagaaagagagttagaggaagagaaagaggaaagctcatcaagtcgttcttcttcttcttctttcttctttctctcaaccacattcccactttgttgttttcattttgttccatccatcctccagttcttcaataatctcatcatggccgccactaccgagtctaagtgtacgtgatttctttagttacttctctcttttaagtgttcatcacgtgcttccaattcgatccatccatccatccatccatccgtccatcaacacgcgtctctacatgttgaaagacgattttctcttcctcgagaacaaaaattctccgccttgcatcccatccctattcttcgttcgttggtcgagaagttcaacagatggatgaacggatggatggatgatgatcaaatgaggatggttcgaatgattgcgtttggaccagatgacctttgcgcgttgtggtttcatgctgtagagggacgcgtccgacgcgtctcgttcacgttctgaacgcttcatatgcatttcaccgttcgaatatgcttgaatcactctgattgactgatcgactgacctacatatccacacacgtgtacatacatacatatcttccagctgtcgccaagaagcccgttcccaagaagggaggagctggaaagaagcctagcgcttacaaccagtatatgaaagtccaactcgcaaagctcgtacgttcttcttccgttctgttctgttctgttctcttcctctccttctgattccaaactgaagatatttcaatgctttaaactgagtagaaggagaagaaccctgagcaacctcatactgagagatttaaattggtcgccaagatgtgggctagcggtacgtaccctctctccctctctttcttgtgctctgatgactgactcccaccctaatatccgttttcttctcctttaatatttaaattcaatcagctcccgagaacccaaaggtatgcagctcgacctttcattccgtcgacttgtagaaacgcgtctaaacttttttttctttgtgcattttgacaggcatccgagagcaaggcctaattgactttctgtccctcttcttttaggtcacctagttgtctagccctctggtacctttgttctccccctgattaacaatcctgtctcgtcttcctcctcattctccagtctcttgtctcttcgttccataccttttctttcataacctacgttctgttttgtatccatgtcctttcccttccttgaatgggtcttgtcaagtcctcgatagtatgagcactctggttcacctcaataaactctttctcatcttcaaacctgtcagataggattgtgtcgatggatgagtaccgtttgtttccttttgtactgagataaaccagagataaagacattgtttctaaagaaaagaattatgaacggagggtaagatcaggaaaaatagatgcaactaaaatatgtagacaaaaaaacgaagtatgaagagggttcgcggcggtaagagacgctataagaatggaatagtgaaaaagagtcggtacaataggaattgttaagacaaggatagcgaaaaagaagagagaatagagacaaagaaggtgagtcaaagataagaagaaagagagagatatatatacaaaatcgtgggccagcgtgatcgtgcggaaggaataaatgatacggaaagaaaaagagccaagaaagaccagaagagaaaaatgatgagtagagaacagacaacgccctagatgactccccagcttccaggaagacctttcaacccgccttcgtccaacccaactcctctcgcccccttcaatagcctaccgacctcgtccctgtctacgagagcaatgtccctcctcttgacgccaatctctaactccaagtccaacctgacaaatgacccatttgtctcacttgttgaagctgagcctgctccatagggcggagtaccaaacgtggatgtaccagagggtgaagaaggaccagggagagtgagaaaccttccagagggcgctactgaggtcgttgtcgtagtgggttcttcaaggcctgcaccctcaacaatttcatccaatgccatcttttctaaccgggttccatcccatgcctccacttcccctcctgttgttgctgcttgtgacttttcagactctcgttcggcctgaacgacgggcgagtcaaccaagacccagccttcgctccctcctaagccaagtcccatgccaaacgaggaagaatccgatttgcgcttatgcgattgagagcctattccttctgtggaagtcgagctatcccacatcgtgccttcatccaagttcaacccaagccatcgttccagaatcgagttcacaccctcagccttgtcatcctctctagacctcttaaacggtgacgatggctggaagacaagcagatctgccggggttgaaggcaccggtcggaccagggtcaacgacagagacttcttctccatcggacttgacaaatcgatcgactgccagggatccagattattgagctcttcggctgactgtggcggctggggctcgggaaggtcacatcgatcgagcaagcttgaatctgtcgcgttcgttctgtcggttaactcgcacacgccatcaatctcttcttcactctcggctttcacagcctgaggcggggtggtcgagccaacgtagaccccaccgtaaccggcagaggtcgaggcggacaagactctacccaaaaagccagggagcgcagtgttctttggcggagctcgcagcgtggtggccagtcctcctgtagaaggaaacgtgaacagggcaaaggagaacaggatgaccatcaatgcgacccctccgacccgtttcccttcaacgacaccaatctgatgggtcgcggccgaccggtcccgctctgagcgcttggcgcccactctgcctagctcgagggatgtttcgctaacgtactggtctgtgagaccagcgctgagcatggggctaagctctcggtttgggtctaagctagccatccgagtcgggggatggatagccgaccgacaggatgggcaagttttaggcgctacattctgaagttgagaccgaagcgaagcaagctcgacctcaagcatcgcttcacgggatgtcgactgatgaagcaaagttcggaggttcgataggtctgcttggaggcgaacaagcatagaggtgtcgagaggtgtcgaggactcgggcgagacgattggctgacaggtggtggactttacatccgccgaagacactaggctctttagccgggcattctctgcctcaagagcctcaacatggatcgccatctcgtcaaactgttctcgttttctgtgcattggaagaacaatagtcgaggtcaagtcagctgactgaaaagagtaaggaaccagatgaatgaaatcatatgtacctttgcctagacaggaacgctgccgcccggtttttaaccagcctggcctccttcttgctaagaccagacacgtccggatgctgaaattctttggtgctcggcagttgctttcttttctttccttttccagtcggtgccccagtagcctggcaatccgattcgtcgaggaaagtagtgccaatctgaggttcgggactgcccgaggtggaggatccactgatgggaacctttcttgcgtaaatgtgaggcacatcgtctgttgagggtgccatacgttgcttcctggtcagctggggatcgaccgacactattggtgtcgatgccatcggtgttagtagccctgactcctgagccgatggaggtgtctgcggcatggacgaatggtgggaggatggagaggttgcagaatcgtattcggtagccgggtaggtggatgaaaattcatgggtcgtgtaaggactgaagagagtggctgtatttgaatttgatgggggtgggtaggaatgaacgagacctggcaaaggagctgttaaacagagaagcaaaggaggcgaagaggaacattcagctggagggaaactacaggaatgaacaagaacggcacgaaccgatgtcccctaattcgatagtttgagcatcaaactcggaggaagggaaagaagagtctccaccttcaaacgcctgatggtagagcagagggtccaactgatgagtccaatctaaactgatatctgccgagtgttcctcctcttctggaggtgatgatgacgacgacgacgacgaggaaaacggtgggaaggtgaatgtctcgttcgtcggtgtggatgaagaagggtctgtaggaaaaacgaggaagtcaaaagacgggtcggccatctttctctaacgttcttcacttccctgatggaagagcaggataagagatggggataaggaacgatggggaagaagaagaagaagaaagacgacgaagaaaataagtgatcaagagcaaaggagagaaaaggcacgaggcacgagaaaaaggcaccaggcaccaccaaatagcaaaagaaggagcgagaaaaaaaaagaacgcgtggcagccgatagagaaaggacggacgaccggttagatagccacagccacaggcttgtgatataattcaaatatacgttggagtcaattcaaatattctccgtccttccacgtcgacacaccgctggaacgtgctcgcacacttacttcatttgcttcttcattcccagtcgcatacatacagagcttacaacggcaacagatgtcgttcgagccacccatcgtttacagaaaggtattccttttgcgagcctcaccattcatggtcgacttctccggctcagatgatcaatgtctctttgttttctcttctatgcttttgcttgttctcattgtatatgtacacaccatgtttagaacgaatacatagagaccgtcagttctcagagagtctgtttggttccaactggcagggcaagaagcttacaacgttagcactgttctcggatcaggatactggaaataaggtccgtcggtccatctcttctccttccttggggcttgtcccagacgatacatatacgcacatacatgataaagacacttattgattttaccaatccatctgaatccctcaggtctctcgcagaggttcgtccatagacgtcacatcgtgctcttcgttcatgaaacatgcccacgctaaagctcatacaccaacccttccagctactattcaaggtcctcagaatatcactctcggaggaaagacaatcatccacccaggagtcattctcagaggagatcttaagagacaaggcatcggcaacaaggctagcgtagtccttgcgctcggcaaatactccttgatcggcgagggctgtgtgattagaccgccaggcaagtgctatagagggtgggtagatcaagttttttcattgttatatttcttcctcttctttcttctccctttctttctttcttatcctcgatgtgtctaatcaagacgaggtactaatcaaacatcactcttcttacctttgaaagcgtattgtgagtccttttccaatgccggctgtctcgtctccagaaaccatccggttgacaggatcgtcttctatcctactcgcgcgcgcgatgcacagtaatttttatcccgttagaataggcgatcacgtccacatagggccaggttcgatcgtggaagccgctcagataggaaactttgtacagattgggaagaattgtatcatcgtgcgcgttctctttctcttttctatcttcccagatcgggttggattgggttgggctgacggacttgaatcatcacagggtaaattcaccatgatcaaagattgtgtcaagatcggtacgtctgccttccttttcattccttctctcttcttcttacaacactcttttttccgtcgagagtttacatatggaactggtctgcgaacaatggcccttttggtttttcttcctgctttcagcggataacacggtaattccggatatgagtgtcattcctccgtttgcgcatatatcaggtgccccaggtgcgcatacatgcttctttcctttctccttctctccttctctcttacgactgctcaactacatcctttcctccctccttttgactcttttcttcaaaaggaaaacatattgaagatttacctgagtcgacagaggaaatcatgatcgtcaagaccaaagctttctacaatcgattcagagctgattcatctttagtgggacatccatctcgggagaggtcgtaggacatagatgtttacaggcgttctggcttttggttcatgattcatatcttcctttctgaaatttcttctctgccctcacatgcttatctttcgtcatcatcgttgttacgcgtatacccattcattcataactatttcttgatataatttttttttctcttggttgaccagaatctattggtacaagatgaatggacaggattagagaatgcaaagagcgacagacaaatgaacggttgcgaggaagagatggtgtcagacagaagaaagagaacaaaaagaaagaaaacaaaaaggaaggaaggaaggtctattcatatttcatatctcaataccctcctctcccaccacctctaccccctctcccaccattgttgctattgaaacctccgtaccctccatatccgcctctattttgagcgggtggcccacccgggcctccatttccggctccataaccgccatatccaccgtatgaaccttggttcgagggtccttgttgatacccgtatgattgagggttgggagctggtcgattttcaatcaaaaacatatatgtagagacaggaaagttaagaaattcatcatgatgatgtgagtagtactaatgaagaaagggatacatacgaagacctccggcgctagctccgtatccaccataagagggtgcgggaccaccttgggaaccagctccgtagccaccgtaaccaccgggcccaggtgccggtcgacctccatacgaggctccatgcgaaggaacgccagaagcgtaacctcctcggttgggcccctgttggctgtatccaccccgagcagtctggtagcctcctccattggtagcagaattagagttggagttataaggtgccgagtttccgttgtgacctccattcgagaatcctaaagaaatgatgaagaatgttgatctatcagctttttcgtgctataagcccttgaacaagaagccaaaaggaatggaaacgaacctcctcgatcgttgccgccgtaaccaccccttccaccccctctacctccaccagctccacctcgatagcttggcgcgccggatcctggcccacccaacatgcctccacctctccttcctcccgaatcgtttcctcctcttctgattcgatcatagtcaccctggttcaacgtctttcgcgccatcttcaaacccttgagaagaacacttcgatgaggggatacctgatcggggaagtagtaccatacagaaagcgatcggtcgtcgtagatgtctcctagttcggtggacggtagtggggtatagaacgtagagccgggcacacacgcttcgtcagctaaaacaaaaccagtgattccacctgataacgcagcgtttatcggtacgggctgtagtaagaagagtagaatgggaaacaggtcaaacaatcagggggataagcaaagaaagacagagaaaaggctacatacatcggttgttttggactttgtatagagcttacagaacgaatcatacaatcggtgatcgtccgaaacgaacaacacatcatgccccgatgtgttccttctgatatcttcctctgataactttggatatccctctgccatggctgtcaacaatctatcttggtcaatgaatggtaggagggcgacaccttgccattgcatctttttaccgttcatgtcgatatcaaactcggtgggatagaagtcaaggataggtgatgattcgtccgtcatcagcggatggaaaacctctggaatatggattttactattattgttgtgacgaattttcgcccaattgatttttcaataccatacaccgctcaagagaagagtgagaacgtacaagaaagaagttatcttacctagcagcagggaaaacacccatgagttgttcgtaaggcttgaaaggtgcaccaagagtgaatttgatgtccatcgtgccgacctcttcgaaatcagccgcaaagggggcgaaatgtgatggataataccactgccacgaaggggtctgaatccagaaaaaaagaggagaagagcgagatgaggaaggcgtaaactcaaaggcgtagataatcaaaaacgtgaggactaaccccttgatagtagtaatgtagcacccaagagagaccctcgatgtaatgaacggtgagcctgaagtgaaaagtatgagtagctattggtcatcagaactgaaaaagggacaaagcactcgaatatggaacgatgacaaacttctttcggaactctttgtcgctgagttctatcccaaacttttctctatagtatctctcttggtatccaggttcccagagcctaaataacagaatcaatccatatgagtattaaagtctagaagcgaaaaccacgaaaaaagaaacaacaaaacgcacttgaccgtgtcttcagcatcaaccgttccgtcggcgtttaccttccttcccttgggcttctcaactggctgatccatatgcggcacactcgtcaactcggccacaggaggcgcctcatccccatcttcttctgcctcctctacatcagcatccactagattctcgtcctcatccgcttttctctttgttcctctcgattcggcatcggacgaggcagccggatcatcctgaacgacagacatggtttcttcgatcgtttccgcaatctcatcctgagccccaccgctaagctcagctttgagcatttcagccgctgacatgttggccatccggatgtcccgtcggttttttaccagatcattgttcgatccaccgattgctttcgctgccttcgctttctcagcttcgctagcggaaacagtggtgaaacctggtcgggctggtaaagatggatgagcagcagatgagggagccgattgaagattgatcacttggacaagctcatcaccattgattagcacaccaggtcgggtcgtttctacttgaggtggatcgcgacctccatttgctcgacggtactcgtcaaccttccgacgtttgttgttcgattcttgtcgctcctccactgtaccagaacaacaaataatccagcgcctcagatcagcggcatgaagagaggagcaattatcatacaaaagaatagactggacatactttctcgtcttcttcggaaaatcgcgccctcttcttttgccagaccctccaagatgacctgcaccttatcgagctccagatttccatggttcgtcacatatccacctaatctaccaagttctgatttccagattcttaacagcgtatcaatcgcgccctccctgatctccagactaggaagatgaggcaagaaatcatttccaacgaagaagatgaggaagatccaatcatccatagctcgttcgagatcgaatgggaacggctggttaggaatgttgagttcgggctcaaggtactctcgcaagattgagatatctaggaaaatgaatggcttggtctctgatagaggcttgccagtatcttttggaggagcatcatctgcgcgggaaaaagaagagccaaagtcgcggagatgaatttcaagtcggctttttagcaaaagataagaacagaggaaggctgaggaaagataacgaactagtacactgagcggccatatgacccatttcaccacatttcctgcatccctgtccgccattgggctggaaaaacacatcctctcggagtaccttgaaatgcggctcatgtgtagctagcgcaagcatgatcaaatcggcatcctatagtatcacgagaaagaggtaagggattcagctcagaccacatatcacaaaacgaccatgcgagatcctaaaaacaatcttggcttacaagtccgtagatacagtgctgagtgttggggtcgtgttccacatgcgatcgctgtcgtcgaataaagtccataattttatgctctccttctccaggaacggaggcatcagagatgatgacttggatctgtttttgttacatagaaatagcaagtcaatttatttgtagcatctctgaacatgccgtcaaacttggaggaaagcaaacaagtgaaccgacattcttccaagcggcgtcagtgttcatcttctgcacaacccaatatctcagcgaggcagccaagagatccataaaaggtgttccaggagtgatggcattcgagtcccaacttttcttgttcttggtttcctcggatacgggatgtcccatagctatggtttgcatttgataatggcacacacattttagtgggcgggctttgacatgattttagaatgaagctattataaacgaaccagcatacatggcgatcgactcgatacgctcttgctccttgtcggcagcctcttgggcagctctgaatcgtcgtgatcgttgttggttcatctttgctcgaggggccactccatctgaaggttgggcgcatggaatgaatgcgtgaagtgtgagattgacagctctatggaacaagcaagagctaactctaaactgagaaaagacgaaccgatagccatgaagagcagctttcgaggtcggaccatgttgacgactctctcggtataagcaaacacctcaagcatcatatcctcttcagtttcgggggcaggctgattgaaaggtcgcgtatgttcgtgaatataggaatacgtaggtgtaccgcagaaactacggaatttgaacttaccttgccttcaggatgagtacacgggtgaacaataccgttcatctgtagtggcaaataagaggtgcttcaaagtcagcatatgatcgtgacggtaaaggaggaagctgatcggagaaatcttcgtcacgaacatctaggtatagattatcaaactcgactccgtttggattgggcttggtgatatctacagggatcttgataatcttatctgcgtcttcatctgaggggatttcaacaggatcctcctcaacaacgcgctcgatgattttaggatactttctgtggatcggaaggaagcagtatcaagattagtagggataagacgaaaggacggcgacacgcgtaagggtgcttactttgaaagccatcggaagagggcgggaactccctatggttcaataaacggtcacaatgagaaaaggaacgacaggacagttaacgaagagtatttgtcagggaaatcggtaatcgaaagtctacataccatgttgttgaagggagaaagtgtggtggtggtggtggaggtggtggaagattgagcagccgaaaatgcttcaaaaaatgaatgagtaaaagatattaaccctaaccgtttccaaataactgccatcaagacttcatttacacccctgcaacatttttcctctagctcgaatttctttcattcccagttgtcctttgtccggcccaaccttctcttcgttcccttttagagttcgttcaccatgggaaaggataacgtccttcaggatacgcccaaacgaatgtttgtctttcagctcttctgtactcctgcctgaccgcctacacctagttttgtctctcttgctctctccgctcacgttcaacacctcatattgccttttctgatcgacctttctagtaagagtcttcagttctctgtattttctccccaagacatcgtacggctctctgagtttgaggtcactacccgggatctctacaccgttgcggaggatggaacaaaggcgccggccaggcaaggccttctagacagacggctggtaagctgagcctcgttctctgggttatggcttcatatggtcatgatcagacgttgacctcatattcatacgatgtttctatgtatcatccagggtgtgtccgacaaagaatctcactgtgaaacatgccatcaaaaaatggcagattgtgtcggtatgtcttgcctctttcctcctcagcttctctcaaatgttacgttttgaacacggatcattcgggttctgatctttgagaacacttttgaaacacctaatcattaatctcataggtcattacgcctacgtcaagcttgtactccccgtgtatcatatcggatacttcaagcaagtcgtgacgatgcttcaggatgtttgcaaggtaaattatcttctgttgacctctgcctcattcaacataccctgatcgccaggccactcttctacaatcagacctgcgcccacgttctcttagatgagaacgatcgccgaacgttcctcaaacggttccggaagcctaatcttgaaaatctacaacgacaatctgttgcaaaggccgtcaacaccgcctgccgaaaagttgtccactgtccgtattgtggatcgatcaacggaactgtcaaaaagattggacccctcaagattgttcatgagaagtttagggcaaagaaggttcaaggcgagcaggaagagtttcaaaagagtttcacaaatgcggtttccttccagccagagctcagagcccatgtgaggaaagcgcaggaagatttgaacccgcttagagtgcttgaactctttaaaaggatctcggcagaagttagtctacatccttattctttttacgagagtactatatgccatgggcgaagaaaagctgaatgtatgtcaccgtgtttgtcgataaggactgcgagctgctagggctacatcccgattttggacgaccggaagagtatatctggcagtacatctctgtccctccagtctgtattcgaccttcggttgcacaagatggagccacgtccgtatagttccttctctctttcatattgcaggtttacctggctgaatatggttgtatatgtcttaacagcaacgaggacgaccttactgtgaaactcggtgaaatcgtcttcgcaaatcaactcatcaagacaggtcttgctaagggagtcactaccgtcaacttgatcgtgcgtgattttccttactataatccgaccggtctgatcaataacgcaacactcttgacttatttctgcttgcttgtgaaattatgaattttaggagtactgggatttcctccaactgtctatcgcaatgtacattaactccgaaatgcctggaattccacctatggctgttcgtccctttcctttctttacattgcttttgatcgactgtgatggacaagctcctgacagcgcgtttgtttggggatgtgttcatatgtgaactttctcatatagaaccataagccgattcgagggttctgtcagcgactcaaaggaaagcaaggccgtttccgaggtaacttgtctggaaagcgagtcgatttctctggaagaaccgttatctcacccgatccgaatttgaggatagatgaggtttgtctcttgctctcaccaaaatacccttctgatgtagcatgccctgactagacgtgtgcttttttggatcaaatgtttgccgtttatggttatagctggccgtgcctgagaagattgcaaaaaagttgacgtacccagaaaaagtgaccgatcataacattgcctccctccgtcaggctatcaagaatggtcatgatgtctggccaggtgcaaactttatccaagatgggtctagccctcaaggcttgaaacgattcttggcatatgttagaagcagagacgagacagcagagagactccgggtgggagatattgttgagagacatttgagggatggagagtgagtcaggatttctgcttctttggagaacgttggtgctaatgtattgtttcttctcagtttggtattattcaatcggcagccgagtttgcacaaactatccatcatgtgtcatcgggtgagattttcaagcttccttcagctgattccaaacgttcaagagcaactgattggtcatatacatcgacctgttgttccctttaggtcaaagttcgaccttggaagacattacgattcaatgaatgtgtctgcaatccctacaagtgagtcggtatttgactgaaaacgttcaaatagagtttcgctgactcctccatacttctttccgccttcagcgctgatttcgatggagatgagatgaatctgcgtatgtacatgaattcgatgacccaaacttggtctaaaggcgctgacatactttctcttatttcgtctactttttcttctcagacgtccctcaaacggaggaatctcgaaccgaggcccttgagctgatgagtaccaagaaaaacattgtgacccctcgaaacggagaacctatcattgctgccattcaagatttcattacggcttcgtaccttctctcccggaaggacaagttttacgaccgacaacaattcacccaaatctgctcttaccttcaggacgccgagcttcagattgacttgcctcctccgaccgtttggaaacctgtccgactttggacaggaaaacaagtgttcaaccttctaatgagacccaacaaacaatcgaatgtgcttgtcaacctcgaggcaaagtgtaggacgttagaaccaccggcgaaagattccggtttcccattggatatgtctcccaatgatggatacttggtcattgtgaatagtgagatcatgtgtggtgtgatggataagagtacggttggagatggtaagaaaaactcagtgtttggagtcatcttgagggattatggatcagacgaggcggcggtagcgatgaacaggttggccaagttgtgtgctcgatggctaggttcgttcatattcctcatttatataattgcatcaagttcgaactaacttcggcttgcacccaacattcaactctatctacctcatcagccaacattggtttctcccttggtatcaacgacgtcattcctgggcctaacctatctgcccaaaaggatatcatcattcagaaagcctacgatgtctgcgcggacctcatcgatcaagccaaaaaaggtcttctcaagaatgctccgggaagtgatcaggctggaacgctcgagataaaggtctccggagagctatctggtgtgcgagcggcctgtggagaactctgcatggctgaattgagtaggcacaacgctcccgccactatggctacctgcggttctaagggtaagtcattctttgtgtatttgcgtgtagacacaagacacacaaggaacaagaatgttgatctgcttgtcggtctgggttgatcattgtcaggttccaagttgaacgtctctcaaatggtggccgtcgtcggacagcagattatttctggatcccgagtacccgatggtttccaagaccgtttcctaccgcatttcaagaagaaggcaagagagcccccagccaagggtttcgtagccaactcgtttttctcagggttgacaccgacagaatttctggcccacgctatttctggtcgagagggtttggtcgatacagctgttaagacggctgagactggatacatgcagcgtcgtttgatgaaggttagtagaattactcaacccatcgttgccattgatatctaggacgagaaaggatcactgatcatcatgttctgatcttctcgttcgtaggctttggaggatctatcaactcgatacgataactctgtccgaaattctgttggactagttgttcagtttaagtatggagatgatggacttgaccctgcctgcctggagggtgagtctagtccggtcgcttttactcgatcgtggtctcatgctagggcaagttttttcaacataaattctcaccgtcttgtcataaagcaatcacaacaagacatcttacacgtatttgctcctgctatttctcaggctatcgccaagaagggcgggaagtctcttcttccatgggaggttcaggccatcgtcgacagggctcttagaggatcagactttgttgacaactgcgagcctcagtacatcaagaccatctatgactttgtcagcgaaaagatcatcgatggaatggttgagcttcgagaaaagtacggaatgttcggggctgaggaatacgatgaagattatgccagggttgatatgtctatgggtgccgatggttagttgtttctcaccgaccatcagctacttgtgcgcgaagttcctttcgttgatgatgctaagtcttcttgatgtttctcacagatcaacacaaagctgccgtggacaatttgactaggatcaccgagcagcaggtccagacatttatggacatttgctacgtccgatatcttcgtgcaaagattgaacctggtaagagttcttcatattcgactgtctacattgtgaactgctgtccaatgctgactacgatcaaattgattaccccgattaggatctactgttggagctgttggtgctcagtctataggagagccaggaacgcagatggtgagtcgtggttcattttttcgctgcgttgatgactcaaactgatatcatcttcgatctcgacggttttgtagaccttgaaaacgttagtattttcccttcacgccatttaaactctgaatgacaccagtcctgacgcgtttgctcaattaatcatgaatttcggcgcatagtttccatttcgccggtgtggctgctatgagtatcactcttggagtgcctcgaatcaaggagattatcaatgctgccaaactcatctcgacgcctatcatcgccgcccagctgtcgaaccctgatcaggaatctgcagctcgtatcgtcaaaggaagactggagaagacatatcttaaagacgttcgtttccacccgatttcaaatcatgtttcatcatgactgtatcgcttctcagatgaacatgcttaccaaactcccttcggtttactttgatgattactacagatcacaaaagttatcgaggaagcctacgggtctctatactcttatatcggcatccatatcgacatggaagtagtgcacaaactaggcgtgagtagagtattacgctcgatccaggatagaaatgccttacaaactgacatgcggtttctgtcttccgttttccatttcagttggagcttactctggacgagatcaaatgggccattgttggtcaccgaaagctcaagatcaagcaagatgtacgctcacatgctttgaggattgttgattttgcgcactaaccgttctttcttttgtatgaactgtgtttttgtcattatatctgatctcgttcacagaaaatcaacatcatccctcataacaatcgaattcgaatctatgtcgatgacgaagaagacagatacttccgattgcgccagatcaagcgagagcttcccgatattgtcgtcaaggtttgttctagtgatgcctaacgacgaaagacgaggatagaggctgattcagaatgatttcattctcacaacagggcatcccgactgtcaaccgagctgttatcagtaagcaggagaaggatcaaagtaaaaacattctcttcgtagagggttacggcttgcgggatgtcatgaataccgaaggtcggttcttagcttgcttggattttactcgctcttcctggttgatcacgattaacacattgaatcggtatctgtttgtctatcatcaggtgtgatcggtactcaaactacaaccaatcatgtgagttctactctcagttggacaatgtatcttcaaatgaaaccactagatactgaccgcttggattgacatgtatcagatcatggagatgtctgctgttctaggaatcgaggcagctcgagccacgattatcaagcagatcgatcacacaatgagctctcacggtcttggagtcgaccctcggcataccggtttgctgggtgatgtcatgacctataaggtttgtcgctttactcgccttgtccgatctgtgtgatgcttgggagctaacccgccagttatctgttcacaattcttttattctgcacagggagaggttcttggcatcactcgattcggtgtttccaagatgaaggactctgtgcttatgttggcttctttcgaaaagacgactgatcacttggtacgttccctctgtctatctccctcaaatttatgttgattcttaccacctccttctcctatacggcgtcttcagttcgacgctgcactctatgcaaagaaggatgccatccagggtgtctctgagtcaatcatcatgggtcaacctgctgagcagctcggaacgtcgatgttcgtatcacatttctcctgtttttttttggtagaggctcgttcttttggattcaactgatttaaatttgatggtattgatggaaacaactaggcctgcactcatcgttcctgcaccggtattaccaccattgaagcttcgagagttcgacggaacgttccctcaaaaagcgagaaagaaaaagacatcatctactcgatagagcttttgttcgctactttccacatatcattcccctctccttccctcgcctgacgttcttcattcttttggcagtcgactctatattctttgtggtcttgagaccggtcattcttagtttcgttcttcctctttacgattcttcatgtatttttcttaatcaaacgtcttttcggctcctcaaaggagctggtcagaaacgcgactcaacactacgagtcatgctgatgattgagcttaaacacattcatcgctccaacctgcatttcatcccaaatcaggtctcggagcagccaacgaaccataaagcacagtgagcgctttgagttttccacccatccactcctcctcgatctctatcgattctgccgggtctgcgagagcggataattcctccaaagatgtatttttggggaggtaatatgccttgtttgtggaaaaaaaatgcaagaagtatacgaattagaagagacaaacgaaacgaggcagagaggacgaaatgaatggaaatgggaaagataaaaagggagggggggggaccaacgacatcttgagtaattcctctggctaactcgaacagttctctcccgtgcaacggctttaacgcgcttaacggataaattggagggtccctgtctccttctcccaccacctctgttgcttctttcaacgttatctcggcttcgacttccgtcggcgatggctggtctatcgtaggtttacatcctggaggaacgggtccggaaccagtcatagaaaggtattcaattccaccccatggcggagaaagaaagacgacgtctattccgttcaacggtttgctctttgaagacgaggggttggatgaagacgacgaggaagaaagggatcgggcgaaggttacgaaatcgcagaggatgaactcgatccgatctgctactccgtaatgaagagcgttatgcctagcgagagataacctgagcggcgaagtgtccaaggcgatgactttgtacgtgcgcgcagaaaagagagaggaagaacagcgaaatattagcgctgaagaagagcaggaaatgagatgaatgattgagacaaacctctttcacaagtttgggcgaaagctatcgagtttccgcctactccgcagaatgcgtctagtacggctatccggttcagtttacatcgacgggatgaggaggcaaaacaacacaaaacatgccagctaggttagatacactatagactggaagaaatcgagaagtcgtagaatatacatactcccacatcgaagacgttcagcaatctgaattgctatccgttctggagtgacagagtaccagcccttattcatataaatccgtatataggcaagtttattggtcaaccagatatccacaagattgaaaagagatttgaggctcacctcatgatccataagcagcggcagttcattgtagagcgcaaacagtcttgtcctctgtgcataatctgttatggatttgtactataacatttgagctgatagcaggtatgtattaccacgatcacgcatgacaactcacatttcttcaaatcctttggcacctttttctctttggtataccgaacgaccatgccttggcaatcccaaggatggtgaagcggcatgccattcgaccctgcttcttgctcattccatgctttccttcgtttgaccaccggtccggatccggagtcaccaggttgatcgagggtagagctgtgtaccggagacagcggccttttagccggaacggaagctgaggtagaggcgatcgatgcagaagctattagagctgatgacttgatggactgcttgagctctgccggcagagatgcaaacaaggaagatttctgccgatatttgaccattgtgaggtttagttggtatgtgtttgtgtatgcgtatgcgtgtgcgtgtacgaaaagaaagatcaaggcagggaatatgaagagttggaaatgtttgtagtgaaaactgaataatcaactaccaaagttaatcatattttcgtatcttttttcttctccccttccgacgaatttccatctcttttttcattctcttttcttcgccttccaccttcatcgctcatacaccgttgtttcctttccgtcacccttatacctacaagcacgcactagttctcatcagcagacactcacgtatctttgtttgtagctcaaatttgttcggtaaaaacgagaaagaaataggagggaaaaaacagattacaaagaacatacatgccttcctcgctctccggccatcgcgaccgggtcgtcgccaacactactgcacatgacttcgacatctcacggcttgaagaaggccgtcggattcctgatctcggaatgagagtcgggcttggtaaaggaaaaattgacgaggacgaggacgaaagcgagatgaatgtatttccaggcaagtccacctctctgcaactctttctcacttccttccatctttcggctgcccttccacggaggggttggttgagtctttctcttgacagaggctatattgtgttctcttctgaatgcaccaaagcctgatcgagaggaagtagcaacgctgcctatgatacagatatcttcggaagaaacagatccttgttcaagcatgcgatctctgctcgaggtgtcaattgatcaatggtccatgtactggtgactggaccccggcttcactcttgtcccaccattttctgaattcgacctacacactctctttaccttctcctatctgactatgtattccttgcgactttttcgttaacagaccgggatcaatctccttcaacaccacctacattggaaaacttgttttctctcactccactactcatcgctcacctcaaagaagttcgaactcaaatcattattcaacaattctgcaccttcctcaccacctcctattttgtcgcaaatggtcctctcatgctcaccgtccgggctcagttaaaagcatcgatgggtgctggcacactacccattttggaactcaccaaaggaaatggctggacagtcgctgctgccgaagagaaagagatgagacgtagtctaagcaaggcctgggaaaagttcaagtctgtcgccgataccaacggggagaccaccaaagagattgcaaaagcgatgggcaatcaactcaagaaacttcttgcgcccaaatacgaatggaaccagcgggcatgtgacgatgtaagtggttcatctctcaagccatacctcttggatgattgtgagagtacgattgttttaccttacctgtaaacttatttgtctgtgtttctctcctcagtgggctcccggtccatatccgtcacccagctcacttattccggcgtctctggaacccattccaccgagcaaacctccctccctttcttcttcagaaaaagcgagcctaatctcattaccaccttcctttcacattcacgccaaccgattgttccctgagctcgcgtcgtctttcacgattgctgacatttgctctcaaggcaatgcctctgtgtccgtccgatccacccaggcacagccgatcgtgctagaacaactcgctcaactagcaaagagtgtgattgagcgatgccacgaatatgcattggatcttctcgaggagcagcttcgaaaagaatggatggagtctgtaaagtggggcgacaaggaaggatgggaatggatcgttcaatgcgaggaagatccgaacgagatcaggtttttacccggattggacaacgaaaacctgacgaatcttatccttagaggaagtccgacctggccagaagtcagccaacagtggaaggaaagctgggagatgcttagtcaggccaaactcaagacgtttgagcttgttaacgaggcaagtttagctttcctttccacaaagaatctttgagatcgcgcctggctatgactgaacacataggctgactgatcgccttcatttcattttttagggggatgatcacgtgataaaaaacaacccccaagccgctatcgacacattcactgaagctatgaaatatgatccgagtgaacgaccagctttgttgttaaaacgagcgtcttgttaccgaagtctacaaaagtatgttaaatcttttgattgctatctgaattattctttctaacctggagcgtcctgttatttcaaccatctatcagctggaccgaggccgaacaagacctaaatgatctcctcgctctgcctcccacaacctcacatacccctgctcgaagcatgctcaaaaagattcgtcagaaggtcaaggcgatctctgcggcatcggcgaatggttcggcagagccggcgcagcctccaaagtcttctgcccaggtcaaactagagcgaaagaaaaaggtcaaggcggcgaaaaggaaggcttccctcgttgagactgacgagaaagagaaagaggtcccgaacggaagctctgcttggaatgagaatggagttagatcccctgatgagatacaaaaggatctaccaaaatcgttaccggtagaggagtcggtagctgttgttgtcggcacaaagacgatagccacagaagaggcagagggggcagagctaaaggtggaggggaaggaagatcaaaaggaaaaagagaagagggatgagaaggaggttcagccagcatcccaaattgaggagatccctgccgttgctctttcaacaaagatgtcttcatcaaccaaatcacctctcccacactcttcgtacgagccaatagaagttttcacaccatctcaaccgacaactgaattttctggatcccaacttccgtctcagccccgactaaacaccgcatccaaagctcctgattcggcgcttccaccccctgcgagcttcagctctacaccgaacggaaaactctccccttcacttttatcgtcgaatctccctccgacctcctcaccatctggctctgtgccctctcaaccactggcatcctctgtttcttcctctgtttctaatgcctcctctactacccctttcgtaccctcgagtaccactacgaccactacctcgaatacaacagagtatgcgacaacggcactcaccacgcctgcttctcccaaaccagaaacgtttgctcctacgacctcttttgtggcccctttgattcagacaatccctgctcatcatatgcatcattcttcagttggtggacttcctggatcgcaatcatcattccaccaacaacctgctcagcattcacatcaatcccaaatgaactctattcagcatcaacaacagcaacagtttgcgccggaggagatgtaccagcggttcaacggctcgattcctcattatccatcttatgttccttctcaacctcagttcatggttcctccacctctttcccatccacacatacagcacattcctcaacctcaacaacagcagcagcagcagcagcagcaattgcatagtcatcatcaccattccaatcatcatcaacaacagcagcagcctttaccgtaccagcccttccaacaccgatttggaccgggaggtaataaccatatagggacggtccactcttcggtttcttccaagctagacatcagagagcccccagcagtcgtaacacaggctgctgctgtcactttacctggttcagttcgggttcccatcgtgacggaaccgattgtgaagccttcacatgaatcaccgaaggcgtcgattgagcaggaggtgcagaaccaagagattcaggtggaagagcaggaagaagataaagactcgatggaattcggatttgacctcttgactggtcagaagaaagtgccgaaacagaatgagaacgggtggtggatgccgatagagatggagtttgaggatggagttgtgttgatggtctgtggagaatacgtgagtaatcctcctttttttggtctcatttgaatcaaagctgaagccttgtctgtttcctctgattgaatgtattttcttagctttcaaaaggagcatgtgagaacgatgactgctcgttcctgcacgagcgaggattaccaatctttgaggaaccatacgaagacgtttatcccgaatacgagtctgaacaagaatccgccgtgtctgatattctttcagatgtagaaccggaggatgaccttcccacaactgttactcctccagaaatcgagacgcgttcttcttcatccacggtcgtcgctcctactatcgagtcgtcatcagagactgtatgtaacggaaaatcttccgtcgctctctcctccccgtcatcaagctctccatcacctgctggggtgaaatctcttcccgattcaaataaatcaagttcagcagtcgagaccaaaccaaaatcatttgacaagcaacaacaacccgatgatgggattcctaaatggtatgagcttgatggcgaatgggccaacatcgaggactgggatgaagaacgcagggtcgttcaaacggacgagatgaacccttcaatggtagctctcgccaaacttgttctcaagccaaaggagaaactttccgcgcctgtcttggcagcaatgaagggcgtgatggtcaaagtctcggccattacagcaggaacagaagaagagaagaagagcgaaagaagaggagtggtcgaaaccgcgttggaaaaggttgagaagatggtagcattggagaaaaaagaaagtcaggtattggcagcgaaggtagcagctgaagcttcctctgcccttcctccttcctctcagcctcctccgtcaacagttgttcatgtcccggctagtgactcagcgtcaagtgataccgcgccgagctcttcgtccacgtcgatacctgcccctatgcccacctttgcatccgcatccgcctcttccactctcagcagagaggacgtatccacaaaacccaaacttgccaccctcgctcctatacaggcctccaaatctgcttcgacaacaagtgcagccaaggctacaaaaacacctgtggagaagtggtgggaaagagggaacaacgccgctcctttggtgacagaagaaaactgggcaaccgtacccgggaagaaaaagaaaaagtaaaattccatcaaaagggagtagaattgaactaagaaaagaaagacgcatacagactttcatttttcttcctttcttggttctctctgtctttgtataattttctcatacacatatactatcttctggggtttcttctcttaaggaggagagggggacttaaaatgcatgacttatatacaatattattgacataccaaccaagcgttccgagtggaacaatgaggacataaaggcggcaggacgatggacaccataaacatagattggacagaaataggaagaacctaggataagaacaagcaaagcagaaaagagaacgacaaatcgggatagataggtaaagtggataagatccaagattactttttgctctagatgctcgacatgttcgacctcgaactgatcctcagatccgataagattccccgattgcaccgcgatattgtctgtttcttcccgttcaatcaaatccactttggataacttttgtctgcagagacatttacgcagagctcaaatacgatcatgaattacaacggctcctatacctcagccagcatacgtttcttccgtcctcgccttcttgtgacctttctttttattcaatttcttctttgaaccattcccggctgctgctgaggtagtctcatctcctagatccatcaattcgtcttgctcgtccttcccaggagcactcatcttcgtacttgccttagccacgtcgatgtcgcataagaagtcaaaagctagaatatatcgagaaaaccagtgtactagtcagctccgtccagagtggatacggggaagcaaaagatagtttgaaaggcgatcaccatcagaaccagcaacagctttcgcaatgtctccacgttgaagtgttttccggtttccggcctcggcaacgaggtacgaacggcacgtaagctctgagatgaacactatttaattgaggagacagacctcttgtcagagccgcatttaagcagaatctgtagaatacaacaaatacttacgctcgcaagctctcgaaaagatgataggagctaggtcattcgaccaagatatgattcgttagcattctcctcttcgtaaaaccagacttggctcgactattcaaacccggaaacgaggcaaaccttcagcagagatcatctatgcgttgaaacattccatatcagaaatcgcgttcgaactatcagtgttgatatcgagatcattttgagtttgctataaaggccttactcgaacatcctcatccatcttcatcactttctttatccgtgctgaagggtttccatcatttcgcgaaacattgatcagtatcagccaatagcatttgacgactagggactttgtcgctacctcttctcttgcaccgcatcttactgtagaattcaagagaagacaagaggctcactcacctaaaggaagaacatgctgtttaaaatctgggctttcctgttcataccggtcgatcgtaccggcccaaaagtcttctaaaaactaaagcaggtcgtgaaaagtcattgccatccatccacaacaaataaaacgttccgagcttcgtaagtttatttcatcaacaatcgtcctcagcacaccaggtaaaacaggaattcattctgacttcatccaaagactggttcttcttcactaaaggctgagctttagccggtggcgactttggcggccgactggacgaggatgtaggattcgaggtctgttctcattcgtcaagtgcaaccgatacaggatgcagactcgttgatcagaagtgtcttggaactgaacgatccttatcctctctttacactaaccattatatctgctactctgtctacctatctcgcttttacacagatacacgcacaaacaaagacgaaaaaggcgaacagacgttattggtcggaggattaattgcctgtggtgctctgattcgatatcgcctacgaagaggttgggtcgacttacgtaacaaggaatttatctgataaactgattatgcgtttccttgggttatacgacaacctctcgaaatgcatcgtccaggtttctagagctttccagcgttaaagcaaaagatcgtcagacttttttggcatatatctgcacacaacatacaccatcatctctccttcgacagactatcgcaatagatacctaaaacacaataatggcagccaattcaacttcttcttctagacctaaggtgttctttgacatgaccatcggaggcgcacccgccggtcggattgtttttgagctctacagcgatgttgttcccaagtatgtattgacgtttgctcgaaagccaattgatttctctatcttcagatttgtctgacgaggcttgctttgtatgcgcaacgatactaacgcccaattatttgcaactaaccggctcgaacagaacagcagagaatttcagacagctgtgtactggtgaggccggcaaggcaagtgatggcgtgaaggatctgtattacaaggtacatgcttagtttcattgctctgcgaaaggtgaaccgttagacctgcttagctgaacagaatcaatgtcttttttaggggtctattttccaccgttgtatcaaagggttcatgttgcaaggtttgtctactattttccgtttgggcaggcgcgatgactaaagttaatctcgctcatcccgagttatcttgagaaaggtggtgactttacccgttcgaacggaaccgggggtgaatccatctatggtgaaaagttcgaggatgaaaattttacactgaaacacgataaaaagttcttgctctctatggccaacgctggtgcgccttcttttctcttctctctgctagcgcggtcctgctgtatctttatgacacctttgctcacgtttgtcctgcttctggaacatcccacttaggtcccggaactaacggctcccagttctgtgagtacttggcaagacacgcgatgttcgaagcgcatttcgatgccatcatagaatcgtttctcttacactttcctctctttcttctagtcatcaccacttcgcttccttcccatcttgatggcaagcatgttgtgtttggtcaagttatccaaaacaaatctcttgttcgacagatcgagaacattcctacccagcctggagatgctcccgtctctgaagtcaagattgctgactgcggcgtgttgactgaggaggaattcgctgcctctcaatccactcaagcaggtgccaatagcgatggagatatcttcgaggattggccggaggacgatgagaaactggaggacaagccagaggagggcttgaggattgcgggaattttgaaagcggttggaacggactacttcaagaagggcgattttgtcaaggcactagagaagtaccagagtatgtcttttttcctttccgtctctgctgattgaccagctctctcttacatcgaaacgatctgactgattacttctcttggttgctgatatgaatcgaacacacaattgtctagaggctattcgttacctcgatcaacacccttaccaagacacccctgaggaggatgctgcatttaaagccctccgattccctctgctaaccaacgccggactttgcgccctcaaggtcactcccaaaccccaagcgtgagtccatgacttccttttctctatttgatggcgctcctctgttcattcaatttggaacaactatcaactgacaattgagcaaatcagttcgttggccgtgtcgttgtgttcgagcgctctaaagatcactccgctgaaacccgaagaagaggccaaagcactctaccgaaggttcgtttctttcggcctttagtctgccaacctcttcctctgcctgccatgactgaaatgatacttcaatccaaatcgggtcggatgaatacacaacggcagaggtcaagcctacttcgagctgaagaatgacgaagtagcagagaaggacgtcaaagcagcaaaggctctagttcctaatgatagtgctattgccgctttcctagtgaaaatcaacaagagaaggtttgttctttctctcttcggtcttctatgttggaaggtttgcgcacgatatatactgatttttcttatctcatatgttacctctctatcgcatgtgacacctctccgtcatgttttttgtcttattaatacagagacgaaaggaaacaaaaggagcgatctgcgttctcaaagatgttcgcttgagatatgtctcttgggcgtagaactcgatctatataatcatatctggggagaggcataaaagaataaaaagcttggagcattgagactgagagtatatgggtagttcttgaagcttattggtacatatcaatcaactaaaaatatagagcgagggttttcatagacatatgtttgatatgtttgatatgtttgcacatgaatcagagatccccgtccttgttgtacacgaactgtttgtactcggattctgatacgtggatgaacgttaagtcacgttcagattcactatcagttttctactagttgtcaatgcttcacgaacacagaggacagagacatactccacatctttttctcggcaaactttttcctatccttctcattaactactctcctagccactccttccttgatagccgcctcccaaactgcaagcgctatcacaaagttgacgctctttgaatcttcgaaagcaggtagaaggctcgcgcttgagtctttgagagcgggggagagttcggctagcgcttttgaggcggcaacctgtggcaaatgcaatcagcattaagtgagcggagttatatcgaaagaaaaaaaacgaagtcgagatgacggacaatcatcttgtcagaaatcgtcttagcttgagcgaggatgactccaaatccgatgccagggtatatcaaagcgttctaccattacccctcaaaccgaaagatcaataggaattaatcgatatcattcatggccgtaaaggctgtggtcatttcaggaagaggagaaatgtacttacgttacactcggctatgatatactctgatccatcaggttgctttactggatcaaacggcgaacctgttgcgagaagcgctttaccttccgtccagtcgttggcatctattattatttgatagtatcacaagtacatgaaccggatgcaactgtcaatatctagttagagtgaaaagagaaggataggaattaacctttgggttggcattcgcaaagttccgtggggttcgaaagagggaagataattggtcggtctgtgtgtttcgccatcgccttcactactttctcctttagctccacagtcactcttgtgtgattagcaagactgatcgcggtgttcttttgaatactcaagagaaagaacctacactgaaagctcctggctgagtggacgtcccaatgatgaccgtgggtttcgcccactcgacaattttctccagatccttctttttttcttcatttccatcatctttccagtcatctcttgcgaattctttgagaccgtctctgatagattcgtccccttcgatgagaaggccttgtttatcaacgctgctcattcccatattttggttcaaattgtgatgaagatagtcagtcaaaatgttgagtatcggagagcatgagagcaatgttgttgaggttgacaatacatacagatagaaatgcttgttagcttcgtccttggatattgatttcccgtctagatctctgatcgtcatagcatctcttatttgcctagcaattcctaggccctatgtcgttttcgattgatgacaacacaagtggaagattatgataagcgttgaggggaagaattaagagcagggattaacatacggcagaaccagcgccgtagactaatatccgttgctcagacaaaggagactttgtgatctgaatggcagactgaagggctgccagagtgacagctccagtaccttggactaagacaacccaaagcaaacgcgcgttataggtctatttcgtggaagctgcctcacaagatacgagcagacaagacataccgtcatcgttgaagaccgcatgactatctgaaaagtatggaagggaaagcaggctgtaaattagtccgtagagacagatggtttgaaaacatcaaaagaagaggcaaacctttgtatttgtcaagaatgttctgcgcgttggtgacaccaaaatcttcaaagtgaatcaatacaccctgtcctatctcattctctacaaggctaatgaccttgtcgacgaatgcgtagtacttctcgcctctcactcgtttttctcgccagccgacgtaaagctcgtcctttagaatcttttcattatccgtcccaacatcgagacctatagtaagggtcctggctggatctattcccgcggtgagagtatagataacggctttggccgtagtgatagcgacaccaccgatgccttggtcaccaattccaagaatagcttctccatcggagatgacgactaagtcgatttctttctttcggcccacagagtcggtcaagtgggtcttgaaatcttcttccatagtatctgattaagagagaaacatcgcactcaacaaagacaccccaaaatcgaagttaagaaagaacaagaataattaccctggttggcatagctcataaagattcctcccataggtcgcctgaagagatgagaataattggcgatcgcttgtgcctccgtcggagtgtagatgatgggaaatagctcggtaacttggaagacccaacgagttggctgatagagtcgtacggaaagtatgaggagggaggatttagggctcacggtgtctcgtaatgagctcatagaagagaacccaattctgcgctttgagcgaccagagaaactgtacgaagttgttaatcaaaacagtgaacatcagcgttcgtatgttgaccgatgaaaccactctagctccctctccagacgaacatcattcttcttgatgggctgtcgaagagattttagttggtcataagctctgttgcattgttcatctagtgagtccacttgataaggcaatctggaagtgagtccgaactcttttcgttcctcggcagaaaaggcggtacccttgttgaactctggttcgtctagaataaagtcacctctgagcgcgactttacggatgacctggctgttgtctgatggcattgtctaacttggatctgtcggaatgtgtgatggtttgagagcaaaaattcgtaaggactgtatgtaagagagagtattaatttaacctatggcttattcatttaatccgtcgttttctgctatcgccgtcgtcgtcatcatcatcgccgtcatcaacagtgtctacgtgcacagctcaagcaatttggacaaagagtgaatgagggtgaaaaaacaatcgaatgaatactcccttatagaaaacatgatcagaaatagactagtctgttccccagctccttctcaggttgaccttgcaagtcgagtatggtcttcatcgtgcctgattgaagtgcatatcttatctcttgatttatcccgtatcacgcttgcggcgtctttagtcaaatcaaaccttctgaaattgaggcgatctattttcgtccagattgttccacatttactgttgaatcattcctttgaagagatgtatacgttcgcaacagtgattcttcacagccaatatgtattcaacatggagtttaccgcactatcttccgcaagatgtaaggtttgaggatatttcagaatgttagtggtcaaacttcatctagaaaccatcatcatcatcatccccactaaactctgctctcggccaaaaaaatcctcttgattccttctgatcttgtccctccttctccccctttccctcatcttcactattgctgggagtggagtcaagttgtcctttcttgccaaaaacctcccagaaaagtctttctccctcctctgcagatcttgtagcttcctctgtccagcttttccctccaccactcgcttcagatctagctacaggatcagacccttctttgaccatgaccaaagagcgtggaatgtggaccctaccaggaacaggcgactccgtttcacctgaagggatagtttcggtgtatacaagttgaaagagtgggtgatcaggtcctgtcagtgtagttaagaattgtggtagaggcgaaggagaggaggaggcggttggaggaagaagagttgttaaatacaagacatctgcagccatcaagacaaagataagatggtaaacagaaagaacaatcagtcaaagtgttggctgagacaaagaaagagaaaaacgcacagtatccttttgggcagcttcccgttccttcacccatcaacagcgcgcttacactaccctgtacgtcgcttcccaagcttcctggtggaaagacaaccaacgctgtgtccctttcatcctctccctccttttgctgtatgtgctccacaccctctggctgttctcctttgacatcattcgcctgaagtggacgtcgaagtagggctgggaacttgttcaggatggatatacatctcacccatttttctcctgtgtccgtgtttaattctcgatcagagacaggagcaggaaggtagtcttgggaaacaatgagatgggatgattcaacaggatgggcgaaaccttggatttgaactttgattgtcatgttgtctgttgaaggcgtgagagttggatcggttgaaatcgtactagggtagttgatagattcgatagggtgagaaaggacataaatcgttccttgaactgctgaaagactgtttcgagtaatatttcattccacaagttgattgaattaatatccacgagatcagatgaaaattgaagagacaggatacggaccggcaaaacccctgagcgacctcgcccgcccctccatactgtccgatcaagaaaggagagtttccgtattttcccactgagcgcaaatactttcgtactcttaacaatgatgggagagttggatctgtatgtccaagagaaaggtacaggttcagagtaacccgtgatcaagactgaagggggtgacagaaatcgtaccagagggggactggcagtgcgccaaagcgtatgctaaagaagaagccatctcttcagataaagagaaaacggttttcaagaacgaaggaaatggctccgtctctttgcctaggggaaggacaaggaagcgcatctttatgaacagttgctcctgatgaggcgagaacaagataaagacacaaaccagcaagctccggacttgattcgaagtcacccatgatccacatcaaaatcttcatcagtctcctcttttcaacaaggttgattgatcgatctttgaacacatcttccttcccgcctggaaccttcttggcgattccctccatcggaacatacacagatgtctcgtccaacagcctgaaggtagagtatcttgagacgcctgacgccaccaacatttcaatcaggggcgacactgaaggaattaatagaggatagagcgagagagaaaaggatcgggaaactttctgaagcagtgaagggatatccaattggtcaggatcggaagtaccagagatattgtccgaagcgaacatccattcgagctgactgaactttcgacattggttcttgagatagatagatacgccaccgttcttgttatcattgagctgcgattctttcctttggcacgcccacttgagaagctcctcgagagttaacgacgcatggtctgctccatagtagtcgttctgatcgacatgaagcacggtcttgccagcatgggcgagagaactaaactgggcaaaagcgtgagtttatacttgttatatcagacgaacaataaagcaagagtaaacctcacgctgctgctattgactctgggaggccgcacccaacaacgattacatcaaaggaagggttatctagttccatctgtgaatgtgtgtgtatctttatacgcgggtggatgttggtgattgctattcgatgagattgatgatgaagtcaacagcacggttacgtgtaacgagcgattagggttgtcttcacgtcgcttgtagatcacctcccaaagatttaatgcaagataatacccggctcgtttgtaggaattttgaatacgaggcaatgttgttgctcacccatatcgattgatatcagcgctactagaaaaagacatagatataatgtcttgcatcaatagattgaattcaagttcattcagcggcatatcgacacaatcaccttttgaagctgagcgttatgatttcgagaagcttcaaccgagtatcatccattctggcaagttttcctcatcatcatctgtgataagatgcctcgatattgtagtttctgatgtttgtgcgcgcacacgttcctcattacttgtggctcttctctgttcgtgtttgaagattaatctggtctaaacatctaaattgttttgttgcaatggcatcgagttcagacaagtagatctgagtctcgtacaattgacctagattacagcggactagaaattgatcatggatatcatcaaagaagcgctcgctgttcagatgtgttgttgaataagaaggctcagacgcttgcttttcggcgttgctttacagctaagattcttctcatcccacacttgatcctccaaggaccttgcccatgacacatctgttgaaatgagcggcagataatgcctagctgttaagatcaggggagctgcgttctatcagactctcaagatgtacgggatacggctgatcgaccccgcatccggactgcttgtccccacctgggactttgaagacaaaggttcgtcccacccagcctcctatgtctctatgtgtctgtctgcatatccatgctatcactcaaggcaccgggtctcataccttctctttctctctccgtctctgcccttcttcctgtcttcttctcctcctctcctcctctcctcctctcctcttctcctcttctcctcttctcctcctctctttctctcttcctgtctccttccacctgctctccgtccaccgaccacctgcccagcccgccatctggtctcgtcgacgatgcacctccatcgcataacccggatcctcaagtccctcgtctctctttcgcccgacccgacgtcgcctctgtcggtcctgcaccacgtgccgtcactcatcctgtttctcatcgcgcagcacaactctggtcggctcaacctggcaccggggacactagcaggagacgagctcgagacgagatggaacctgtgcattcgcaaccgag

SEQ ID NO: 1229 - DNA, 3961 bp, Xanthophyllomyces dendrorhous
cctgtgcattcgcaaccgagcgctcagggaggcgattagtgagctggtcgtaactcgactgggcatgcccgagagcccgaccgaggacgggagaggatcatggaaatggactgaagccgagtatgaagcctgggtagtgagcaaggcgagaaatgcaccggacatgaaacaggtagctaggctgaggcaggacgcagacctcgaagacatgttgctagacgagggagaagccgggatgtatgcccgagcggagaaagcagagcgagatcgcatcctggcagaagagaacgaggcggcggagagagcgcgcacgtccgcggcggaggaagcagcgaagcagaaagaaaggcagcgggaagatgacactgaggaagcgaagatccggacggccgaacgtgtccggacacttggcagtgatggggagatatagagatgtcactgttctttgtgtttgctgatgatctgttggcattctatcggtgtcccgctatgttgtgttgtgtcgcctgcggtcgacaaggcgaataaacctcaggcgttcttgaatttagtcacccaacagaacatcttgacatatttcgacctagacggggtttatagagaagatagacacagacacacgtaaacacagctctacacgctctcggccatctgatcgtacctcacagacaatttgttcccacgagtcggtcatcagtcctcgtcagccattgccagccactgtcagctaccatcggtcaccatcagccattgacaacaagctggccagctcgtctgtctgtctgcacttcctggacgcaattttctattcttgactctcctttcctctgccttcctctccttcgtttcctcttgttgccgtgttctcgcttcccttatttcccttttcccccttgcttcccttgcattcccactctcatctacctctcatggtgcgcctgtgtatcggtatcgatcgtgatcgcgggtcatgtgctctttcaacagactctcgactctcagaaaagactcatctaaaaaacaacgggctacaaagtagatgcgagaaagaccagaatatatgacaaaccaccatagtacatgttctgcccagacaaaccaaatcgacttgaccgaacataatccctccccttttctaaaagccagcatgcttgataaggaactctctgctgatctcgaatgctacaaactgcacccggtgacgttgatgcatacacatagagagggaagaagaagaccatatgtgagtgacgctgatgctgggagacaaagataaatacttgcaccgaacgtatgcaaagaaggcagaagagaaagaaggcaagaaagaaagaagaaaaaggacaaacggtcgaagcagcagctggtacagctcgcaccaaagttggtgacagtccacggaacaagcccgagctgatatacacaccataggtcgaagcgattacagagcaagataggaagcgcagtcgatcagtcagtcagtcaactaaccaactgtctagaacaagagaacaaagaaagaaacagagaagggaaattatagaggagccgacaggtagaaagaacgtacaatccgctctctcgaacgatctgacggagctcgcgggtgatatatcctttttctggcggtgtgtttgccagctgaacttttgacttcacgagatccagcgggtaagacgccagccagtatgcaaccccaccggtcgcgcctgataacagcaagctccagacaggcaagtcttgttgcggataaagtcgttgcttgaacgttcgtttagaaaactcatacgcgctgtagaaaccggcgtaggctggtaattctcggatgaaagataccctgttgacagtcgaacaaggttccagataagaagaaatgatcacaaggttggtcagtcttgacccggtgtaaaaaagagacggaagcagaggagagggacagaacttgaaaccgcgcatgactcctcgtctgaaaccataatccctccagagatctttggcaacccccgagagcgacttatccgttgatgttccactatagagtgataaacgaaggagggatcagtagaattatagagcacgcttgatttgaaagacgatgcgaactattggcactgcattcgaatcttgagggttgttagaagatcagtagatcagtttcggtacgttgattacaaaccggaacaaggaaacgattgactcaccttgaatagttccactgatcgaacatattagcatacagaggccaagagaattagtcatcttggctatctttacagagagacacgatgagaagaacaagagtgatcgctcaccaggcgaagcaagaaccgaattgacacctcctgcaatacctccagccagagcgatctgagggatcgttagatctggatatggactgatcagcttcttagctgtcgagtaagcagtaaaaaggagactgttcacggctgcgacacccatcaaaggggaagctgagaggatttcataaagtttagtcgatgctgagaagaacggacggaacaaaacctgatgaacgagtcaaaagcaaacgccttacccattcctttggaaaaaaagggaagagaaagaagacgaggccggcaaaacggaaagaaggcgcaagttgataagccttgacaaccagagctcgaccggattacaaagcgcataatcaacagaaacagtagacacgaacctttgtagagcgcaagtacgccttcatttcgaacggtcttaacagcgatatcccaaggtcctttgaattgtcctttagcagccgtctgagcgcgagtcttgatcgtatcaagtggttgaccgacgatgacctgacaggcgccacctgctgaacccgctagcaagttgagtagtagatccgggttcgactgagtggccttcacctcctctagattagggattatatctgacattgacgagagaaaagagatgatggttggttggcactttgttcgtacccaatagaggtgattaaggcgccatctaccggctgagcgttgcccagccacttgacagaccagcacgtgacccgctcttctccgagtgttcttaaacgacctaccgtttttcgaattatcaattgtttctgccgttcaccatttaactccccttctgagcagatagatagagcggatagagtgacaatggcgagctctacgatttcgccgttcttatcgcttcctgtggtcctatcgcttttgtcagccgaaccagaatcgatccctctcctgtctgcactagcattcttcctctcgcaagatccgtcccctgattcgcttcgcctacccggtacgccttcactccatcaagtcaggcttcggttagctcagacattcatcaaccacgacagactctccgaagccgaaagcgagctcaaattggatgaaagggagacgaggaaggccagaacggaggaatggagtgaatgcgtgggaatgctgggggatgtgttggaacggatgggtaggactggacaggcgaggacttggagagcgaaactcagcaaggacgagccaaagccttaaagtttgatgccttgaagaaactagcattatttctgataggtcaggccaatgtacggacgttagttgcaggagcaaggtatgtctatagagatgatttgaactgggcagggagagaccgttgacggtagcacttcccttctttctttcttttcaggtttctcttcgctttgaatcatcttgactctcttactcagcctcgaagtctcattcgataggctgcaattcaactcgttggtgcaagagaaacttttcttttatctaaaagagcatttatatcttgctttcatacgaagccaataccgtacggccatcgcgtgtaatttttcaatatgtggtctcgtaaacatgtcacttatagaccgtgtatccaatcgcatgaacaatttaagggggttgagagaatccttcctaatatattacat

SEQ ID NO: 1230 - DNA, 309 bp, Xanthophyllomyces dendrorhous
tcggatgcataactaacatgaaacggatgaaagtgcatatacgatttttctgtcatactcgtgtggaagactaatcaatgcatcaaactatggtcagcggtgatttgtactgttcgtttggcgcccaaacatgatcatgcccggctaccgttctaatctcattcaggctcaaggcccagccagatccggtttgtgtgtctcttccgtttgtgcatcagagaaatgtatcgatctgttgggcatttgtttcttctacgaagaaagacaaattggatgtactggctcgaaagatctttcttttcattgttc

SEQ ID NO: 1231 - DNA, 432 bp, Xanthophyllomyces dendrorhous
ccctaacccatgttacacccccccatgccacccttgtcaaccacacgactcgcggcaccggccgttacgtaatttccctaatcgtttcccatcatttcctaatgcatcctagtattccctagtagaccctaccccctcctatcctaccaacccacaaacaaccctaaccaccacctttgcccaccccatccccatttttgcccatttccacaaacaccgcccacaccacccgccacagaccgtgcccaccccgttttttccaccctcctcggccaatacacctcggaacaccaaaaaatcgagcactcccagtttgccacgctcgatggctatctgtgtggagcatcgaaaacaaacagtgcccccgttgacggcagccagaacggatggcccgttcgcgagatcgtctttttcactcgttttccgcgtttt

SEQ ID NO: 1232 - DNA, 303 bp, Xanthophyllomyces dendrorhous
ttttcgccgcatcccccacagtcagtcccacccaagccgcccaccgttcgatgcacatcgtccagcccgaccgaacgacaccgtgtttgccccgatcggccgcgtgcccccgagaaataccgaaaaaagaccacaaaaggtgacgtgttctttctgtggtttcttgtgttttcgacgtgtctttgctttgtatctgccatctttttcgcgtcgttccatgttgtacatactgcactaccatactatctgccctatgcatgcatcttgccccgttggcccacacaaacccacaaaaacccacaa

SEQ ID NO: 1233 - DNA, 23788 bp, Xanthophyllomyces dendrorhous
  misc_feature (83)..(153): n is a, c, g, or t
cctgtgcattcgcaaccgagtagtagccgagagggcgcgtatgttcgcggcggagaaagtagcgaagcaaaaaaaaaaaaaannnnnnnnnnnnnnnnnnnnnnnnnnnnnnnnnnnnnnnnnnnnnnnnnnnnnnnnnnnnnnnnnnnnnnncagcgggaaggtgacgctaaggaggcgatggtccagacggccgaacgtgttcggatactgagaagtgatggagagatgtcactgttctttgtgtttgctgatgatctgctggaatcgtatcggtgtcccgcaatatcgtgacagtgttggtttcatatcgtggtttgtctactgttgtttgggcgttcagtaaggcagatgaggccaagacatctctgtagttagtcactcgactgaacttcatcgcgtcacataatgtaggagactctgatgggaaacagacacacccatggacactccagtggaacatataaaacagcagcagtcagatcaggtagtaaaagttctccatcttgtcctgatccaacccactttctactaagagagaaaaaattatacaagcccattgtaaaatcccttcaagcgcgatgtttacccaacatccctctgcacgtgactccggctctctccgaaccttctccttggtcttgttccttttctccttctgtgaactcggcagcgccgctagcgttccccacgttcagtcgttggcgacatcctcgttcggcgacgtccagtggcacgcctgtccggaagcgccaaataaccctaggtttcagtgcacgacagtgaaggttccgctcgactacacccaaggctgggaggcaggtgaagcccagatcgcagtcaacaagtgggtcgcccaaggtcctaagcacggagacgaaaggaaaagtttgtttgtcaatcccggaggtccaggaggggccggaaccagtcagtcctgacattcctcctgatctcatcacagtgtacttgtgcgcgctgcgatagaaaactgatagtatcgatcgaatgtgatggttcgcatgtttaatcagtgttcacttatgaagtcgctgctcctttgtcagaggtgatagatgatatgtatgatatcatcggtaaaccccatcttgacatctttactaagtcatccatctagcctaacctctagtcttttgctcccgtattggacatgcctgatgttgaataggattcgaccctcgagggatcaacaacaccacaccaaagatgctgtgttttccaaatcaacaaactgagacgctgtaccaggcctccttaggtcccactgtcgatccttgggtcggaagagaggagctgagaaggatgatcggcaaagccgacgcagagaacatgatgatcgaacagatgtgcgaagcatcgagtcaagaggctggtagacacgtaagagattgactctactctatccctgttgttcgaagaactgacatgaccatcaatccgtgataatctttgtgatagatgagcactacaacggtcgtcagggacctcgcctttctggcagaattgtttaccggaagggatacccctatgtgcgcaaagatcagtcttgactacagtgcgtagccaaaagaaggagcctagttgctgacccatcctctttccattacagcaactattacggggtcagttacgggtctgtcattggagaattcctgtaggtgcatgttggcctgaactactgtaaacaaggtatgaaaagaacatgagcgatgctgaacgctgatctttcaatttttttgaccgatcaggatcgggatgttccctgatagggtcggaaacgtagtgattgacggaagtgcgtaactcttgctgtcttatgctgtttctgttgtcatgacaagaggtctcaataacgggtacatgtgcgtctctcctgtatgcagtctgcgatccgatcacctggagggagaacgcccatcatacgtggagtcgaagagttcgtatctactacgtaatcgtgtgcgcatcttgatcaaacaaaacgcagtctgactgagaagtatgtgcgcatgaattggttggtataatctatacaggacttgcttgataccgataagacgtacatggcattccttcggagttgcatcgatgtgggtagtttttgttttctgtgatgatcatatactatgacgggaaaggtatgaatctgattctctgtatcccgctcgtaggctggacaggaacgatgtgctctcgctagtcagaactctaccgtcgagtccctaaagtcagatatagacgacatcttgaaacagatggtcggataccctctcgtcgtcaaaggcatgggcgtcctgtactctgcacaggtagatatcataattccattgtaggtagttggagcatagcccgccagactgaccactctatcaattatgcgtcacaggttcgacaatggatattcgcaaacctcttccaaccttccggctggtctggtctcgctcaggttcacttcccacctctttgttaaagactctcttattgcctggtctcagatcgttctgctgacgaatcttgcatcgcttcatactcttcgctatgttcgagaacagggattgtaagatctcatccagggaaacggaacgctgatatttgagtcgacccagtcgatgattgagctagacccaaagataccagcatcgactacattcgctaccgaaggtaagcgaccctcttccccttctcgttcttaactttctacactaacctgtttgaacgaaacaatcgaaaacaccaggcgtggagtgtacggatgcgattccctacccagaaaatatgacgaccgaagctatcgttgacatgttgaccgacgaaatgctcttccaggtcaataatatcagcagccgttttgctggtctgttcgtcgacaagtgcctgaggtggaagatgcgggacgcagatagagtgaggatattgttatacatctctcttatcagtctcactagatagaccactgacaaaaccggacttgccgtctcgcgctcgatgttcagttcactggcctgtgcgtactctatccagggtttgcgcatttctgtgtgctgcacatccgctctttctattttctttctccatcctgtcctgactgtatcctccgtcctctttgtatctcatggcattccacccaggatgaatcaaacgctctcgaacgatatcctcattatcggtaacactgctgacccaataacgtcaatcaaaaacgcccagctgctgaacgagatccagccgatgagtcggctagtccatcatgatggatttggtgtaagttcttcccttctccaccacttcactccttaactttctatcttccgctctccataccccacgcgtggccttccgggcaactatttctggaagcggactttacctgaccccgtttatgtactttgacaacaacagcactgctcttacgtcatggcttcggtacgtgtctctttctatacgcttattccggcccactacgtcttccaacctatgtttctcatcgttcctattcttttatcctcataattttcaaattctcatgatactttcctcacgcatataaacacatatgcacagctctgcacactctcggctatgcgatcataccttatagagaacatcctcccacccaacaacctgttgtgcaagcccgaccaggtcctcttcccgaactccaccgaacaagccggcctgaccctgctgcgacgagcgtctgccgacagcggcagacccagtgagcctggcgagactggctccgaggagaccaggctgctttctgcgcttgtcgagatcggacatgctctcgaccggtcgttcgccaggagaaggtagacctgtgaggagaagacagaccgacctgtccgctccccacaaattggtcatcagtcctcgtcagccattgccagccactgtcagctaccatcggtcaccatcagccattgacaacaagctggccagctcgtctgtctgtctgcacttcctggacgcaattttctattcttgactctcctttcctctgccttcctctccttcgtttcctcttgttgccgtgttctcgcttcccttatttcccttttcccccttgcttcccttgcattcccactctcatctacctctcatggtgcgcctgtgtatcggtatcgatcgtgatcgcgggtcatgtgctctttcaacaagaactcgactctcagatgatctatctatctatctatctatctatctatgattcattgtcacccaatgatagaccagaagtcaagaactcctccagacatcagaaagctcatgggctggatacaagaaaggccagaacactagacagatggccatcatacggctcccgcgtaagcaacccaactcaatttgacctgatccaatctctaacaactttatcgaggatttttgttaccttgcaatgtatcaattttcatcccttatttgtttcggatgatagtcgttttggtagtatgtctttcggcacgttgagtgacgtcacttttcgtctacttagtcagctatatcagtttcagccagaccgtctcaccatcactccgttcaataaccataagaatctgaaccgctatacacaaaaaaaaagaacaagatcaatctcatttatgaagcctgttaacatctcaagacgatccctgaattcgttgcctcggcccatctcgaccaccaactgtgggaaggtcttggtaagccgagcggcctatattcgatcgactcacacgtcgtctgcttcgaatgcacaatacaatcgattcccgaccaatccaaacttacctggtcggattcaaaaacaacctccgatcctgtcaccgttccagactgaagtgctcagcctaccacctaataagcctggagatgatgggaatcatcagcagaggaacagacgtgggggaggtggaggagcgggcgactactggcaaagtctggacggtaggaccaagttggggttagttggtctcgcaggagcaggaggttactatgtctttcagttagtgatatactatttggccgcgtccttccacacgtgaaaagtgctgacatgcattattgcgatgtgtttgtctcttgatagtctcgaaagagcacctcattctggcagactccggttcatagacgtatctcctgcatccgagaagcaagctgggctgcaaagctttcaagaaatgatgagcgaatatgcttcaaaattattgcccgagaaccatcgaaccacccagtatgttcgtatggtagctgcgaacattgtcgaaagcaacggtctgggcaagatgaaaggtgcgaagtcagtcgcaggaacaaaccgagggacaggatgggatacgggcgaagctgagagctggaaagaaagccaacaggaagaggttgaatgggaggtatgctcgatctcacttgatgttgctgttgaaattactggtgcaaatgtatgcgagccactggacatcgcttactgttcatttgagttgcttttcaaaggtgtttgtcatcaacgacaagaatactaaaaacgccttcgttcttccaggtgcgttgctgaactccttccttgtcccaataactacgtcgcgaattaattagaaacactgaacctcgtccgtatacctcaaaacaaaggaggaaagatttttgttttcactggtatccttcctgtatgcgccaatgaggcgggtctagcttctgtgctaggacatggtcagttcattcatcttcttatcacacatacgagaatatagcagacactgaatgaagagtcatctatttaaccagagatcgcgcatcaaactcaacggcattcggccgagaggatgtcgagcttgaaagtattatttgtcctgaacatcgtgttggaaagtctgggactcgatatcggagtgtcccggctgctactcacttttttgctttcgtgcgttttctccgctctttgtaccttttgtcactgtttttgtgtataaagaccatattaacaaactctgttgacctcatgttttgcataggctgccaaattcaagaacggcagagagcgaggcagactttgttgggcttcgattgatgtctaaagcttgttacgatcctacagaatctccaaagtcagtttgatatctcttcgtcctccttaccgtcctctgaattttaccggatattcgaatattgtcttttgctaatctatttgtctcggtttgatgaatttggtacatgcctacaaaggatgtgggagcgaatgtccgagatggaaacgggaaataaatcttcatttggcggagcggccaacattgatttcatgtaagatcttcaatccaaccttttccttggttctcacgtcccttttcttatgtgccttcgacttcaatcgattcgggttttgttcttttcttcgtaggagcacacatccggcgaatggaaagcgaataaaggtaagtactccttctcttcctccttctggttcacaacagaaacccattcccaagatgaaggagagtttttttttccattgacctctaataactatcttccctcccatccaacagaacattgagggctggctaccagaggtaagaaccacacttgctcctccttcccgcctgtcctcctctaggtcgatcctcacctctttgcttcttcacgaccccaatttttcttcttcttgcgcatattgttcattggattatgaaggcactgagtttgagagcaggatctcattgtcaacaaatagacgactttcaatcacaaatgcccggtcttataccaggtggtcgattgagcgcttggaattagatgactcttccaattgtttcttttctcctcatgtgattcttgattccttggtgctatcttcttgcttgaacttgtcggtatgaatgacccgtttcttggaaggatcggattgtagcggaaaacatcacaggggagtgaagcaaaaagggcataacgatttgctttctgaagaataaggaaatcgataacatgacataatctttcatttttttaaaagacgggaaagaaacaagaaatacggatgacctttacggttgtcgtcttttttttgtatatcagaagattatcgagggataagatgaaggacgagaatgaatgtaagagaaacccaagaaaaaaaaaggacaacagacaaagcaagacagaataaagacaacaagatgagtaagagatcgagagttagagacaaagagaaagaaacaagatgacaggtgcagggttaaagtcgagtaaggatgaagaaagacaagatgtagtattatgcgtgaatatttttagtcaagattactctgaacgatgacgagaacctacaatgcgcgatttgaaattgagaagagcagaaaaccgataaaaaaaaaataagataaaaccgaaaagaagacgaatggtatatagaaatttgaatagtaagaaaagggggcataagtattttcaagaaaagaaagaaacaagagagcaaagagaaaatgtggaaccacaagacagacgctttcttatgtcagtcaactgtacctagtggccttccctttccctttcattgcttcctttgaccgagcaccatctgccaaaggcatgccgtcaacgttgacatcgctcgaaccacctaacgaaaattggaagaggttcgttgggtcaacccgctttttgatctgaccgagtcgtttccagttttctgctccgtaagaagaagcaacatagactgtcggagagttttggttgatgaactaaatcgcaaaagaatagacaggatagccgtcagttcgcataggatgaaacgagagaaacaaaagtagatagagagacaaacacaaggaataggtcctccaacgctttcaggttcgatgacttgggtgatccaatcatccgctgtacgcatacatcgttcgtcctcctctggtgattcatccaccggccattgatgcaaggcgaggatattgaactttgcagatcgacggctgagcgggaaacaagtttcggcattatcttcgagtgctccgcctgctagctcaaagagccaagaacacccgtcaggaatatccttgaacatgcgaatggtatcatgaatgatttcatctgtcagcgaggacagaagatcactcttgataaaccattttttgccttgcccgccccgaaggacattcgctattgagttttgttgttgaacaaacgagcgttccatgacatccttgaacaaacatctacgcaaagtcctcacaacctaggtcagaccagtaataagccagaatgaagaaaagaggaacgcaaaaaacgtactgttccccagtccaactacagattgcctcgacccatttcgtgccttcctccatccctccgttccaacaaagctgaatgataacaactgctcctccttgggagtctttcagacgaccgttcaccatgtcttgtacgccatcgtctccatctggtccagctgtaagaatcaaattggcatacaacttccgaggagcagctttgacgcagtctcgataatgcttcagcaaactcggggccgtctgagagcagatgtgagaaaaagaaattcgaataaaaaaaaagacaagaaaacccccctccgaattgatgagctcaaaagagaagaggagaaggagattaggcagacagacgcacagctcgattgaaagggaagatgatgttccccgaaaagacgactggaattggataagccaacgcagtgtacctagtaaagattcctagggacggcccgaatcctctgatagcccaccagagctccggatcggaatgctcgttcaccacctggatcgatccatcggcaagaaccatctcgacttcgaccaagcagtcgagggagaggccatattctctactaaggaaaccgaaaccgcccgtagtcatcgcgcctgcgccaacagggaaggcgggaagagggacgtgataggcgcctaacgaggtgctcgaagttgcttcatcaatctctttagtcaactagcggttccggagtcgagagaattccaaatgtcaacgtcgagaatagacaaaagaacgagacagagagaacaaagaagaaggagaagaagaaagaaaagcttaccagtccagcgccaaaagtggcgtaagctctactcggcatggttgccgccctcgaactggacgttattgaatttcttggataaaagaacggccctaggtgagctccaaactggttgactaaagcggaagacgaattgacgttattgtatggcccggtcgatagatcgatcgcatcatcgtaagccccggtctcggggacaggtcgaccagtggaggggaatgccgagtaagcaatcggcgattgggttgtaatggtggaagaaagaacagaagccgagggcaaggccggtgtggaggactccgaggaggaaaactggggaaggttcgatagtggaggcagaggaatggtcaaggaggaggccgagtttgagagtgtggaactgttgaatgagaacggtgctagagaatcatcgaagttagggttcgtccatgtggacgtaaatggcgaaggagaggatgaagatgaagatgccatgaccgaagccgagtcgtggtcgagcagagtataggacggataatagtatgattgagaaggtggataatgatcatgcaggaacggcatgttcgttctcaatgttgaggaaggaaccgcgatcgcctcatctggggaccgaacgatcggatcttcgtttctcgccgaacaacatgcctgtatgaaactctctggttgagggtcgcgcgacacatttgatgagtgacttcggtgccttccaattcgaccccaaccagtatcatctctcgctccacttccagcatcactgccactacctgacgagctgcctccaacgtctccgttgccacttcgactcgcactcccgcttccgcttccactcgcactcgtcccacttcctccgagggtgtagtccatgcttgacgggtcaaggatcccttcgaacgcatccgtccggtttcgttttcgagaggaatccgaagtctctcttgaatagccagagaccttgtcgaccgcgagagagatgtgggtgtcatttacattggggagtgaaagcttgacgccgttgagatagtggagatcgacagtgacttcaccggcgatagcccagccatgtgtcccgtatcctccgcttttgacagactaggtcagagggaagaagaaagaggggcgacaagaagttgtaaatccatcgagccggacttttagaatatccattggatagatcaaggcaataacaagaggttctgaagggaatgacgtagcgaggagcttaccagactaagacccgtctcatgacagaatttgaccactctaccaggattcaggaaagacagatgaggcagagagaaaaaagcaacgtccatgaaatcaaagaagacgatcgtgagcagctgtccatcttaaaacctccgacctggctgagaaggaagaattctaaaggccgggagaactacagctccaaagagtactaccagagagcacagaggagaagagacagaataaaaagatccggggtacccacttgctaacatcgtccgcatttctcggacgggcaaccaacttggcagcactggccacgttggagttgaagagcttggtgctttgatcgaaactttgtgtatttcaagacgcatgagtgataattgtccgaaatagaaatggtggtggtacgatttgagtagagaaaagaaaagagttggatgagtgagttagaacatattcgagcatgattttacatcttgcacgaccacaaggaaaagtcctcgggcagacagaaccaagtacacttgttaaaacagggactagcagtggataaaccactgaggccaaaaggtaatacaggataccaaggaaccggagacgagaagcaaaaatgaacccaccacttgtctgtagaatccagaatctctccggcgagcgactctctcaatgcggacaccgctgcttgatcgatttgtttttcaaccggtgtcgatctcatacctgttgattgggtggatgatatatgaacgagcttctgaaagtgtttccgtatacgatgtggatgaacaagtaaacgagggacgcaaaacgagaggagctgtggaactcagaacgggatcgggtgggaagcaagcgagaaatcaaatgccgaggcattgcaggacaggaaggactcgcggaacgggattacgtagggacgcggtcacgtgagtgtgcactgcactgattccttacaggtttgggacctggtcataacactagactggccctgatcagggaccctttcaacagtatttattatttttgatgtaccgtttttctggcgaacagtgatgcccttccatgttccattcaatacttgttgctcattgacgtctaacgataggaagacacgttgatcttttggtcgattgtcttctctcgctagtatatcttttgtttctatcttttcactcctttttattttattttgttgctctcttttttcccacgcccaagtcaaggtcttcagcacccatcgattttttgtgagaacaaaaaaaaagatggactcctacgctccgaagaactgttacggccgtggcagactgaacctccactttcacacttcagtcctttttcttttttcaaaggagagagagcctgtcgcttaccctatccatttgatcggatgtttccgttctggaaactacctgttggactaaaaagtttggtctctcgttctgaggaccaagcgaggggtcctgtgggtggatgcgaatgttccctcagagttgatccgagtttcctcttggggggctttttgcccctaagaaagagtcaatgtcgagggtcttagtttcggaatgcacatctctttcctgccgtttcttatttgattttgaatatttatatcaatgcatttgcacacctatcgtttagctgtggtgacggtttctgggtttgttcctacagaggaatccccagatactgccgatagattggttgtatgttgtataaacgtttctctattagaacgtgaaagaaaaatacacgataaacaagacaatagaaaacagatatcgagaacgagcgataatacaaaagatgcctagctagcaacgcgaaagaatgtgtatgtgagaatgaaagaggagcggtcgaagaccggaaattatagcaagaagatcaacagatcacacaaccacaaccaccaccttccctgcccacctctggctcgcctctcgacctatttgctcgtatgctccccgttctcctaccaacacttccaccggtcaaggtggctgtcaacggatgcgtcctcaaacggttatggttgctggcggacagtattgcgttcggacccaaaggcgggactacggactttgtatcgacttcaggcgtcgaaaggggaaacattctgatcgaaagatggacgatcgtcggttttagacttggataaatctcgtttgctgaagattgaaaagtctccaaggtggtcagctcgagctaggggtgtgtgtgtgtgtaagtgaaagcgaccaagtgatgagtaagaattaactaacaagatagcgtagatgcgtcatcgaggatcttgccccgatatagcactcgaagacacgaaggcgacgccggaatcgacacgtccgatttccagtctacaatcaaagagacataccaagtgagcagaattggtcagtcgttaagtgagtgaacagacaagagtacacgtgatgacgaatgacgtgtgcgcacctgatggccagttaaaaaacacatgttctctataaagagaaaggtaagaccgagcatagagaagaagaagaagaacatttagtcagaaaacctctcaaggaaagatggtggctctcggagatgaagaaaagaaatgacaacttgacaggccaacgaactcacttcacgcgtccgatggaagtttcttgagcaaagttaaatgtcttgcgttgaccgctgatgacgagcacggtgatcgagacattagcattctcattcgccggtccagaaggtggcagtgttggacttgtaggtccggtagagtcgtccgacatgaccgattgtgatgatggtagctgatgaaggaggaagatatgaagaagaagggatgactgaaaaggtgagcgaagctaccgaacgatcgagattaggtagaggtgaaagaagaagtgaaggacacaaacctgtggaaggggcggatacacggacacgatgggtggcaagcaatcaacgactacgcagattacgcggatagattaagggaagaaccggtcagggcgaccacgataaaggggcgactgataggagaattgagaggatgtgagaggatgaggggtgagaggaagaggggtgaaaaaagggggggataaaggtacagatttcgggcgatgatgaatggttgagagtgaagcggggtgaggtcaggacgatagcgttggtctcgatcaagcaaaacgactggaaataggaccaggaatacaggaatacaggaacgcagcggcccgaaagcttaaaggctccgaaacccagcgggtgaggacagactcgaccaccaagtggggcgagcggcagtgccgagttctgggctgacagagttacctagctaaataatttgggttgatcgataaggcttagacaaacactatagttagcttaacaaaccgactaagaaacggaccattcgagtaacctattcgtaataaaaacggccaggaacggccatcggataaaccgatcaggggaaattcgaatagacagattgacccggtttatgctgaggaaaacatatcggaagctgctccgattcaatcggtccgaaaaaagaagaaggtgtgccgaattcttgccgatcttgtctagctcgtcctcggcgatctcggcatcatcgccagagcttcttggcctgtacacttgttatctttcttttccatcactgtatccattccattcgccagacagagttgtcagataaactcactggctttctgatggaattaccgcctagagattcgtctaagacaagcactcgtcttacaggtcatgccatcctttcaaaaggcatcacctcggccaccatatcctcaaaagcaaagataaatccgaggcgatcactttctatcactgtgcctggtccttcacaacatcgcgttcgcgaggtccccttgacgaatgctacctattctcgatcaagaatctctatagatgaacttcccaagtcttctcgacgggcttcgattgtgtcgttaaagcctttgtccaagtcgactgcgacagtaagagaacctgaatcgagaagagatattgagaagctaaaagcaatcacttggtcggctctagtctgtcctttctatcataccttcccattgtatttcctcccctgtgtgctgaccactttttcccgctcgcccagtctcaaacgttgcctactcttagtttctcttccctctcgtctgcttcttctcctccatcgacccagttagattctgatgctgtagagctctacctcttcctgtctacactgcaactccgactcgcagcccacgatatatctacttctgtccaaggattgactcatcagactgaagaagaattggcaaagttggaaaccaccattgggatcaacatccaggatgaacaggtggaaaatagacgagtcttgtgggaagcgttgacgaagcgcaatgtatgggtttctttcctttctcttcccagtctctacccctcccagaagtaaaacgtggactgatcagaagttgaatctagtttgcccaccgattcattccattgctacatgaactatctttcctgaacgcttcggccgatgcgttcctcgacgcatctccacgcgagccggaagacgacgggaacatagacgagcgcggatcgttggctcgatcggaagatcttcagaactcattcagtttcgtccatttcggcatttccttctactctgttgactattcttctcaatggtttccctcgagtctcaacgtcgttgttgtttttttcctccttttcgcgctcatagaaagaattcaaacgaactttgaaggtctcacgtctctacctggtcttactgaaccaaacccacaggtactacagaaccttctcgagctctacattctgtcaatcacggataggatcgaacggctcaagagctccgatagagagacaagaagaaaacgacaggaaagaagacagattgtttgggaaaagagtttggagatctctcaaatgacattgaagtgattgagttttgaaatggaaactgaattattgatctcttatgacagaactaccgcaggaatctttattgaataggttggctctgagagcgcatgtagcatccctgtactctatgtttatgtttgttggtctatcactctttttgttcatctatctttttgtaaatatgaacaaccgaaaacgtgaagaaaaaaaaaagtaaaagaagacaaaagagggggtttgatcggtcctagggaaaacttgactgagaggttgattggtcgtttggatcaagacccatgttgagcatgaacttatcaattcgaatacaggtaactaaatgatcagttcatcgtttaaaaggaaagctggagaactctaagaaaaagtctactcacagcatcaaagtctagatcccatttaggttcacctactccctgaccatcaaccaccgaccctacgtctccgccaacagacgtaaacagattctcaatcccaaacctgacaccaacccccacatcaggttcagcagaccaagaagcataatcgccgaaagtcgcatttgggtctatcgagaacgatggttgggcagctatggcgtcatccagtgtcgttgggaaatgatcatattgataatattgatgtccgtgggtctgagtttcgacttcaggctgttgctgctgttctcgttgcggttgacctggggtatgcgggctcaagtgagatggtaaagatgaagagaccgaaacttgtggtgaaagaagaggatatggtcccccttgagtcgcggatgtcaaggtatcatttcctgttatcggaggttgcgctactggtttgaacaaagttgaagttgaagtggagtctacatcgttgttgctcctcattggatcgttgtcagcgttcgtactggaatttttcgagttccctttccgatcccgcttcgtgcgttgtacgtttccatcttgggattgggctgatggacgtttcttcggctgtttccgctgatgttgttgtccagatccagacacttggccatctaccgtttttctcctcgcgttctcgcctatcaaatctaggtcctcatctgagtccgccggatcggcatctacgcctggtagaggtgttttgagagcggatcctcgaagtcgggcctctgctttgttccgcaatcgtttgagcaaaggctaagacgtcgaaaagagaaagagaaagatgatcagcggtgactccgtatagaggaaaaatgatgagaaacgaaccagctcgtctcttgctcgagttcctactttggcgtcttcaaacagagaaactcccaattctatttgccaaaggtgagcacaaatattagcttgaactttttgatcacacttcgcatccccagacttctgaaactctgattttcttacctatctcttggaaggctgccaaagccagtgaagaacccggctaaacatcaaagaatgactgaaaattagtaacaacaaaacagctaaatctcaaagtcagacgagtgaaacgaaccgaacggatcacagcgaccgataaactagcgatagcggaaaaacaatggaaccaaaagaaccaccatctgctagctaatgctccgtgtagcttcatcaagtctctcactactgagatgcatgccttgcacgattctaactctgctacataactctgactattcacacagataagccaagtttgcagcctcgtcaggaattcaacgcataccaaaccagactcgaccgaaataccagggaagaaagaaaagaaaactcacttccattttgcttttagaggttcatcagggaaatctctcagcgctctagcgaaccaacctcggtgcaggaacagcagacactcgttctatagattcgagaacatgccacagtcagcggatatttctccagttggtttgttccgacgatcaaaaagaaaagtttagaatggagacagactatgatgagaagcatgctgtgtctttgcaatattcgtttcttatccgaccatccttctccgtccgttggtaaaacacacctgttgtacaacagcaaaggaaagccggtataagtgccatgcttcataaactgaagtcctggatgaacaggttaaacaggaagagaagagaagagaacaaagaccactcacgaatcctcgccacagtgcagctcagctggtagctgcgtcctttcaaagattcggatgtcccggtcaatagcgagtacgatatcatacgtaaccggactggtctgagtctgtaaatcattaatcctttttatgatggacaagattcgatactaccgaggagagaggaaaatgtgttcgaaatctattaagtatttgcatattcgatattgaaagacaggactgatggtagtaaggtgaatagcatactttgaattgatgaactagaacagaaccgatgtaatggatgattatgagcaccagatcatcaaacacaatctcaatccagatcgttaatgagacttacagacgtctccttcgtatttttgaccgtcgggcagaccacttccagggtatttgacatccgttgtggaatcactcagacctgggaatagtacaactcagaggtcagacgacgaccaccgcgccacatccatcgagacacttacatcgaggccgaccgaatgttagtgattgaattgcatccaaaaacgaacactacccaatatcgaagtcaggacatcatcttcgctgtcagtaatgaatattctggtagaaagatgtcggagaggataaaataatgaaacatacctcccaaaataacctccttctcatgtccacttcggcaggatcaagtccccatctcgctccatccctatgtaaaccaacctaatttgatcgaataaatttcaggccgcgttagtccagtagaaggataacaaagacctgaaggacagcaaacacgatccgtacagctgtgagatgtttcatggctaatccaagtaacggccagaattgctcgcccctattttggaacattatgatgattaaaagcaaaacgttgcgaaaagagatgtcgtttgattgtgagatatgaagattcagttagcgtcagaggttttgcctgacttacccagaggtggctttggttccatttctaacagtagtgagaatcaaacggtaagttgcggaagaaaagacttcaacgtcggtactaaaccttaggtttggaaaacaaaattgaaaaagaacaaacaataagtaggaacccatcagttgaatggcttgtatataagcaacggatcctgatgggtctacgtcgttgcattttaaaaaatcgaagcagagaagaaacagctatcagccatctgtgtattgaacaacctttgataaagatggcaagaaacttactgattgcaagacataatttggcaaggtcgcagtaccgtctagctcgctgattaactgtttttcaatcaaattcagatccatcatccaaataactgttcgtcagtatacatattacgtttggtgatagctcgataaacacctacatggtggattattcaaatcgaatagtgccccaaggcaaaggaccatgtagaacacggcgagcttgtggacgttcatatgttgaatcgaggttgatacagttggagaaccatagacgtaagggaagagttcgtcgtcgaactctcgtttggagatgacatcgtacatccacgacccgttctagaggagagaagacaggaggtgacgagagatagatatgagtaacagagtatattcaggaggatctcaaacttgagaaaatggccaacgaacccgccaatagacttcactcaaaccccaagcctcttcccttgtcggtaacatcccaaccaaccattcgacaccgggtctacctcctgagggtcggacgaatccgagagaatcctgcttgaatgggaacatatcaaattggagggaagtgtgatttgctgatgggtttggttgactgcttggctctggagaggcaggatcatccggctgtaaaggagacagtagtgttttatcgatagaattaagcgcgaagcttcacggtgatagattgtgtgattccagatgtactgaccaacaagtaagccgacccagcacttccgccgaagtaccgacttgcacccggttcgttccccattgtcagtcgaccaacgttttcctccccaacatctctcgtctcgtgtttgatgcgagtcccgggtatcggcacaatcggtacaccatttaacgagtctggtgttccacccctttctggtgagctgcctctctgatcgtcatccgcaccgggtcctgaactgacggtcccaggcgcaggcataggtgagtcgttggcgtgtcggtttccatccaacggctcgaaatggtaacttgattcaagaagtggatgtggattatctgatcgagtgagcgctcggtgagactggtcgagtgcggtttcgagagctgatattcttgcatgaagttgcgtggtgttggcgagaatcaacctgtgaacagatatagatacgttcggaagaggttaggtttgtcatcaatccctcatgaagagctgacactggtataactcatcagacaagaaatacgaaccgtttgcccttcccgcctttgagttctccctctggacagatggtgctgactcctcgcttcacacaattcgtacaaggccactctcgactacacttcagtttgagtctcctacattctgcacaactcaatacggccttctcagggtcgtgcttgccggatttgcctcccaatcctgcttgtttcgagccggacggcccagaagctacacctgtagaagagggagtgttgtgagaggaagaaggattcgttccaacggcaataggcgtagggatgttcgaggatggctggctggctggatcagacgactttctcttctttgataccggcgaggtctttggtgaatatcgatcggtaggctgacctccagctggacgtggtaatgtggggacagcaggaagattggttgggattggactgaggtgatatgatgcagagattcgagccctaggctgaagagaaagaagcgataacagagacaaagatagagtatcttaatcgcctgaatagtaacgaatgaataaagaagcaagaaatgggcttacctcggacgcattggccaagagatggagaagcgaagacgcaggcgctgtctcttccttcgaggagttttcttctgaaccttcttccatctcgttagactgcacctcaatgtgtttgtccgctacagagctcccaagaacggatggaaacaacacggcagtcaaggtagttgatctaaaaagatcataatgaattaagagtgagacgactgatgactgtgtggctagaaatgctgtgtccgggcgtgccggagttgaatgtaatcacgtgccattctacgccacatccgtcagccatctcctcttctctcgtcctcaccctcgctcagttcataccggttcttctcgatccgccgtatcaaacacattccatcttatcgctcaacatgggtctcaaagaagttttcctccctcaggtgtgttccatgtttcgttttactatagcgttcttttgatagatgctccgtgtgacagatcttcttttctcagaagggatcgatgtgggagtgctcgttcagatggacgcaaagatgaacggagggatgaccggaattgcccgatattaatcagcccattgactatgactgaccattcttctctacactttctcatctctgtcatctcactttgaaacatgtaggccgagagttataagcgaaagaaagattacaaattccaggaggtaagcatcgctgctcacgatttctgcttattatatatacgcggcatactcagtcgattgccgattgaaaaggagatggccgactcatgactgatgagttcttttactttcttctcgtccaacacaggaattaggaagaggtatcgccaacactcaccgtgcacctttgtttaggtcggcttgaactgatcaatcttgaatgaatctgacgttctgcttttcgctttctttccatgtataaggtacattcggaaagggtatgttctaatttcggatcgttatctctatctcattacgacggctcaagatcctgcggcgctgactatcatcttcactgctaatcatcttgaacaaaaagttatccactgcacatggcataaagctcctcctccaggttcaaatatccgggaggtggctatgaaggtaacgattcgttctataaagtgcgcctgactattacatcatctaaacgatcactcaatcaacgtctgcttccgctctctcctcgatggccataccgatcgttccaggtcatctccaagaaggctgttaagggcaatgaatcggatgtgttgaacgagatgaaaattctaggtgaatatgctcccttttcatcagattctctcggttcatcagtcaagctgacctattttattctactatgcatgtccggcagagggtctggatcatcccaacatcgttaaactctgggactggtttgagtgtgagagtttttcaaagcccttcctactccctcaggtcgttccttaatacgctgctgaccatgtatcaaaccgttatcctttcagcccgagaaaagtactacctctctttcgaacttgccgtaggaggagaacttttcaaccggattaccgcgaagggaaaattcagtgagaaggatgcgcaggatgttgtcaggtttgtcctcttcttttccacactgttatcagtagctcttgactcatcaactacaacaatgacaataaaagatcggtcttgtcggcgttgatctacctgcattcacatgatatcgttcatcgagatctcaagccggaaaacatcttgtaccactcacatgacgagaattcgaagcttgttttggccgactttggaatgtgagttttgcctaacgtgatgtctgttgtccaagaacgacgatgaagccgaagacaaacaagttgattacgctccttttatacatgctgaatcgcgctgaactagcgccaagcacttgaattctggagagaagctgcacgctgtcagtcttcacttctattttgttttcttacgcgcctccaatattgttctcatctttatttgtctgtcgctctgagttcttctgaatcaaggcggctggctccatcggttatgctgctcccgaggtccttaccggtgtcggacatggcaagccagttgatatttggtccttgggtgttgtaacatttattctactatgcggctactctcccttctcaaaccaggataacaacgaattgattgaggagaccatccgggggcgaattgtcttccacgagaagtattggaagaagcctagcgcagaatgtaagctagctcttctcgagtcgctcttttcaaagcttatctaaaggattgttagaatcgatgatcttatctcattctttcctctcattcgttcatcctcgaagctaaagaattcatcaaatggttgatgaacgtcgatcctgaccaacggcctacggcccaagaggctcttgatcatcctgtaagcgtccgattctttcatttgtcacttcattcaagattttttctcttttacttgaacggtctgctcgcttgaatctaacgtcgacaattgttttctgtttcccagtggctatcgtcacatctccctcaagatcatgatatcggcgaaggtcttagaacaaactaccgttcgacggccagcgtccgatggaaatccgcttacaacgtatgagttgatcttcttctctctcttctcttttttcttttcttggaaacttttcatgagaccaaaagtactgacggtcttcactctaggttattactgctaccaaccgatttaacgccgccggccaacgttctcgtcaaaattccttatatggcctacctcaacaggatggaggtcgtgagactagatctggttcagtctcgactgtatgtgacttgatctcttccgttttagtctgatatcccacggattgtacattgacgagaatgggtcgatgttcaccttctaaagacgagctcgggaggatttatgaccgccgacgagagcgatcatccgagtccccaacctctccagcgggagatcccttatgagagtttcgatagtaacgatcccgatgctgctaccctgtaagactatccctgtcgttctctgcttcagtcgttctgtttatatgccttttccctttctgacttgattggttgaattatatcgcggttggatatacagtaatcatatcgagacaaagacgggtgctctacagctttgagacccacgtgcaggaagaagagctctaggaagccacttttgtcggcttggtctatcaagctgtatgcttgctcctaccttgaattacaaactgtttctctcattcttcttgacatctcttcggtttgatgtttcggccttctgcttgcccttttatcgccaacagtcgattctgtcttcagatcctgatccttgtatatgtttttttaacattattcgtatatgatacatgtaatatattagga

SEQ ID NO: 1234 - DNA, 762 bp, Xanthophyllomyces dendrorhous
gtaaaggagagagggagagggaggaggagagagaaaggattaaggaaagggagagctcacttctcctccgaggacgtcgaccaagcattcgagacccatacagattccgagcagagggacctggggaaaggcgggggggaggaagagcagagcagagtaaagaagggcagagatcagagacatgatgacgatacatgcacacacagctaaagcaggatacatacctttccaaaggcccaaaggatggcttgtcggctgatgccggattcgtgtctgggatggcctggtccgggagagatgacgatatttttgagttgtccggcttggaggtatgcctgtgggagttggacgagggaaagcagagcagagcagaggaaagcagagcagagcagaggaaagtagagcagaggaaagcagagcagagcagaggaaagtagagcagaggaaagcagagcagagcaaagcaaagcaaagtaaaggagaaggagagatcgtcaggatgctgttcaagaacacacacaaacacacagaggagaaagaagactacgaaggatacagaagtcgcaaagactattacgcgggcaagaaagaaagaaaaaggaaggacatacatcaagatcatcgagagagatctcgtcgttcctgacgaccttgacgtgtgcgccagactgttcgaggtactggtagatgttgtgggtgaacgagtcgtagttgtcgatcatcagggtgaacccgtgagggaaccttttttttttttttttt

SEQ ID NO: 1235 - DNA, 490 bp, Xanthophyllomyces dendrorhous
aacgctgtacttgatggaagttagtaagttcgattgatattgacgttcatttgactgtacacattcaaatccaagtccaaactaatttccatcgcttagatttattatcatggtctcacgacatcagcttatactgaataatcgtatgtccaaaacattggaacgattgctacttccagctttcatctacaagttgaaacctagcaagtgtctttcgtcagtatgtccaattactaaatagttatctgagctgtgaatcatgtgcaagatacatattcatgtacatatgtttagcaccattcggtcaagcatcatgttggaattaggtttgaacattgcacgaaagaagtccttgtcaaagatctcaagaagtaatctttgtgtatatctaacactctcttgtatttcatagtctattttcaccgcttactgcattgacacgtcaatagggctttcaactttaacaaaacaacgaaaacgtactgctaaa

SEQ ID NO: 1236 - DNA, 351 bp, Xanthophyllomyces dendrorhous
tcctgaccgtggcccgcgacgatcgacgaccgatgagccggtctcgttcgaggcgtttctggccgagcggggataggacgaggaggtgtgatggtcgtcatcgtcgttgttgtcgtcgtcatcggcatcattattggcagcggtggtagcgtctggatcgatcggcagggacggacgatggagctctcgaaggtgtcgacggaaggagagttcggtcaggtgggatcgaaaggagttgtctgttgggttggttgcgaaagctgtttcgatttgtttatttgagtttaggtagggacaatatcaggtgtcagtgtgcgcaatgttgcgagaagagagagggggagagggaga

SEQ ID NO: 1237 - DNA, 1738 bp, Xanthophyllomyces dendrorhous
  misc_feature (1392)..(1468): n is a, c, g, or t
gaaatgatgatctgtattttatttgaatttccaacaagattttcttttcgcccacaacttccaccttccttcgttctttcgacgcaccctttcgagatcattcaagccaggtctttgctgctttccaggaggttgttctaggaccagtcgagagcatccccacgtttgttcaagcacccccaaaatactggcacccacacacgcccactctcttcagcatgttctctactcttaaagcggtcggatcgaaaaacgcatggtctgtaggtcgagctcggttctcgaccggtctgactctctacgcagacgctatcggctctggctcgtccgacgttggggctgggtctggatctgggtcgacgtttgtggtgccgaggccgagtggaccgtcgtcgaagaggcccgagttttatgatgcaaagggcaagctgttggctccgtcgttactgcctcacgttcctccgaccccgaagcaaccggtggtcagacagtatctggacgacaccgaggtcgatccggctcacccgctctgggcgtttttcaggaaggacgagacgactgggaaggtgcttagtgtggaacgaatgagtcagaaccagcagcggtccggtatgtttgtttgtttgtctgtctgtttgggaggttttctttgtatgtgggagaaagagaggaaaggaagaatgaatgagctctgggttgattctaaatatctgtttgtctgcttttgtgtgtggctttgcttctgtcttggtttcctaggtcgaccgtatttgacgagtgaactccggataaagtcgttccaggagcttcacaccttgtggttcttgttgctccgggagaaaaacatattctacacccagcgagaagagatgcgtcggcgtggggtccgggctggtcttgctctgggcacgaccaagcaacgaatgaaggtgagtgtgtgtgtgtgttttgggagatgatgtgatgtagagaaggaggcagagggaccaacggattgagagagggggaaaaaaaagcgagaatgaaaaagaaagaatgaccggtatgctaactccttgctatctgcacgttcacagatccaaacgtcgatggctcggatcaagtacgtgttgaacgagcgtcggttggcttacttggccgttcaggcggatgcgaacgaacaggctctcgcccaggccgagagagatgagttggaggccgagttggccaaactgagagcacttgaggaggaggaggcggcagtggtagcggcggctggtggtcgtggccctagcgagctttaaactgggggagatggaggagtaggtatgatgagaaagataggaaagaacagagtgagctggtgttgaatggtgattgtatcgacatggatcttttttttttttttttttnnnnnnnnnnnnnnnnnnnnnnnnnnnnnnnnnnnnnnnnnnnnnnnnnnnnnnnnnnnnnnnnnnnnnnnnnnnnnttcctttcctttcttttccttgctgtgacagacaagtgtgaggagcaggatgagccactcagtgttgtgcatgggctgacttgagaacacgctcaggaaggttcaagagaaagagggcgcgagcaaggcaagagcgagagagagagagagaagtaagaatgaaacactgagcaaccacgcgcactagcttcatgagatcctgtggccagagccagctttgatcaatcaccaggctaggggagagagacgttcccgagactgtacagactg

SEQ ID NO: 1238 - DNA, 2400 bp, Xanthophyllomyces dendrorhous
gggggggggggaaagaaaaggaatacacaccatcgtcaacctcccattcgatcctctttcttcctgctccccctttagcctctggtacggtttgcaaccttaataccgtatagagcgcaacaaagaacggtttcggtcccacatcgttcttcccagcatgcgtcttgatgaacgccttgagtctgttgagtcgctccctcttagcaatcgctccgtccagatctcttcttgcttggattgttaatcctccgccaggctcggtaactcggacgatgacttcaaactcgtttctccgtcgaagcgactcgtccgcatgaaaagcagatcggattgaagcttgcgttcgagtgaacgccgctcgatgagatggaggtagagtcgagagaacgtggtcgatatacgcttgagatctggggtcaccctcgtagaataaacgacggcagtgctcggagaaaagattgagatctgctggagagggtgacgaaggattttgcggtgctttggagaacacggaagtagaacccggcgtcggtgaccgaagaggtaatggggaggggaatgaaggggaagatggagaagggtgagatagctgatgaaagttggaacaagatggatctatagacagcactggggcatgacgagcaggccgagcctgaggctgatgaatcagcggagacgtcgtagctaagggaagtggtggcagtgacggcagtggcagcaaaggaacaacacacacgaaagcctttgatcagttttacagcatcatagcagggttctaaaggagccagtagtagaaaaacccagcaggcttagtaacaaagaaaacataggacctaccagctggtgtcgaccttccgtttccagtcccctgtttttgacctaatcctggtacccttccgcctacagtacttttcaatccacctgctgttctgcttccagctgctggaggtgataaagtcctgttaagtccccccgccgttcccctcgagttggatcctgcgtcggattttgtaggattaactataggagaaaatgacggcgaagatggaacgccggccgagttgggatgatgaaacgaagggagatcatacataggcttgaacgccacggaggtatattgactgtttcctgtcggtccagatgcagctcgatacgtttgggaagtgtttaatgagctattggctcctcctgctccggccgtgtgatgccgagggtaattttgatgaggagggggatagtctgacatggtggaagtcatcgctcacaagggataactgtttggatttctccctttgttcctgatacaactaatttttctttcttcgaatgtgtcggtaaagaaaaaacaagaaaaaaaagggaaaccaaggagttatgtatatagaggccaggtcgaaccaagaaagagaaggaaggtttgagaggcaaggtcgggaacagggggaacaagaggaagaggaataagcaagagagaaaaagaaagcaaagaaggtgaagccggcgggggttgtcatccgaaggagctccttttctcggcacgtacacgcgaccatcacaatcatcttcatttctactcttccagttcttttcaacagatgttacagcagagtgtcttcaggaggagatgcagttctacaaaaggcaatcaaattatacaacaaagcaataaaagccaaggttatatagctagtaaagcagattcctcatccttctcttccctgatcgagggcccttccgaagacacggccgtcttttccaacccgttgacagctccttcagtctgaccgtgatttatagaatctgaggtcaaagaatctatacccttttcattctctacaggattgttcgtcgaggctatcgactctacagcttccggactgggcgcagcactatccaacagaggaacccctttcgagatttttgtaaatcggtccttgtatgttttcaaccgggtttccagctgttctgataatgtcgagtttgaattctccaactcagcctgtttgataccatgtattaagaaaaacaaggcatgagtgtttgttcagtgtctggatgacccaaacaaagatgcagaaagaggaaaatgactcacgagacgcgtctctagatcagatagcccgtaaagtctcggcggaagtgaaggtaatggtggtaattttgctaagaaaaaggagaaaaagaagactcgacttttcagacaaatgtgtcatatttggaagtagctaaaggcgaaaccggctattaggcacatttttagagaatgacagaatgaacaacacttacaaacaggatgtacgctgagaacgtcggccatcaggtcgtgattgagtttgtatcttgcgatagcaatctcccgttctgtgactcgctcaaaaggatcaacaaatacctcctgag

SEQ ID NO: 1239 - DNA, 1352 bp, Xanthophyllomyces dendrorhous
ggggggggggacgaacatttcgggacctctcttttgggaaaactcgcaatgaacgacgacgatcatctttttgatctctccgtttttatccggatgaccgctcacactaggcgacggtaagccggccttaccagctttatccagaaagtaggcctcgacggcggcgtcatcagtgatgttgacagctccttcgatatggccaccgacgaattcatattcgaatcgacagtcgatgacatgaacgtcagtcacctgagatgaataccctcctgctagcagtttgtgaagctttgggacgattgcaacaatgtcagtctggtagatcagggttcacagctggaagaagaggcggggacaaatatgttcttacagtagcaggctcgatccgcatcaatccatcttccttgacactcttgcagggcaagatcttaccgaccttttcctggttgctgaacccaccgacgaacgagttttcaaacccattcaaacagaaccctgacttttcctccagtggcgacttgacgctgatctttgggatcgtctttccgcctaccagcttctggccgtcgagggcaagaccagcacagggagatccatcggcagaaggataggtggcgtgtcgttggaagtttcgtttggaagagagcatatcggaagagccctgacatgattcacctccgcttgctccgacagagctaggggaggacgatgaggcgggatgatgatacaagctcggtcgactcaaaggcaactgggccgagggtggtcgcccactctcgatcgcagtcgacaacgcccgtctgaacggccctctagaagagaaccctgttgagttgggtcggtagagcatgttcgccatgctgttatcatcatcatcatcgtcctcgtcttcgtcatcctcacgttcgcccatcatgattggatacgcggactttggaggtgcgggcatgccttcgaaatcgggcgacggttgtagagcagaaagagtgggccgtcggttgtagggtccttttcgtctagaggtcgccgttggtgcgaaatgactgacgtttcccttggaggaaccgatgttgaggtgggtgaattcgaatgcgtctgccgtcgatggctggacagacattgccgccgtggactcgatcgggaacgaggaggaggaggatgcggaagaggaagagaatgaagagggcgctccgaccccaaacaaaagcgctggagaggacgacgatgaggacgacgcaggagagacggagatgggtgaaggagagcccaacaggtcgaacggtttcgccggagattctacaaagaagttcgccatgtcagccgaggaggggtcgatgagcgaggaggaggat

SEQ ID NO: 1240 - DNA, 2398 bp, Xanthophyllomyces dendrorhous
acgagaggctaccctcgcagatgggtatctaacgatgaagcttgcgctaacagtgagctgttacctttaaagcaactagcttatagaaagcaggtatttcgcctgtagtcggctcgtacccgacgttgcttttaggtaacagcgtctgctctctcccgagagtagcgttgttcggtccaggagagccagttcctgtctcagccctctaacgcttgcgattgggaggagagaataaacattactgccttacggcaatctggtggactctaaatgggtccactacaacgaacccattttgtgccacaggagaccttattatacttgtttattatgtttactaatgttttcagccctcgctggctcctgtccacaaatgcaaaggatatcggtaccctctaccttgcctttgcggtcatctccgggatgctcggtgctgccttttctatggcgatccgcgcagaacttgcctctcaagggatccaagtccttggcggtgatcaccaactatacaacgttgttgtttctgcccacgcgctccttatgatcttttatatggttatgccggcgctcgtgggtggctttgggaactacctcctccccgtccagattggagcggtggatatggcgttccctcgtctgaacaacatctcgttctggctactgcctccctctctgatgttgttgctcttgtcggctcttgtcgaacaaggagcaggtactggatgaactctgtacccgcccctctcgagcctccagtctcacagtggtgcttcggtagacctcgcaatcttcgcccttcatctcgctggtatcagctcgactctaggcgctattaacttcatcgttacactcgttaacctccgtgctccagggatcacgttcgaccgagttccactcttcacatgggccattgccatcacggccgtattgctactcttgagccttccggtcctagctgggggtattactatgcttctaacggaccgaaacttctcgactagcttctacgaccccgctggtggaggtgaccctgtgctgtaccagcaccttttctgattcttcggtcatcccgaggtttacatcctcgtgatccccgcctttggagcggtatcccacgtcgtaggtgccttctcatacaagtctgtattcggcaccctcggcatggtctacgctatgatgagcatcggcgtgctcggttttgtagtctggtcgcaccacatgtataccgttggtatggatgtggactcccgagcctacttcaccgctgcgacgatggttatcgctgtgccaaccggtattaagattttctcttggttggctacgctctatggtggcgcccttgaatacagcactgcattgttgttcgctcttggatttatcctgctcttcacgctcggaggcgtaactggggtagtattggccaacgcctctctcgacgttgcgatgcatgatacgtactatgtggtagctcacttccactatgtgctgtctatgggcgcagtgtttggtttgtttgcggccttctactattggttcccaaagctcacaggccgctctctttctgaattgttcgggaaggtacacttcggtctactctttgtgggagtaaaccttactttcttccctcagcacttccttgggctagctggtatgcctcgacggatccctgactatgctgacgcattcctcgggtggaatcgagtctcgtcattcggtagccttctgtctattgttgctacggttgtattcctagttcttctaggtcaggctctttctactgggcgtgtcgtcacagcggcatctccatggacaagccctgactttaatacttctgccgctgttcaagcagaccgggtttatggtgtcgaatgggctgtagcttctcctactcctcttcacgctttcgagcagcttcctgttgctacaactagctagctctaagctgtgaatagtcgtaatgatgttcgttgttacattttgttttagaatgtgaagctttatgctttatgcagtacaaggctaaatgtatttggtctatacctttaggtggtgtagtgaagggagcaggtggtgctccttttaatcctctttgctcggctgcttgcgtcgcaagaagtaaggctctgaaggtctcaaaggtctatggaaacatatgctcggagaagctctcggagaagtcgtcgaacctcgagaggctttcctcgtgaaaggactcatgtagaggggtaatggacccctatctggtggctttatagcatgaaagagtgtgaactctctctcttccagaggctaggtgagcctcgttagtagcgtagaaacttgaaattcccttaggagactatggggtctcgttcaaggggctatggagccctcttggtgaggagtagtggactcctct

SEQ ID NO: 1241 - DNA, 535 bp, Xanthophyllomyces dendrorhous
tagcgagctgagtacctccgaccccgatcgagcgtacaagagtacgcctgtgacgggagtcatcggagagaaagctcaaagaagacagctttctctgagtccctgtaccgattcctccctgtggggtctcgaagagaagattcactatgatctagtgttccactagaccaagagctcatcttatcttaaatgagtatactcgttagcactcgcatcctcgatcgcttagcgcaatggtagcgcaaaggcttgaagcgcctttggtggaggttcgattccttcagtgatcacgatcgacctgatcacctcggatcgactgaggatgccccctcccttactgcttcttgatccttgccttatggctgatcaagcagtcttgtgaggggctcgtcctctacgacagcggagggtataatccgccgaggcattggacgagttactgtagtaattaactcgtctatgcctcaactgacttatacttatttttgatttgttgaatttgctatggtcggagtcgcgcttggcgtctctattg

SEQ ID NO: 1242 - DNA, 782 bp, Xanthophyllomyces dendrorhous
agctactcctctcgagcaattcaagagcacgcccctcctcctgcttgacgcaaattcatttatgctgcctctcacagtctccgggctgtatacaattctgcccgtcgtccttctcggcagcttcttctttttggtccgacctactgtcgtccctcatcgatgaagtgtcgcccaggagtctattggagcgacacttctttctcttgtacgagcgcagctcggaaacaagcacgaagtgatgtttcctctaatgactgcgctctttcttgttgtcctcgtccttaacgtactcggaaatgttccctacgggtttactgtaacctcctccctgtcggttactcttggtttgtccttgtcaatctggttctatactcttttgcttgggattgccaaggacggcttgggcttcctatcacacttcgttcctgatggaactccgttggtgctagcgcccctgctagttgtaatcgagacagtaagttactgtgctcgagccgtttctctcggtgtgcggctatttagcaacatgcttgcgggtcatacccttctagcaatccttagcggattcctaagcaagcttgttgtctcttcagccgcagttggaatcgcctgtatcattccttttggtttcttcgtagtcctagtcggtctagagctcgctgtcagctttatccaggcctttgtcctggttgtcttgacagctagctatatccctcgttagccccgagaaacgaaaggctttctacagccgatggcttgtgtcttcttgactctacgagtct

SEQ ID NO: 1243 - DNA, 1709 bp, Xanthophyllomyces dendrorhous
agccgacgatgagctatgaattaaggaacgaaagaacaagtccgataggatcaataacgattagcctagagggctcggggaggcgacaaaagctctacgctacagggcgtaaccaagaccaacgggattgagtgagtctgtaagcgtagatgttagaatcccgccgacaaacacggctaacaagagcccgaagaggcagtacatctcgtcgagacaggtcagaggagaccttcagggaagggcttcatcgaccgtaggcgatacgagagtacaatcaaaccgagtagactgcgccaagcaggacactcgatcccgatagaaccgcgaggagcggatgtaagaggtacaaaccaacaacaacaagtacctctgaaatccagttcagagtgatagggatcgcgatgttggcgcaggaagcgaggaagaagaacgtggccgagagaggcataagcaaggtgaggccacgaaagtatcgaaacactcgagtgtgataccgctcgtaaagcacgccccctacaatgacaaagagggcgggcgaaacgagtccgtgagctaacgagagaagaaggccgccagaggctgctgtcggggacagggcgaagagaccaacggtcacgatagccatatgaccgacagaagacaaggcgataacagccttcacgtcagattgccgagttatcgaaagacacgaaagaacgagggtaacagaggcaatcgcaaagacgaggggctgaaagcgcaaggaggcttcggggagaagttcgaggcagacccgcacgaagccgaatgttgctagcttcagcaccacaccagccagaagaactgacatggcgacaggagcctcagcatgagcgcgatagagccaaagatgaaaaggatagagaggggtcttcaccgcgaacgatagtgcgaatgcaaatcagagtcacgcttgcgttgacgaagcaaaatgagcactagcgagagagtcaaacgtgagagaccccagctctagccaaacaaagaggatggctaggagcatagcgagtgagccagccaaagtataaagaaagaagaggtaagctgctcgtagacgggcagcaccgcttcctcaaacaccgagggagatcactacggggacgagagacgcttcgaaggccacgtagaaagtcataagatctccggagagaaaaacaatcaacaaaattgactccagagccaggaggagggacgagtagctcgtttccattgagcgtccagtggagtatccactgagatgagcaataggaaacagagagctcgtcaggacgataagtcacgcggacaaggcatcgacgttcgcgttcacggtctggagtcaatgaccccagacaacaagtgttgccactattgtggtaatggcaacacctagggctaccccccgtgagaggtagccttggagacgagaagcgctagctgcgagacctaaggcactgacgagcgggagggtagacaacaacacaagcatacaaacattaaagcttccttctcgaagctttaaggtttaagatcaaaaagggattcgaacccttgctgtccgaagacaactcgttttcaagacgagcgcattagaccgctctgccatttgatcggggctaaccccagaatgcaaaattgttgaccgaaggtcttatgattttgctctatcaacagcaacttcctgctgcgcatgggtagccccaaccaatctc

SEQ ID NO: 1244 - DNA, 476 bp, Xanthophyllomyces dendrorhous
gggtagccccaaccaatctccattggcagagcatccatgtcttcttagggacatgagactcatacggtcttttgcttgccgtatgcagtcatctcatgctattccctagcactcattacaacacaatagacccttacaggtctactgtactgcacagcttcatctcccattgtacacgctatacatcttctttgcttactaatgcccttcttacaggatgtacggttcacccaaagaattgtgtgatgtatactttcctcatgcaggtactgctagctattcttcatcgcaactgcttttctcttcccctcctttcggcctatagaaactactaaccgcatccgtatttgtcgctcttacttagaggggcttatcccgagctctcatggactagctcagtcggagcataagtctagtccatatgtgagggctctcgctacacaccagttgctgcgaaggagcaggagaatccttcc

SEQ ID NO: 1245 - DNA, 1415 bp, Xanthophyllomyces dendrorhous
caggatcaattacgattaaccaacaggcccgggagggacagatgtcgtctcttacgaaggctccataagcaatggatcttctctaggtttggcctgctgagagaagagacagttacaaaaggagccacagtaaagagagcgacggtgagagggagaagcccagttcacccgaacaccataagagaatcatatcggagtcgagggagtgtcccacgagctcagacgtagatataaacgaagagtgaggccttaagcccaaggagggctttgccgagcaacatatccgaggaggcgccccctaggaataagacacaggttactgtgcttatgagtacaagggcggcgtactcgctcaggaaaaacagaacgaagggcatcgaactgagttctgtcatatagcccgcaacgagctccgactcggcttccgggaggtcgaagggcacacgattcgtctccgcgagggcagagatatgaaacgcgaccaagactggcgctagaggaagaagcaatcagactgattgctgaacctcaacgacagtcgccaaagacatcgagcccgagatggcgacgactacaagcactgcggtgcccagagtgagctcgtaagagatcatctgtgcagcagcgcgtagtgcaccaacaaaagcaaagctatttgcagtcgaccaaccggcatacaagacgccgtagactgtcagcgtggagagcaagatcaatacgagaaccgagtaatcggtctcgtagatcgctagtccacgcccaaagggtactacggcgaaaccgaggagactgcaaatcaggctcaggaggggtgctagcatgacgaagatgcgcaaggcctgcgttggctgaacaaattctttagccataagcttaagcgcatctgcaaacggctgcagcaccccgtaggccccaacagtattggggccaacacggcgttgcatcgctgcgagacctttgcgctcagcaatggtagagaaagcgacacccaagagcataggcagaataaggaaagcattaacgagagcaaccatagttggtcgagtcactaaccgaattcggcctatgcaaacaggaaatgatacccgtaaagggtggggagggggcacacaagcctgggagaggttctcacaggcaactcgtagccaaaggttcatatgctttggctactcaccgctagtgcttctgagacaagctcagctgtaactgagcttatcctcgttaatagtctcctagactatcgaggatgtctagtcagtagcacaagtgctcctttcgacgatcctgcaacgtgatcgacaggagagtcgaactcctgtctcaagcgcgaagagcttgtgtcttgaccactatacgagtcgatcgggtgtgtactcccgagatagacgagtatcatttgaaggcaacgaggacct

SEQ ID NO: 1246 - DNA, 1010 bp, Xanthophyllomyces dendrorhous
ggggcggaatgagacgcgcagcttactcctgagcaagcagccaggccatgtattcagatgggctgaggacgtttaccacaataggcataaagccgtggtatacgccgcaaagctctgagcattggccgtagaagctgccaggacgttctgcaagcgtcgaagtctggttgagacgtccagggatagcgtcgagcttgatcccgagagacggcacagctcatgagtgaattacatcagtagatgtaatcacgaaacgagcgtgcgtatctacggggatagctacggcgttatcaacctcgagtaggcgcagagcgccatcctcgaggctggccgaatcaaccatataagaatcaaagacaacgccatcgttgtcaccaatctcactgtcggagtactcgtaagaccagtaccactggtgtccgagtaccttcacagtgagtgaaggcgcaatcacctcgtccatcaagtaaagaagacggaacgaggggaatgcgatagcaatcaaaatgaaagcaggagacacgatccacactagctcgagcagtgtgccgtgattcaggtacttggcggctgaaggccgaccagcactgaatcgcaggcaaatagcgaagagcatgtagactgtggcgacaacaatagcaacaacaaagaagagggccgagttgtgcaactcttggatcccctcgaaagctacagaggcagagtcttggaaagacaactgccaagcttcgggggagtcaagagaaactgaagagacgaggccatcgagagaccaggtcccaaagaacccaacagaaagggagtccgaggacaagcccaaaattgaccacaaagaagtataaatagcaaacattggtcaataaagggcgtacgaggaattgaaccccggtcgggctattaagagtggccagctttgccactaagctatacgcccgcgatggggttatactggctccctttcgggactggtcctctctttgttgaagaatctttgaaggcaacgaggacct

SEQ ID NO: 1247 - DNA, 485 bp, Xanthophyllomyces dendrorhous
ccgcaagcggagctgaggaacaaggggattataaggggaatgttccccttatatatagggactacgtagtccccttaaattttggtgaggcgcagaagagcctgtgagcggtaacatgacccttctccaggcgatttcaaggctcatgtcttatacaacttccttatcgtaaacttccttttgtgaggaaagctcctcgacgtccgacagcctttccgagagcttttagagccccatgacctctacgatcctttcctcctgccgctactgcagtgtcggctgcagtcccccttagaaagctcccgagctttctcctctccagggagtctactactcccttttccacagcagtggcgcctgctgttttatgatttcttctaaagactctcttgacgtcacatgtcctttccaagaggtctttagctctacgatctccttcttagcacaggagttctagactcctttcggctgtagtatcggctaca

SEQ ID NO: 1248 - DNA, 2725 bp, Xanthophyllomyces dendrorhous
agagagcaccgtactcccccaaatttcccttgtttacagctaggctccagcctacctagctctctacactaacctgagagtgtagaccaagtctcatgagcacaacacatataaagagttctctagtctagattctaaagacaagcacaaaggaagtagaaaagagaagtcctctatacaaaagctataagactcatagcccatacgagggaggcaaagggttctaagaccaccatcttagggaatctacgcagccataagtgcgtagaccaaaatagcaaaactaagttacatctaggaagcctgcctcgtgttaaggttatatagaacctagaggcagagatgagtagagttgcgctagcaaaagtcctattgaagaaacaaagggctagcaggtttgcaggtaagctaactaataagaagactacaacatctggcacagagcctctaaagaaatatagctagagaggcgatgtaaacaacaacaagaaagagtgaggcaccgaagtaagctgcgatgccgaaccccagagtggctcctgcggtcaaaagcacaagacggctaatgcccggaccagaaacgcctaggcgtgaatgggcgagggcaagcaagcttgtgctaagaccaaaaggaccaacaagctcaaagagtcctcgatcaagagttttataagaaatataggcagcagagaggcctgtgcgagaaacaccttgagcaaggaaggagtcggtaccccactttgtctggctaagaatgccagccaagtaagaaagacgacgactgcgcttaaggtctacaggcacagagactcctgtggtgcctacaaacagaccaagggccgaagccactaggggcaaggtcacgaataatgctgaagtagaatattcagtgtcgagaggcgaggaagtcgaagggtactcagcgagacccaagactcctgcattcggcacgaatacttcactgaggcagtacccagccacgatcgaaagcacccccagaagagtcaaaatgactcgcactgttggggttgtaggatcgtgaagtcccgagaccatagcagaggtggcacgaggaagtccttcaaaagcaagataatgtagacgacctgaatagtatagcgtaagcgccgcacctaccagggcgagtattcaggtgacattatgaaggaccataaagccaccgagctgtgtctcgataataatatctttagaaaagtctcccgaggtgtaaggagcagctccaagcgctgccattgccataagcatgattgtagccgtaaagggaaggaatcgaaagagtccccccattaggcgaagatcttgcagaccggcaagggcatgaatgactgctcctgcaccgagaaagagcacggctttatacagcgcgtgcaatatgagaagcgagaacgcagctgtatactgcccagtgctacaacccaaaaccatatacgctacctgggaacaggtactaaaggcaataacgcgcttaaggtctgtctgccgtagagctgtgataccagcatagacggcagtacaggaaccgagaagcgttactcctgccatagtagaccccgaggaggcttcgagtagagggctgcaacgaataagtagaagggcacctgcggttactagagttgcagcgtgaatcagagccgagacaggggtcggggcttccatcgcattgggaagtcaggcctgtagacctagttgggctgacttgcctgcagcagcgcaggcgacgaggaaaccgagaggaacgagggttgactccgagagcgagctagaggcttcgcctaagatggatcagcttagcgatccagctccagcgaaggccatagcaagcacgagagtaagcgctgtatcacccatccggttaagcaggaatgcctgcacaccggattgcacagcattggctcgtgtataccacaaagagataagtagatacgagacaatgccaataccttctcaaccaacaaacatgatggcgaggcctgtcgacatagagagcacgagcatgagggctgtaaaagcaccgatatacagcatgtatcgagacaagtgggggtcaccctcgagataccagcccgagtagaagtgcactccacaggataccgtcatcactgtttgtaccataccggcagcagttgagtcaagaacgagggttcattgaactcgttgggaatcaacgaggaatcagtccccgagagagaggctcactgatgacgagcatcaccaaacttcataaagagaggcggtagcgtatagcaaaccgactcccatagatgaggtcgagaggaggagaactccttgagtaccgattcaccgagtaaacaagctagcgaaagctgcaaatactggacttagtaatacggccagtagcattacagttgagctagcgagccccgcatccgaaacacgcccacaacgagggccaagccgatagcgctttcagctcctgcgatactaatcgcaaggagagataagacgcttgaggctgagtccacgtagcgggttgaggctacaagaaagaataagctagcggctaggagcatcagctcaaggcaaaagagtatacgtagtacactctttcccgcaagagcaaatgcgattaagccgataacaaataagatcatagcaagtagcatcgatgtgaaacgagatgcaaatattgccctacactctaggtgttaaaatgcttccatactatgcgagggtagcctctcgt

SEQ ID NO: 1249 - DNA, 2166 bp, Xanthophyllomyces dendrorhous
aaagagggatgaagctgtgtggatcctagtcccgcaaggggttaggtgatataaatgtgtgccagggataagacatgagatagtagtacggctcggcaaaagatcgtatagccctcatcaccttgaaaagacttatgccattgggaggctgtggagcctctagagaagcgtaagccaacggtttaccgttgttcttgtgccgtcaacgatcacagtagaatgagatcgctgtcggatcattacggagccccgagtttatggtgtaacggtagcacacaggcttgataggcctgttgcctaggttcaattcctagtgaactcacttgcaggggtgttgaaatggtagccaagcaatgtttaggacattgtgactgtatagtcgtatgggttcgagtcccatctcccgcaaaacttcgtaatgctccgattgctaaaggcgaaccccgttcttgggctagccaattcgtacctcgtcgactcagctcagccgtcctctctgtcatatctctggaacctcggcagcctgcttgcagcctgtctcgtggtccagattgtgacaggagtccttctggcgatgcactatactccgagcgccgaattggcttttgcctctgtagagcacattatgcgtgacgtctcctacggatgacttacgcgttatgcacacgcaaacacagcttcgctattctttgcgtttgcttatgttcacgtggctcgcggtctcttctacggttcctaccgctcaccacgggttctaccctggtcagtggggactatcctgctagtggctatgattcttaccgccttcctaggctactgtttggtctacggccaaatgagcctatggggcgctactgtaatcactagcatgatgtctgcccttccctgggtagggggtgatctagtggagcttatctgaggcggtttctccgtatctaacgctactctgaaccgcttctttgcgctccactacttgtttcctttcattctcgcggctctcgctgccgtgcacatgctaactctgcacgagcacggctctggaaacccgctcggtctggactcgaacgtcgaccggctacctatgtcaccttatttcctatttaaggatgcggtgacaatggtgcctttcgcccttgtcctcgtcttgctagtttcttttgctccgaatgtcctaggacacagtgacaactatatcgaagcgaatcctctggtgactcccgcttctattgtccctgagtggtacttgttgccattctacgcaattctgcggtctattccagacaagctcctaggtgtccttgctatgctagcagccctcctagttctcttgattcttccattgaccgatactgctcgaacccgaggcgctcgcttccggcctttggcacgcttcgctttctggtccttcgttgttgttttcattttcctcttgtacctcggagcctgccacgtggcatctccttggatcgaggttggtcaagtgttgacggttctctacttcggctacttccttgtcgctgtacctgctacgggtgttatcgataacacccttgctgatatcagcgtctcggagtctcctcggtagagcccgacaagttcttcggtgaaccgctatttgggctgaatcgtttgagtgattcagtagactaggagaggttggagcctagtccctctgcactgcgcctttgcggcttgtactcttagcaggacaggctctaagcctctctgtctgggatcactcttgtggcccaaatggggttcgtttaggcccctccccctctttgtgctacagcctgctgtagcctttgctctcttgtagaagctatagcagcagtccactgatgttcgatcctgctgcttaatttgcctgcggcactcttttgtgcttagctcggcttatttgctgtgagcctcgtctcagcccttttgggtctgattaacctctagtgaagattcttcggaacttagagaagtcttcaatcggctttgcttcggcatgtcctgcgtaccttagaccgcctctcttcgcctttagtttagttttacttttcttaagtccgtgaagagggtctttgtatcgcctgtctgcggctataagctaaagctggttcgagtttggtctacacctgttaggtagtgtagaagaatagacaggaggtgtttgtc

SEQ ID NO: 1250 - DNA, 2141 bp, Xanthophyllomyces dendrorhous
acggcgagcaaaagaccgtatagctctcacaccctcaaaagacacgggtgtcgtcgcaatggagattgtggtgcctccccgtgcacgttacgcaagtaacgggtcgtcactagagatcataggcttggagaagaattcatctgggaggaagtgctcatttagtacattggtagtacacctctcttgtaaagaggagaagtaggttcaattcctgcaatgagcacggtgatgccgctataggcgaggcagagcttttgctagaagcttggactttatgttcttaggggttcgacacccctcatcactcttctttccccaaatgcttataatttccttaattgcttgtgtagcggcgtgaactgcgtcttcgatcgatgctcgatctttctcgcagtccgccatttgcgcactcgcaattgcggaatgactcctctttgagtcgtttgcatttgggggatgggctccgatcgctattgttgctatcggagctgtcttcttgggcgcgtggccatcgctgcgtgtcggacaagcgattgttcgaacaggatcgctgtcccttgcgatgctcctctttctactggctataatggccagcggatgtatacttctttcagctctcgattctgcgatcttctacttgactctcgagcttcaatcgtactcagctgtccttatagccagtgcttttttggagtctgagcgatcagcaagcgcctcccttctttactttttggtaggaggctttgcttcgtccctcatcctcttgggtctcggtctcacttacgctgcgacgggttgtcttgccctgagcgttcccgagacagtagaaagctcgtatggcttgagccttctcgctttaggtttattgatcaaactcggggcagccccagtccactcgtgagcccctatcgtctatgatgatgttccatcaatcatagccttggtgctcgcttcgttgcctaagctcccccttttgtttgctctttatctctgggcagctgccgcgccttctcttatcctggtctcggccttagcttcgcttgtcctcggatccctcttaggactctcgcaatctcgtgtcaagcgactactagcgctatcttcggtaagccatactggctttatcctcatagctatagtcgtgcttgacctcggtagcttgagcctctatgcgggacagtacgtcctcgctactatttgagccttcggcctcgttcttgcctttggctatacttcgccccgtcttcgtggagacttcggttacctagccgaattccagggaatagggctagctaatcctgcgcttgcgacgggtctcgttttagttcttttgaatctcggtggcgtaccacccctcctaggcttcttcactaaggctatagtgcttctcgtttccctcgaaaagggagccttagctctagccgggttggcttgcctaacctcggtttgatcgatggctttctacttgcggttcatttcgcatttgctatttgtgtcaccgcaatcaagcgccatctttacagggactcctgtgcgcgggctttctcttgaactcagtctcgcaatggcaactctcaccgttggtgcttcgtgctacggtttgctcgtccttgttcaagatgcgttccgcttattgagatgtctatactagtttatgttttcttggtacctgctcttggtgttatccttctcttagccaactggcttttagctccgtctgtttcttacgctcaaaaagccagtgcttacgagtgtggatttacacctctcgcaggtcaaactcgagcccccttctcggtcgctttctaccttgtaggtcttttgtttcttatctttgatctcgaagtgcttctgcttatgcctttcgcacaatctcgatcgttgatagacccatttggtctggctattgctatgatttttgtcttagtgctggttgttggattcgcctttgaggttagctcgggagctatcaagttcaccgaatccaagagtcggtagccctaagactttaaggctttgtgccatagcctggagctagagaaaggtgcagctagtttgctggaagtttttagcaattaagcagcaattgcttggtctacacctgttaggtggtgtagaaggatagacaggaggtgtttgtc

SEQ ID NO: 1251 - DNA, 1250 bp, Xanthophyllomyces dendrorhous
gcgtacaagagtacgctggaggaggactctctagaggagagctcatgaacgcaggatctctggagtctatcctgcgaccaatagtcgtgtattcttgtttaataagcgttgcttattgtcgttcccttggaactcccattctaccgtgcgaagtagccgttgctactaacgcccgggcttacttggcgtagcctagaagtaagctctgggcttagctaagcgtctacgaccctttagcttaatggtaaagcccagaactgttacttctgtgactacggttcaattccgtgaagagtctttgcaggagtggcctaatggtaaggcactctgtttcggccggagtcatggtggttcgactccgtcctcctgcaaacactcggtagcatagtggtagtgtgcgtcttttgggtagacgcgattcaggttcgattcctgaccgagtgctcggcactaggccactcattattaaacatgttttacttactcgcttcgctcgccgtagccttcggcattggttttgcctcatctccctccccggtcgtctcggtgttctatcttgtttgtgcgtttgtcgcagtctctctatatctgcttaccctcggaatcgagttcctcggtctcgcatatatagttgtttactgcggtgcaatcgcactcttgtttgtttttgttgttatgcttctcgatcttcgagtgctcgagtctcgagaagcttcaatcgggctaagctcccgattgcccttggctctcctgcttggtatcattgctgccgggtcagcaatgctcttcttgcaggagagctgaggggcaacgttcgttagcccgtttctgtcgtcctcgacgattctttcgcttcaagacacgagtgtcttttcgctcgactcctgtcgaggactctcaatgaccctctacggctcatcttcattagccttacttgcaatgagtgctctgctactcattgctatagtaggcccaattacgattagccttctaaggtcattggcccccctcccccgttttcttctgctgtgactatcacagacgtcttgtcagcgtagctaagctacgcctcctcggcgtctcctcctgccccagcaggttgttcgcagctatcactgcgtttgttagcttttgttgccactgggccttctaggctaatcgtaatttaacctagaaggcttgttctttagctccttacttttgctcatcgtcggctgatcctaatcgtcagctagttacactaggcttcc

SEQ ID NO: 1252 - DNA, 1604 bp, Xanthophyllomyces dendrorhous
tagtcgtcgacgccgcttacaggttctacagagtagagagccctggcgggtccaaggactagcagtcaaacaaagctagaagactagagggtccagagaggaaatctctctttatatccactctggacacttaattaccgggaggcgaagaagtggcagacgaggaagtctagtgcaactagctgacgtacgaggctagcctacgatgagcaaaagtaaggaacaaaagagaaggctctgcaggatcaataacgattagccaacaggcccgggagggacaggaaagaagcagtgggaggtaccgctcgacactttacggagacttgatgcgaagcttactgagcagagagacgatgtatctgtcgagtctactagccttagaacaagggctagagagagcctcaccaatacactacggcatataggaagagtcatacgacatcgaccatatgccagtagaggattgagctctcaaagcccttgtgatgagagctagtaagatggtatcgatagatacgccatcctcctactgcaataaagaggctgccgacgatcacgtggaacccgtgagtgccggtagccatataaaaagtagaaccgaaaacaccgtcgctcagagtaaacgaggtatctgcatactctactgcttggaaatatgtaaacacaactgcaagcagtagagtaatgaagagaccgaagagaacgtcgcttcgggagagttctacgagcgcgtggtgcgcgtaagtaatggctgcacccgaagagagaagcaagacggtgttgaagaaaggaagagcgtaagcgtctactggcactagcccaacagggggccaggcagatgcgagctcgactacaggcgacagagcgctgtggaaatacgctcagaagagcgataggaacacgagaagctctgttacgaggaacaggagcataccgagacctagtccattctggacgtcgagagtgtgatctccgaggaacgtagcctcgagagttacatcgcggaaccacagcgccatagtgacgcctgtaacgaagagcccgagagcaagagtgagacctgctcctgagacgccgtggaaatacccggcggcagagagagcagtgttgaacattgcgaacgaaatagttaggggccatggagatagcgtaacgagatgagacgagtgaagcattgacaaggcacctagaattgaaatataaatcaacagagcctaagctccggatggtaattcaggttcggcagaagcaggagtcgaacctacaatacggagctttggaggctcgcgtgataccggtttcaccattctgccgggtgctaaacacccataagaacccaactagggttcgcaataacaatagcacccgagagcaagtcccagtagggctaaacgaaataacacagcatagtggaacactatgccataatgaatcctttcctcggtactcccattgaggaaagtactggtacacagactcagagaaagctggtttcttgaggctttctctctagtggcctcctttcaagcgtactcttgtacgcacgatcggagctagaggtacaggtctctttctataagggagctgtaccgaccaatccgatc

SEQ ID NO: 1253 - DNA, 669 bp, Xanthophyllomyces dendrorhous
actctgcactctgcactctgcactcagcggtgtccattctgcactctgcactcacctcagatggtccggcagctgctgcacccagttgttcagactcgagtcgatctcggccacgatgctgagctgtgcttcgagcgagtggaagtctttgatgaccttggacttgttgatcgcatactgtgtttgcacaggccgtcgtcagacaagtagcacatcagacacagcacactacacacactacacacactacacacactacacacactacacacactacacacactacacacactacacacactacacacactacacagaacagacactcacaatcgtccgcagacagtacccatggatctgcgccagcttcagcagctggatgaaccccccgatcttcgacggcttgccctccggctgccggaacgccagccccggctcctcctcgttctcccagtactcgtcgtccacatcgatcgggtagtcgacatcgatgtcctcgtcgtggatcgccagcggccggcccgtgctcccacagagctcccggtcggccaggtagagcgcccagaacgcccgcttcagcatctcgccctccgcctttggcttggaccgaacgacatgcttcctgtggacgcccatgtcgacggccgtgcggatgcccatgccgataca

SEQ ID NO: 1254 - DNA, 479 bp, Xanthophyllomyces dendrorhous
ctctctcttttacaatgacagtaagaacagtaagaacagcaagcaaagaggacggcaagagcagcgaggacgcgtcgttccttctcctcgtgctctgtctgcagccagaaccaggacgactgaccgctcagctctgttcctgaagcatcaacacgaacaggatgcgcatctctttggccggactgaccgcctgctctttgttcttgtgcttttcctaacgtgtctccctcctcgtctccctcctcgtctccctcctcgtctccctcggtctgacctcatgctgcagcttgaccgacctatcctgttcttcctcgccttccaagcccttctgctcttctaccacgtccgagagagcttccggaacagacgagtcggcatcactggcagtcgccaaaacggcttgtcgaccctgacgctccccagacggagccatgtggtcatgcccagaaggatggcgcttagctgatggccgtccgtcc

SEQ ID NO: 1255 - DNA, 11363 bp, Xanthophyllomyces dendrorhous
  misc_feature (11282)..(11291): n is a, c, g, or t
gagataccagcctcgaactctccggttcctccggcgatgatgagaatggcgcaatcggcctgggaagttccagtgatcatgttcttgatgaaatctcggtgaccgggagcatcaatgacggtgatcatgctggaaggcgaccgcaaggacaatcaacagggccgaggaggaacagacaagtcagaacaggcaaagaaaaaggaggaaaaaggcagtcagacacaacgtccttctcctccgccctcctcgaggaagcacactcggtacaaaacgcgaacactactcactacttgggggtctcgaacttccaaagagcgatatcaatggtgatacctcgctctcgctcagccttaagcttgtcaagaacccaagcgtacttgaaggatccctttccaagctcggcggcctccttctcgaacttctcgatagttcgcttgtcgatacctccgcacttgtagatcatgtgtccggtggtggtggactttccagaatccacatgtccgatgacgacgacgttaacgtgaagcttatcctttcccattttgtctcttttaggtgagaatgaaaaaaagttgataaatgaaaagttgatagtaaggcacaatcagcatgagtataaaccgttttaagcgagtagttcatcgttgctcgaaacgttcctgccgaaggagacgaacagacacaacgaataactctcggtggcaacacagtggaagagtgaaaaaagggacccacgatttagatagaacgatgaggttgggggaagaagagaacaaaaagaaaaacgaacgtccaccagaaaattatatcggttcccccagccccgaccgttcggcaacgaaaattctgttcggaggcaaacaagataatagtcacgtgatgcgttacagcattatattcgctaccttacacttgagcctatcatcttctgtctaatcgtcactttcggctgatcgaacacaaggatacttgtcttttgtatttcactttcaatccaataggtaaaaatcatcttgtctattgatcagattgtggaagaagctttggaaaaaatccatcatcaaaataacatttatctattttggtcgaaaagtcagacagaaacatagggagataagacaagaaggaaaaacactaaaaaaccaaaagagaaggcccagattgggtgttgttacaaaagaacaaaagacaacagacggtggacatgcggaagaaatagacgacttgtacaccacaagagcaaacgatacaaacaagacgaggtgcgtaactgagccatcagtaggctgaagctagacagttcaggcagtgatggccggggccatgggcgtgtgttcatagaacgccttgcccgaggtcgtaggcataacgattccaattcgaatcacaaagtcaccaaagtgttccccatcgtttcgctccttagcataccgtcggatgagaggctccaagatgttcagaatctcaacttcattcacagattctgataatagaagggcgcaacgatcagcctgccatattcaggaaccattagaaacaagaagcaggatgctacatacctcgataaagctttgccaaacgttgaccatagaatccaccaccaagaagcatcatgtactgcccaggagcttttccaacaaatgcaatttctgtaagaatggacaaacaaggctaatattcagtcaatatccgtaagatttatcgcagataaaacaagaatgatgaaaacataccagcaggccaaggccgggcgcaaccgttggggcatccggtcattcgcatcacaattgaatcatttctattaggagaaaatcaatatatcagtctcaatctcatgggatggaatcttagaagaaccagttattgagcggaagactatacaaacctgagtccattctcctccatgatagcttctactttgtccaccaagactgggaggtatctttctgactcggccatagctaatccacatgtgggcagggcgacacatgccgaacttgataaccgcagagccgagaagttcagattatcaagcttgtactttgcaagaagtgacttgatctccggcaagttctttggaggaatatcagagaggataaggtgctgattggcggtgagtcggaagaaacccttgtgaactttagcaatctctcgaagaccggtcttgaattgcaagttaggctcgtcttgaactcgaccattctattgatgacgcgggcaaaaatcaagacatatgagattactgagatttgatagatgaatctatgaaaaaagaagaagagaaaacctacctcgatgaacatagtaaagtggtggtttccatcatgacccgtagaccatccgaatttatcgatactgctatcgaacttgaacggtctctcgggctgtagcttataaccgagtcgcttttcgacttcatccctaaagccatccaatccaagtcgatcgacggtgtacttgagacgctgttgatcgacaaatggaacagaaagtcgatgcccaaactcagctaaataattcaagttctgcttagctcgagaaaatataattcatgacaagacttacagcgttctttcgatcagctcgatttccatggtccctttgggtgagcataatggcctcagccacagcacatccctgctcaggggtaacaaaaccaatcacatcacccaatcggggatatgtctttgtattggaatgtgtaactcccataccaccaccaacggtgacgttgtaaccgacgatattctccgaggccttgtctacgattccgatgaaaccaacatcgttggtgtacacgtcgacatcgttgtggggaggtaagcacacagcaatcttgaactgtaaagccagtccaaacaatgaagaaccttgagtaagagaaagaagaaaacacacaaaacaaaggacgcagaagagcacgaacctttcggggcaaatagtactttccatacataggctcaaagtcctgaacagcatctcctgcaactttcttcttatcgagccaaatctcagcgtaggcactggtgttgggaagaagatgctcagagagatctttagagaactgccagacctccttgtgaaggtgagacattgaagggttggcagaacactgaacatttcggtctgaggaagagattgtaagcaaggacaggagttgtatcacatgttgaacgaaaatagtacttactaacatcaccacaagcggcgatagtgtctagtaaggctcgattgatgtcctgaattgcaggcttgaggtgctttttgactgtagtgtatcgagcgaagaggtgtaccaagtcagacagagaaagcgtggactatcagaatatacagcaaacttactaattccgtgatactgccaagtctgtcgggttgtcatcttgagtgttccatttccgtgaacgtcagagatgtggtccatagcgagccactgctcaggagtagctaccccagcaggaagccgaacccggacctaaagtagtttgtacggaatataagtagtgaaatcaatgcagcaggcgaagagatataaccgtaccatgaatgagtaagctggctccagaccggcggctgtccgttcgtctcgaatatctcgatcatcttgttggtaaatgctatcagaacgggaataagagtcattagtatcatcacgcagtgtgacttgctcgagagggcaaagcgaaacaaacccgtggaacttggtgagttgaccatcagaagcatccaaagcaccagtcgaagtatcaaccaatccctgtagagatcaaccacagcgattagtctatcagaggagatgcatgaacgtataacactgagaacaacttacctcagcaatcgttcctctcaagtagttcgaagatatcttgatatgctcgttagtaataggttcgggctcggcttctaagacttcgataccatcaactcccatcgccttccaaaccaaaggctcccagatcttatatccggtttgaggtccatcagcgtcctggtcatctcctaaaccgagagggaccatcctttccgctcccaattcttcaaaccgagcatccatgtccttcgaggccttgttgtagtaatgcgcatcttcgggtcgaggccagtaatgagagtctcccattccgaacactgtgtacttaaggtcggccgagaagatcttgtcgcctttggcagcatgggcagcgagagctttgacagtcgctcgggagttctgtggggcctctccctgaccagcggtagaagtaacaatagcgacatgagactcaagtttaagatcatctagaggaaagttatccatcgggatgcatcgagcagctagtcctcgaagaccggctcgcatggccagtctcttagccatcttctcggccgctcctccatcggaagcaaagaggatcaataatggaggtccgtcgaaagcagaaaggagtttatcataagctgcctgagccttatcttttcttgcaacaagaagtttctctccaagtgaaccgactagctcaggagccagggttggctgggcgttggttaactgcgaaagatgcgattgtcggtcgaggaattcttggagctcgtttttgatatgctcagaatcaagtttgaaaggctctttgccgatagcctcaagagaggggttccatcggtagagaggccagtaaccagtgtcaacagcaagcttcgtctccttcaggacagagagggcggaggctgtctcctcagcataaggcagataagcaagaactatggaaggtcctttgaactggtcagcctcatgcaaggcctgaagaacctgcgaataggaagagtagacagcgacggatctgtacaaaaaaatatgagcacaataagtatatagacaaagatagatacagtcagggcgaacttacgccacataaacatcgccatgattcatagcataaagaccgacatccttctttctcttgtgggcttcggcagcgtttctttcagtgtagggcacagaatcaatcaacaacaagttcacattctctcccgaggcgatagcgtgatgcactccactagctccgagatcgtatgaccaggcgtcacttccaatgatccatctgctgaggggtttcaccaactccttgagctcaatgatcttcttcccagccttggaatgaacggcatcatctacctctaaggcagcaacagcagcctttccagtagactcagccgtagcagcgtcgtccttagcgagcaaccacttggcgaaggcagagtgtacggactgagaaacaccgtacgtgttgatgagacccttaacagcttcaacgagttggtctcgcttcgcaatatcggaccgaactttaccaagagcgtattccggaagggtagcattaggcccctcagctgggaccagtgcgggggcattggaaatctcaagacgagttccaaatacctgagagagcatcttggtgtaggcagactcgagctcagggactgcgggaatagagagagaagagttaagttctgaggacaaagagggaatagaaccaagaacaaggtcctgagaagagccgagccttgtgatgatgtgcgagacttccgcctcaacggtgtgctggttggtagaaagtgtaccgagaagccctccatgaacgtggggagcatcgttctgatcggagaaggccgaagcgacatcgaggtagagacctccccatttggtggtttttcggaagctctgttccagtacaatgatgttcttcacgccctcagggagagcggcgatcaatcggcagggtgcgaagggtcgaagaagcagtacttcgagcactccgaagtgagttgaagacgttttggcgaggtgagcaagagagggagtatccgtgccaaaaactatgaacactgtcgaagcgttagctggaccggagtaaacgtacggtcgttggggccgtcgaagaagagcaagggtagagagagaagcccgttcaaacgccttgaagccctccgaaagagtcgggttgatattggctgtcgcaggaatgggcaacacagcttcgacaaattccctcaagggagtctcttccaatacctcaaaaccaagctcgttctgctccagctgagtgaagatgtgaaggacagccttggcacactgccgagcgtacttgctagcgataatggcatgatcatgagcatcctgagcggttgtggaaagaatgatagtccaaccagaggaacgaagggcaacagcgtcggagagatcagagctcttaggaagagcaacgtgaacgacggtcgcgctagatcccagtgaggtcaaggatggaaccagtcggttgaaagaaccggttgactcaagcaagatcgatgtaagcttatggtcgacactagccgatcgggaagcaatcaatccaggatcggcatgtgttgggagaatttcgattctaggcgatgaattggatgagctcggaagagcatagacagattttgttgatataaggagggtagaagaagtggcctgggcgatctgcccaacgagcgatgtggtggaagtagacatttcttcataggccagatgaaaaaagatgggcgaaatcagtaaaatgaacacaacagcggaagtggcaaagccaactacatgtcgatcgatgacctctgaaaggaccatcaatagggccagcagatcggttgagggtaaatcgccacatcgtagctgttctcgacatgagggacaaacacaataggatggatactacgtacgagacagccaataatagtgtgtagatactggacagggcgaattgggaaggtgagttctagattggagagagagctgaatcaagacgaacaacgaaggagagaggagaccaagcggtggcgagacaagcgttgacagtagaagaggggggacgacgactcaagaagaacaggaagaaggcgtggatgagtgtggaaggaaagaaagaaagagaggaaggaacgggtggaaaaaaaagtcttgagcgatctgaagaaatggattcgtagaaaaagatagcgtgctcgatgttttcccgatggcaccattggatgagtccgctgctttatttccgaataattcaaagataacaagaatcggttactaatgtaaccatgctcttttccttacacacttactcctccttctagactttcatcagcatttctcatagtttttaattataatcaaagatggtagaagaaagaaggaaagaatgcagccaaataggaggaagaacaaaagtggaacacacttaacagtttatcagcttctctcgagagattatcaagttggtttcacaagtattattcatactatctctcctggcgggaatattggaagatggcaacgtactctttttgtatttaacaccaaatagaagaaagctgtattttatcgacatcgagacgatctaaatctttgacgttgcaccagcgtctggttccttggaatctgtctttttccatgattctatgaaccttattcgtacacacatgcttagacctgtgcattctttttctatgtaaatctcataggcagccaccgctaacccgctgcgatttcggcaaggtacactgtatatcatagacatctcagcggtgaagagcgcgcttgatcaaatcggggacttttttgtcaaaagtgaacggagtattcgctgtcggagaaaaagcaaaaaacgaataattgcctccccaggtcatcagcaaacaaaatcgaagcccaacccgaagaccggttacaatgagcgacatattttaatctatggcatttgcattcgaccaaagatcttatctcactgcatgatcaggtgtcttgagaatggtctggtatatttgtctgtccgactggtattaaatattgatcggtgatgaacaacagcttgacccggatatgagagccgaacattactgacacaaaagccctgcttcagaccagcggttaggaggaagagtggcgtgactaaaccatcattgcaaggaaaccgggacgtaagatgcagggaagaggatttatagttgcgtgcacgatgaaataagttatcatgtccaagagtggcgcatgaaccctatatgaacgctatgaatccatcacacatagtacaccttttgtagggtaacccgctggatcttatcttgaacgaaatcgtgcttctgatgatcgcataactaacagaaagataaagaagagatagtcgcatctcgatgtttgacacaggatcaaacaagttcaggttgtttaattgatggccctatttgattgtagcacgacccaacttatcattctgggccgaaagtcaattgggttgttcgcaggtgaaacataagtgcttacataggaccttctttctcgtggtaagattctggcggtgatagggagcaaagataccggtcttgacttaaaattcggatgagtcacaacgtcaggattgaacgattatcatcaggcggagttagagaagttgatgtccaggaaaggcttgtaagtgagtgtgttatgatcacgtttcgacgttggaggaccaaaaatcagtcaacaacaccgcttgaataatcatcgtcacgagatataagacaatatatagcgatcatagacatctggccgacatctctcatctgtcttgtctgtgaaatttgggagagaaacaaaaaagttgatatatatttagtaggaaaagccaacgagaggctctgttgaacgcatgcagtacgcgaatgaaacacattcattccggtatttcttagtgcattgcccataaactcacgattacgcatgctcttgcctcctatctacgttcttgacgatctttgtgctgttatctctgtcgattggatctgcgctgtacgtggttgtcgaacgtgatgatataaacagagagtttctcgtactggcgtatcggaagggcaacttggacctagtctccaatcctgattccgatctggtcttgctcctggctctctcaatcatcaaatcgacaccgtgcgtccgtgtgtgtgtttgtttgggagggccagaaacagaaagcgtaaaaccagttactgcatatacgacattggagagatatgtgcagaaagtaggatggaaaagatagaagaacacaccaatgccctctactggttacctagacaacggaaaccacggtttgtgtctacacttttgcgttcaaccgccctgccaatgtcatcttagattggggttttacaagagccagaaagaaaaagaggaggaggaataagagtaagaaaaacgagaaagagaggttctggcccccttacgttgtgtccaaatgtttctttcacgagatgaacgatctgtcaaattcaaacgatatcgagactacgggtccgaacgtttgctaccaaacacctgggttgatgcgtacccggtttgagagacagaaaaggaatcagaaatatgagcagaagacttgtaaaagttcatccgagggaacaaaactatcaacatttccacagaaccgataggaatccgacagctttcattgtgttcatcactgatagaatcacgtctaagcctctaccaaacatccagcccgtatagctaagtggttatagcgcatcgcttgtaacgatgaggtccgtggttcaaatccgcgttcgggctctttttttcctctctgctcatttgtcttttctctctatcacttcctttttgcgatccaaatttattcgcggtgtgagctgtatctgctcgtgtagtagttcttgatgctactcatgtccgatagatcttgtttttgttaggtctttctcgtcatgtttctatgcgtaatgggaactctcgaacgtgttggaaccctccgcagtcagggactaagcagaagaagaatgataatacatgagacaagccgttcaccttcgactctcgatagccgttcttggtcgacactatcgctttcgcagccttgaaaacgctgttgaaagctgacagtttaaataatgttccagttgcaatagatcggtgatcttgcagaggcaacatctggagatgatgcacgggaattaaacattatctttttacggtagctattcttttccattttctttttctcttctctctgtatcgtcctgcgataggtatattggaacatctgggtagtgatcattccggcttgaaaacaaaaccagaagctaggttagagacgagattatggatgaagaacgagcaaagaaggtctggtagaaaaactcaatcacattcatctgtctatctgaaatatactttagtcactgaaggtacctggtgaatcaatcggagaagccgaagaggaagaacggaaaatggactggctagaaggaaatcgttggagggaaggagccttgggttgccaaacatctttacgaatgcttctttctgtcatgatctggcccaggtcgaccagtacttttgagaggttcatggcttgttgctacaaaccgaacgacatggtttcctatctacaataaagcaagtaagctatcggtgaccgatgaggaaataggcagagtacggaaacagatagggactaacctcagtgaccaaatagttcttggagaaagctgagaaaagagaaagagaaaaggaaagaaagcgttgggcggagagatatatatgtcgaagaacacgaggcaaaacacgaatgccgagatgagaagaaagataaacgagaagatatgaagatacgagaatgagaaggaaggtaagaggagtaaggccaaaaggacaccaagactaacagccacgatggagaaaaatgtctgttcagatgttgaatgaaacagactgaggcgaagatgaaacaggatgattctaagaaatcaccccaacacaatcaaccccaacagatgattccaacactcccactcatcgttgctgtttatacaaagatgtgagtcattgagaaaagacagattgtcatgatcaaatccgggttgactatcacagggctactttgcgcaacgtggattattcttgacacagcgtcggttgaagtgcagaacgtaacaaaaagctacagatgaacagacagaaaagctccgagaagtggaagtagaagtagagatagaagaaggagatagagagaagaactaggaacacacctcagtggaccagaatggggttctggtgatgtctgaggtgaagaaaggagatgggaagctgagaaggcttatatggaaagtggtggacgagaaagttgagcaagcacagagacaagccgaagaaggtggagcaagccggagaaggtgagactagtcggaaaaaataaatgaaagacatggaaaatatgtagaaacagtatggatcgatnnnnnnnnnngggaagctgagaaggcttatatggaaagtggtggacgagaaagttgagcaagcacagagacaagccgaagaa

SEQ ID NO: 1256 - DNA, 549 bp, Xanthophyllomyces dendrorhous
cacaaaaacccacaaaaacctacaaaaaaagcacaaaaaaaagcacacccctccccccagacccccctccacggtcccgcgggcagccctgctggcctgcctcggtccgctttgctaccctgcccccccccctccccgcgtgcgcgcgcgctggccgcacaaaaaaaatgttttgttttttttcgttttctccatttttttcttctgcgctgcgcgccgccctctcgctcgcctcctcgcgctcgccccgcctcggcccccgcgctcgcacatgcccccgcccgccccctcaggccgaggctctcgccacagacccaagacaggcgcacgcacgcacgcgcagctcacaccgcgcagcattcgcttttctagttaccagtctctcgctttctccacagcgacgacgtgcaactttcgctggttcccacggtgcaagtgccgaaaaaacaaaccgagccgagtagtgttcagagtggtccacacagcagtgcacacgtggacaggcagaagcaagtgcaaaaaagagatgcaagtgcaaaaaaaaaaaaa

SEQ ID NO: 1257 - DNA, 387 bp, Xanthophyllomyces dendrorhous
tttttgccgtccggtcggaagcatgctgaccggcggccacccgctcacagcctaccgcacgacggagcaggctgcacacgactgcgcacgactgcagacgactgcagacgactcgaccgattcggcgtgcttgtactagtcctcattggtcaaacggtttacgatatcagcttttcacgctgaggacccgggttcgactcccggatggggaacgatcctttttgttttctccccgggctgcctcgtctgagggccagcttgtcggcaggcatggtcccggtgtcgcacgatcgggctgatgggccggccgaccgatggacacacagcggcgggcgggcagacggcggagcgagcggtgcctggtcgatgagtaggatactgggcaga

SEQ ID NO: 1258 - DNA, 1208 bp, Xanthophyllomyces dendrorhous
tgtctgtgctgtctgtgctgtctgtgctgtctgtgctgtctgtgctgtctgtgctgtctgtgctgtctgtgctgtctgtgctgtctgtgctgacgatgcgctctctctgctcttgctcttgcgtagtaacaagcttcctctcgtcggaggacacgaaggaacaggctatgtcgctgcgatcgccgacaacacgagcacccagctcaaggtgggcgatgcggtcggagtgaagtggctggcggactcgtgcctggagtgcacggagtgccgacggggatacgagtcgtgctgccagaaggcgctgaaccacgggttctctgtcgatggctctttccagcagtgggcggtctcttacgccaaggttagtattatttggtgtctatagtgtgcttcagagtactttagtatgatacgcctcgctgaccttggatcatgcctgccttattcagcacttgactcctatcccttctgcgctgtccctcgactttgctgctcctatctgctgcgctggagtgagttctcttcctcccctttgttttcttcttttcgccatacacggactgaccgagcttgctgtctttctatccctctctccctctctctgcctatctctgcccttaggtcactgtctacaaggctctcaagcagatcggcggtgccccaggagagagtgttgtcgtcactggagctggtgagttatgttatcagacgtgctgcttgcatcgcacctgcaggcccagctgacatagttgcccactacaggtggaggactcggccatctcgctgtgcagtacgcaaaggccatgggctacaaggtcatcggtatcgactctggagacgccaagaggaagctcgtcgagggctacggtgccgaggtgtttatcgactaccagaaggaggacgtcgtcgcggcgatcaagaaggtgactgacggcggggcgcacgctgcggtgtgtgtagcgagcggtgctgctgcgtacaaccaggcgctgtcgtacctccgaccacatggctcgctcatctgtgtgggtctgccgaaggaggcgtacgtgaacgcgaacatcttctttacggtgctgaacgagcaccgggtgatcggatcgtatgtgggcaaccgacaggatgcgatcgagtcgcttgatctggctgctcggggtgctgtgtctacgcactttgaggtacagccgatggagaatctgaagaagatc

SEQ ID NO: 1259 - DNA, 315 bp, Xanthophyllomyces dendrorhous
tggtggaaatgatggtggaaatgatgatgaaaataacgatttgtcaacttctattttatctcattctggtagaccacagcgtactgatcctgaacgcaccttgcagagtgaagccgctttagattcagagttatgtcgagcatacttgacgattccatccgacgttcccaagacgctgaaggcagcgctgatgggaaggcatcggaaggagtgggaggaggcagcaagaaaagaaatggagtcgttcggaaaacactcggtctacactctcgtgcctcgaccggcaaacaggaacaccgtcggatgtcgtgctgt

SEQ ID NO: 1260 - DNA, 317 bp, Xanthophyllomyces dendrorhous
gcagaaaagaagaacaccgaaggaaaggtcatcagaaggaaagtccgttttgttgcgcaagggttcagtcagcgacctggcgtcgactttgacgagacctacgcacccgtcgtcaagtttgctacccttcgtttactttttgcgaaagcagccgaacacgactgggacatccaccagatggatgtcgagaccgcgttcctctatggggacctgaaagaagaggtgtatatgcggcagccacctggcttcgaagaaaagggaaaggaagactatgtatgtaagcttcacaaaggactatatggcctgaaacaggcagc

SEQ ID NO: 1261 - DNA, 396 bp, Xanthophyllomyces dendrorhous
tcgctcacggcatccacggcgtcatctcatcgctgaacaacctcccaaacgtctccttttccgtcccaaacatcgtcttcggtcctggcggcgtcagtggagcgatctcgttgtcttggcctggtccaagctgtatgttgtgcgttcccgtagggatcaatgtgaacggggcagccaccttctgggcagctccctttgttgcccgcttgggcgtctcctgcttggatccagacgtaggccggtgcaactgccgagacggtgccatcggagacatccagaaaggtccgtcgacaggcacaggcggaagaagagactggaccgtctggcggtcggacggagagaaaggcggatgggagaacctgtcgccaggctggttgactggcccatggtcgggag

SEQ ID NO: 1262 - DNA, 383 bp, Xanthophyllomyces dendrorhous
tgggtcaagatcgccccggtcgtcgatctcagactcggttccgatctcggagaacacctcgtcgactgccttttctgatccagcgacgacaaagccgtcgacgtacaacatcaagtacactttccggtcgtctcgctcaccggtaaacaaacaactgtcagcttcggttgctgtgagtccgatcgtgttgagaaaacaagcgagacgatcgtaaaacgccttcggtgactgacgaaggccatagatcgctttggatacgtagcatagcttgtcccccgatgatacataggccggaggcggcaccatccaaaccggctgatcaagagtagcatacaaaaacgcagtcttgacgtcgccctgtcagatagtgagatcctctctgg

SEQ ID NO: 1263 - DNA, 505 bp, Xanthophyllomyces dendrorhous
cgaggacaggctagaggctcggctgtgtcagtcccagacgtgcgcttctcagccggaagcaatgaaggtctctgacttgtcgcttgacctagagaggcagtcggagcaggttgagcaggttctgggcaaacgtgctagaaacacggtcgacatgtctgcgcctgtgtcttctaccttgaccggtggtaggtcttatcctgacaggcaagcttcaactcccacttcgtccggtttgtctgatcctgcactcccgactcccatcccctcttccgcggccttctccatgcctttctccacagcccgcatggatgcaaccggcctggatgatcaccggcagaaacggtcgagggtcgtcagcctggcagtcagcgagatggaggcgggcgatatcgaggatctgttggaagacgtatctggcgagcctagtgcggctagtgcggctgatgaggatgacgggcggccccttgcatctactaacgattcattgatcaagtctcccatcgac

SEQ ID NO: 1264 - DNA, 371 bp, Xanthophyllomyces dendrorhous
tgttgatctgctgaagcaaccgagcgtgctacacaccatcgacaacaccgcatcctggtctgtcgtcctggatgatgctgccaacatccatccccctcgggcggacccgtctcggccgggtcgtgtgctgatcccgggctcttgtcagttgatctgtaagcaatgcccggacgtcgttccatccagacggtatcgccatcgcgttcgatgaccaatctctcgccaaaccaacactgcatgcgcgacgtcgagtccagacgacagctgatgaatcagctaccaggtctggccgtcgttcgaacatgctcagccatatataacaagtccatagatctggccgccatgcatcactctgctcgtcttgtcttcca

SEQ ID NO: 1265 - DNA, 444 bp, Xanthophyllomyces dendrorhous
ggtgaacacacgagaataagcgaaaaggtcatgcatagctgatctcgaaagatgtcccatccgtctgtgaacgagatcgatctcgatctccgtcttgcagggcaccaccgaagcagccaatgccggcggccgagccgtcacatcgagcgaccacaggctttgcaagtgtggtgaagcggtgagaaagatgccgttcttgtctctgaacacgatccgatccatgtcgccgctgaaagtgatgcctttgatccggcaaagctggctgagagacgagagatacaagcatgtcggacgacatccccagcacatggaacacatcggtcagtgtgagtccgcactgttcgtcacctgtcgctggcttgctgagcaagctgatctggcctcgaccgacgactttcatcggctggccgttggctacgtgaatcgtctcgtcgtatgagtcgt

SEQ ID NO: 1266 - DNA, 48280 bp, Xanthophyllomyces dendrorhous
aagtgaaccaactcgcatcactttacggttgatgtctagactgctatatccaatactcactggtttcccaaaccatatacacaccacccaggtgtttcagtaaaatggattgagaaaccaggaaacagaaggaaacccgctagaaaatttatagctcttcggagagagagccttgggactccgcgcaaacggaagtcggaaggtgatgcctcaagaatagataaaaaattacagatggaattatatcaagactgctgaaactccaaaaatcaaactgacaacgacaagatactataaatgttgacactattcaattcatcgcagatcgtatagtatagtggttagtacttccgcttgtggttcaacttgtggaacacaactacgcggacgacgggtgttcaattcaccctacggtcaactgtacatagtttttcaactatctcttctctgaggattttcctttttgacgaagatgttcatggtcgaaccacttgagtgtttttgagaaaccattgaaacaatatagacggtatatttgattagggcagatatgattagaacttcaatggttgtgaatgaagagtttgtcttttcgtttttctgtcgtaacatgatgatgagcaatgcagtcgataccactcaacccgtttctcaacaaaaaaaatcatacaagtagacatcttgaacggactgcgagagacatggataacattaatacagatcagagaggtgatcgaggcggttgagaaaaaagatatgggaaatgtaacgaaacatagctatcttcttaaggacaaagatagttagaaaaattattataaaagtccagatttaaggggtccacaaaagcccaagtgacgagaagagaaggataaccgggatgctatctcctctttgagttggcgttgtcgttgacctttctcttggaagctgctccgcctcctcccatgtcgcccatgatttctctctccaactcgtccaaatccatatcgtcatcctcctcctcctcttccgcctcatccttggaatttccagctccgctgctagagctccactgctgctctttggcagacttaccatcctggctcgtcctcatcttcgtggccaatattcttttccgctccaactcttcttgatggtgggcttcgagctctcgctccaactcgtcatcctcttcctgggctaatcgtttctccaacatcggcacagactcttcgcccttgacgaacgatcgtctattggatcggccctcttcggcattcttggcttcatcgtcattgttattgaccggttggtactctgctggaggatgaggaggtttgatcgctttgaaatatgcgtagagtgccgagccggtcacgatgaatgtcagagaaatcgctcgaggtctgtcagttgaggtcacaaaaatcggccgcaaaagacaagatgatggaaagtaaacgataattagtacagagcctctcagatgccttcgaaagaaaatcagcgggtttgagaaaacaaaaaaccaaaaggacaatgacaagacttacacagtgagcacatcaccaaagacagcgatacccaagatggcttgcagaacggatcggacagcctgttgtattgaatacagaaggaaagaatttagatgcactagaagatgaattcacaatcggaaggaagacaagaaatccatacggacggaagagaacatgtgtgtaacaggactggtgatggtgatggagagtaagccagccatgcagatgaagaaaccgaacacgctgtgagaacaaaagtgataagagagaaatttgattgagtatcacctcgaagctagctcatcaattccaatagatattctgtctcacccggtaacaaaagatccaatcaagaacgtgcccaagctaccgtcggtattgttgatgaggtctttccagagccaaatctcaccattgagaatctagaataggcaattaaaatacaacaggtctgaatacgtgtatggttcgacagctacagacaataacaacaataataacagcaacaacaaacacgtacaaggatagggaataataatgcggccgacagaaggtttgtgaggtaggcaagacttccgaatggcaaatatcacatggcaagaagacttgtttagataagcagcaaaagaagtggcatgtgaacaaccagacttactttgtgacaacgccagcgttcatatccttgatgtcgacatgacgcatactccatttgacaaggatagcgtggatggcaatcatgagcgcggagacaaagccataaaggatgccgaggtgggtattggtatcttcatttgtaggtgaggcagccgagggagtgattccgtagaagaaaccaatggaaacgagcacgcaacagaaagttgtcatgtgtggcggtagttgtcggagaagtgctgaggaaagggcgatggtcaatggtagaaccatgcctctagcaatctaagggatgggaaagatcagtatgaaaacatcagcacatcattccagaataaacatgacgaagcgaactgtgactaaaatgcatattggagggcctacttggaaataactagcatcgacgagcttgagacagagtgtgttgaagatcagaccagcgatgttgacgacgacaatggcagcgattgacttgagaagtttgctgtcggtcgaaggtaatgtcagccatccaaagagacagcacatttgaataagaaacaccgcgatcaaaagttggaccagaagaaatgtcaatgggagagacgatgcattcaggacctgtgttgggatataaaccaacgcgttagacacgtaggacggatactggtacaacggccagaaggatcttacccatttgttgctttgtagtcgaacggcatcaaagacgacaaattcacggcgagcaagacagaagaggcagagcagattaatattctcttgttgtgaatgagcaaggtcgtgttcaatagatttgaatagcgagagaaaagaccggctaaaggcttacacaaggaccatcaccaacgctgctatcatgtagaacgtgacgacggcaaacacctgaagcctagtagcttgatgttttgagttttccatgagtgactagatagacgatggatgatgggatgtgctgtatggatggctttaggagtatcgacacacaagtggccaggtgtaacgatcggtgttgatggaagcgaaagaagcaagaggaaaaactctatcgggttttttcagacacacgcccagcgatcttcggcctcgaccgagtaaacagttatgatcattcgatgagactcactacaatcctctgtagtgcatgccagatttttctctattgttttggatctcgcgaatcaatacaaaaccggccggatgatcgtaatatgtctaatagacagacttcttattcgtggcccacaataagcatttcttaattgtatactacgatgtgtcgtatacattaggcatggtctgcactgcttcaatcttttcttgaatcacgtgatggaaaagtgggttctgttcctgttcccctctttcgctttctctcatgtctttcgtcatcttgcgaaaaacatcggaaagcatcataggcgtcgagttgcaatcttcaggtttacatccatacctacatacctgtgctccctcaatctccatgtccaagtctctgtcgaatatcgtttacccaaagatccgctttccggaacacacctctagatcgtttccccctcatctgcctcctccgcatattccgcttgagatgtttccggactttcgtccagagcaggtgcgttctctctttccgctattcgcaacattttttcttcatcctgatgccggtcactgattccttcttaacctttcttaggccttcttgcgatcgatcaagccatttctcaacccgagaggtccaaatgagccatcggccaaagcagacgcaaacccgttcaaagcggtagactggcatgacgaaactctcgagatcaactggaagggattctctgtattaacactcaagtatcaggtttgttctggcccgctcttcctttactatatttgaacgacttttctcgtctccttcaacctgcttctttccggccatctaacgcggtcatctgttctatcgctcgtacgttaatgcaggtcatccaaccgtacgtggtcggtatcgccacctactttgctggcttgctcatcgcctctttcagagcttctttaaactctctcttcgtggatgcgtccagatctgtggcgaaagcgctccgttaaggggaagagaatagatgttcttttttaaataaaaaaaaaatcttggtgtctcattcaaattcaagccgtacttggaatcctaactgcacgcgccaaacacagaaatactcatccgttgaacagacaatgtagactagagacattgaagaaagaaaattatcttccgaaccctctttcaagaaacctttgtcccttcttctttctatccttcttcgcttgacaattctttcattgttcttctggatccggctcacgcgtcatcatctttgatctcttccaccgttgccccagcatacgtcttcctcgttcctccaaccttctcaccatcggcggcaacaatggacgaaggcgtggatccagaagaagcgacggccgaagcaaacgatttcttttccttcttggacgaccttgttcccttggaggatgacttcttctttggtggaatgtcccaaccccacaccggcgtccaggagtccatctgtagattgggagacaaggattctttagccttttagaacgcactcgcaacagatgtaacatatgcaagatagttgagaactcacaaagctgacgtcctcaaacaagcgagggaagatccagattccaggacgggcgacgaccaacgtgatcacataaaagatcaatcggaagattgccagtacaaagaacgcagcgagcagcatgaggattccaattgatagataccacacgcccagccgcatcgtgtacggccatagcgggtacagtacagctgccaacatacaggcgacctgtgaatctcaaacttagttctacgttcgaccaagcctgagagtaaaaaaagatacgaggggcgcaccatgccgaaagccgcgatcatcgtccaaagctggcttccttcatagaaccaggcgtaatactcggatccatcaggagaaaaggcctgttgagggttgatttggatgactctgggagagccttcggccgatcggttgactcggagaaagaacgcgctttaaacaacgtgtcaagatggcagatgatggtaccgaagagggaaataatggggagtttagggaggaaaaaaagatgagcagaaacaaccgtacgagaagctatcagttgaaagtaaacaagtcgctggacgaagaaaatgcctggtcgcgtgagtaagaacgtaccatggaatgatggagtgcagcaacttgacggcctcttcctcggtcgtcactttgggcacgttcttctgttttgcgtacagaggtgaaagtagggctttgatagcattcttgcctggaggaggaccatgagatacaaatgcaaggaaaaagtcatcagcttatcaagtataaaaggtgggtctgttcagagcctacgcgaacctttgaaatagtcggttcgctttccattgagcaatccatttctagatttcacaccgttcttgcttcgtaagaaattaacaacgttacgctgctccgcggtggccttaagatcaaagttacaaaaagtgagttcaaagtttgatccggctcatcggaaaaaggagggaaagtcacgagaaatagagaaaaaggaatactcacttgttttctagtaagaatgacagcaatgaggaatgatgtagcatcggtcagatctggaatcagtctctttaaagaagcaaagaccataagaggaaagagaacctcactgttgttcttccatcattttgtcgacacaacagaagaaatcctgaaagagaacgaataagggtataagaaaacgagaaacagaaagaagtctagatgaacgatcgtcaataattcaagatgaattggagaaggcgaaagacgccgacgtgtctgattcctttaaccctaatcaaagaaacagttcacgtttgcgcgtatctgcatcgtcatccagctgtttcaacttgaccaatttccttgcttactcctttcttccatctacagacaatgcagttgacctgatgaaccaagaatttgttgcaaagagcagcttgatagatctgaaaacatgaaaggaggcactctcatcttcagctagcggatacaacatatacatatatctaaggcagatagtctcttcctaaagcgattcgcttgaggtcgacttcgacttctccagccagacctctaaccgtcagatcctcatccgttgctctcacataaccaacgaccctcgccacactcttccaaatgtttgtttctaccgtctgatcgtcttcgttaatgtccgctcggattgctgccgaaaggaaatataatgcagatcgacgcagaaccggatgttttgggtttgacagtacaggggagatgtcggggattgattcctccggaatcagatcaggcgagccttcttcatcctcctctccgcctctattttcttccacttccgcttcagaactagacttggaagctgataggggtcgaaccatagcaacggtttcaatttgtagaagatctgtacatgccaaaaccagatcgactaggaaaggcttcgctgtcaaaggtgaggtctttaccacaagcgacaatatggccaggctggaagaccgaagagctgtcgggagatcggacgcgcggaacacaagtaacaaacgtggaacgaggacagaaccttgaagataaattgagcggtatcagaaagagaatgatcagctcgattgtcttgatagatgtgttgaacaacaacaataacaacgataacaacaaaagcatactcactatagatgctcagactttcatctgatctctcgatgactccacacagagcctcgcctactcttaaccttaggtccaattctaccctctccatctctacatggccatttcgttcagaacctacacctctgcgcttgcttccaaaatctaacgtcccttcccatccatcatttcccacccctttcgcgtacacaccaaccattcttccgagtacctccttcccccatccgtctactaaaccagctagtcctttgacggcgttcaaataaacatatgagtccgagtcctggatgctttggaggaagacatccaagattcctggaatgagcgcagggggtaaagatgcctctggatttggcgtgccatgcgttggacgctctttcttctgtcgagatggaggaaggacaagctgccggagcatgatcaggccgtgtgcccgaacgggtaccaaaggatccgagacaagtttcaaagcgtctctatacgtctgaagcgccttttccatctcaggggaatctgcagaagacgaagaggatcttgaagagcgaaatgaggttgttgcttctcgtacagaaatgatgagtaaagcttctttggcaagatgacggacggcggggagattagagttgatgtgacgttcgagcgaggccttgatgataagaagcagaggagcagatttaaaggagagagtttcgtttcctgttataagtggtacagatcagcacggttgaacccaatgtcatcttgggagaagcagaggtttgataaaatcacgatttaaaaaacgaaccttgcaacacggccactaggagtccaatcgcagtacctacgattccaagtttaccctgaccaacttctccatcctcgttttcggcctgttcaccgctttctaccactggtttcgattcagaaaggccaaagacgccagcttcaggatcgtcttccaaatcaggcagatcgacttcatcgtcactatctaaatcatcatcctcgtcatcgtcaactcttgctcctggaaccagtatttcgtcatcaacaatttttaaatcagacagagtcaatccccctaagccgaacttctgacgggctgtgatcggaggcggaggatgttgagtcgggacaccattttctaggacaaagctgatgaaactcaaaatccgactctcctcccctttgacgaggtcttcccccatagcttccaccatctgtacaaccatctggcttagaagaaggagtgtcttgggatcctcatcctctcgggaagtcgtggacgatagatgggtcgatcggatattgtccagaatgtgtatgaagaagttcccggcaaccgctggtcggttcagtgatttgaggaaggaggtgaatagattggggggagggtgaggagagataagagagagagtttcagattccaaagaaactgatccagggtcagccgacggaggaggaagtatgggctgaggcctgaggtgatacaagtataacgcaaattggaatttacatgcttcagtgaaaaaccctcgacacaatagcaacgatagtcttaagaaagacacaggtagactcacactccccaagttactctcaaatcttcgcctccaccttcccagaaccattcgccttcatcagtttcacttcctggcaggactcctggctgcccttcccagcccctgcccgctcgaagtacaacttcaaggcccctaccaacgtcggcctcggagaggaccttagcccagcttttcaacatcgcgccaacttcctctttgagtactacatccgctgttttgttctgcagtaaatgccagtatagtccgaacacttgaccgatgatcggtctaagcagcatagatttctgagttgatgtggaaggcggcgagagaagaatgagtgggatcatcgaaagaacagattggagaggggcttgagtgaaaaggttttgactgggctgaagaagtggggcatgtaaggaaggaaaaatcctagaggattgcgcgggaatcagacggattatagtggtcgaaagtggcctgagataagtagtgggcgtattcgacgagatcaagagagacatcagacgaggaataacttttgagaagtaggcctcggaggtttgaccggcaggaaccgaagtcaagattctggcaaatgattctgattttttggtcaagatatctccaccctcctcagaagaaccggcagaagcgttggaggtctctgaggctgatgactcggaagatgcaccaaacaacgactggagaaggccctcaattccacctggacgaaggagcgaccgagtcatcaggctacctgcagtaagtcgaagatgcttgagtgatggcagcgtctcggttgaattcgaggtgagaggggacaaaagcgacaacgtcatctgaggagagtatctttgagaaccggtcagtggtagtagtagtgatgattaccaagtcaacacgtggctcgatcgattagcaataataaccaaagcttatggaagcggaagtcggaaggaacatacgagtccagcgctttaatcacgagccccttcagctcattactgtcgatcaagtgtgagtgatcccaacctaagctgacggccatttttagtatccctctgacgatgcctccatccctaatcagctttccaatatccgttggaggtttactgagcgccaggtagaataatcttatgagaagttgggtgagttgatgccccgcctgctgccgaatagatggcaaatcagatgatgataacaatgatggggagttcgagctactagatgtttttgaagagcgctctagtgtttcggtgccactccccacagaaggcatcgtatcgtgaggatacgctgttcggaagagcggggaaagaacctgggtcatggtatgagacaacatggtcagtaccatggcgggtgtggagacaggtagaagaggtggttctgtgggagattagtgaacatcgcgattagtgacttgcgctggtctgcgagcgaaaacggaggagaacgaacttgctaggtctaccgtgtttcctagatgctcacgagcaattttatccagcaattcaactgcccatactgccaataagcccagctgccatctgatgtgtgcttgatctgaattaaggtccgggtagaaggcttgttgaaaagaatagttttggaacgcgtcatgttgagctgaaggaaaggaatcatagaaagaatcgagcgtggactgagtgattttcggcaaccgagccaatttcttatttggcacaggataaagagctttcaaaccggtcagcaacggaagaagtgagggcaactccatccagatccaaccagtaagcgtgcgttatagcaaacaaggcggttgtggatgatgcaacagcggtgagaagtggaagttagtaagacgagaaatatagactacaattttttctaatgaatttcccaaaccggtttcgtttattgcagtgacgatatacgagtccgcgcgaggcaaggtgtaaaccgacaccatcaacacatacagaatcggcagaatacaattggatctgctctttcaacagctcatggctcacttatatttggtagatactcagactgatgctctggatcttctttgtgagttcttatagtttcatagaggccggcgtcatgaggtgttgcattcgcgtggttgctcatcaattgtttttgtgatcgtgcatacatccgtatgggtcttcaattttatgacatcttgcctagcgaggagtgagttctcgaatgattgcataccagcatgtaatgagatatcctctcatcgttcactcataaattcctttcaatcactatgacaacaacagctagagcggcaagtgatccgacatatgctcatgatatcattctctcatactgttcccgaaagatcgttcgaggcagatccagatacgaaacaggctacaagctgcatcttttggtccgatcgtgctcctcgaatcttttcttcactcttgatgaagcctccttgactgaagaaggcctattatcaccttctgtttcattcaaactattaaaacatcaactttttaggaatgggagctagtcttccgaaaagttagtttttgtattccgatatcgaaaaggacgtatcttctctcttgatcacttcaactaacactattcatctcctctgttcctcacgattgaactcagtatcctattcctgaccttggcaatcagtaagtacgacaagaatgcgcttcattcggatgaatcttggcgtcggccaaaatttatggagctcgttcatcataaatcatttatgtcaccttgattactctttctcaccacttctagagtccttgaggtccgggaaacactaggcctcccagaatctcatatcttccggcgatcatcaaatccctcccaagcggcattaaaccacgagtctatacgcttttcttcggctagtattgatagacgccgggccagtgacgcccaaatacctattcatcgcccaaataacttctctagagcgaccactcctgcctccacctccattgcccgcccgcctcggccacccgtagttcgagcctcggaccgtggggatggagcaacaactcctcctccagcttacgaacgaacggatcccaacccagactctgatctagcttccgctatcatcgccagtctgtcagtcgagcagtcctcatcgggtctcagaccaagttacaatcctccttccggaccgccaccttcatcgtctacagaccctggtttcatctcccggaggaacgtaggaggacggtcgttggaagacccgttgctacttctgtcaacgtaccatacttattttctgttggatgattcgacttccatgcaaaaggacgatcggtgggcagatatggtcaaagccatctcttctgtcgtgccactcgctgccaatttcgatccggagggcgtcgaacttcattttgttaactcgaaagagggaagaaaaggcgtcagaacggaggaagaggtcgaagatgtattcgcgcgagtaatcagacccgagggccatacacgtatgagcctgaaactggacaccctcttaagaaactatattgataggctagaaagtttagaagcaggccttcgaccattaaatctagtgcgtcctttgtttctccattcttacggatgttgggaatgtgcgtgctgagatgtaagatgcttcttctgtgtcacgctgtttgtcgtctagatcgttatgacagatgggttcgtgaagatcttgtacctgctcaatggcttcagtctttcttacatatatcagctgttcttctcaatttacctcggttgctcttcttgacgaaaagtgcatctttgcgggcttcgtcgtcaaacaccaatccattcgtacaatcggagagtcctgaggcaagtatcctttccctctccgctcagatcctcatatttactcgaatcatcctctaatcatgatgaacctattcaacgctcctcagtctattattgcagctgccgctaaacggttggatcatgggaactatccctctaaccagcttggtatatttttcctacagatcggcgtgcgttgcttgtcttctatcctcacagatgactccatacgatgctcgatacaattgataaactgatgcgtttgtatctcatggaattgcaggatgacgcagaggctagggagttcctacaagacatggacgactctcttccatcccggcataatgttcgagtaagcgatcgtttatatacgtatccgcctcaatttcagcctcgaaaggataggcatgtcctgacgatattctttttatgtatctggtgttgtttaggacctggttgacacaatctcattcaatgggcttacctccgaactcaacgcaaatgacattgaaatcgtgcgaaagattttgcttggcggtgtggacaagtaagtcctaagtctgatttcttgaccacctgatttattcgtgataagctaaatacaagtcatcaacgactgctcatcttggcaatttatttttctcctcttttcatcctccctatcgcttagacgaatcgaccgagaactatgattcttttcggatgtctgaattacaagcaaagcttcgtaggcttccaatgcctttctctcaatactcaatatgaactttgaatccgtatatgaaactcgatcgattcattcctgtgcctgttttgccttgtgcgttataattatttatctgattttgctcgcgtatcttatatgtacctatgcaacacgtctttataccctacgatttcatagtctcagtctaccgatcatgtgcgctcgttagacatgctatgaaacgtacttggccccgatgtgtttaggatacgttattcgttcacaggcaactttctggccttttcgccaacgtaattcaattcatcgatacaccgagagaaaacgacactctctctagctcatcagctgaagatgatctaacatctggagcattccaaaacaggaccacaaaggaaagcaaaaagaaaacaagaaaagtattggaaaagaactcgtcccccactcaagcaaacacattcgactcctacctagtcgctcctgtattgcctcccacgacaccttcgagtatgcgaacgacgcccatttttcttttaacgacccatcattctcgccctatctgggttgacggccatgccgacgccagcggacggaggagcagccggtgccggagagcctccaccgatccccggaggaggcatgaacggtggtcgttgcggaagtccaccttggctcaatgtaggcggaggtaagccgttgccggtcatcatgagtggaggcatactctgaccgggtgggggcataccctgaccagggggagggtagaagggttgctgctgctgttgctgaggtgggtagccttgttgaggaaagccttgcggcgggggtcgaaaaggctggcccatgtttgaaggaggatagggcgatggagagggttgattgtaagaatacgggccagggctggggaaagaagaaccctggggtcgatattgtggttgcatctgatgaggagctgcagacgggtaagcaggcgatggattgagaaagccaggtcccatcctgccggagagttgttcgtatcatacaccgttgacatgacaaataagaatcaatgatgaggagggaaacagaagacaacgaagaattgataaaaataaaataaaaaagacaaacctcatagcaggtgctccgcccatcattcctccaccaggcggtccattagcatgggaattgataatctgatcaattaggtcctgggctttatcgtgtcctagagctgtgatcgttccatatcgtaagacagattgcgaatagttcagcagaattcacatatcaagaacgactgttcgaatgctggcatcgaaagcttacaggcatagtagtctcgaacgttttgcaggtggtttcgaccagcattatgagccttccgaactgcgagggcaaaatatggacaacaagcgtgtcagtacatgctacgcgtccgtcgagggcaaagtatagtggagatgacttacctgatgcagaatcatgtgttctgtgttgattcgaatagaaagaatagacagaaaaaggaaaagaatggtgaacaattctatgatgttcaaaggccacatatatttctagatgagcacacgtacaaaaacacatcacaatactgtatgatgtaagtcaaaggcgatattagtatgaaaatgacgctgagtttcaccctaatattgacatgagacagactcacatcacagtagtacttgggcatcctgtcgacaaacagcgaacgctatagatggatggatggatggatggtgtacgacggatgagaatggatggaaagagaaaggcgggggtttgaaaattccctggactttgtttgttaggctttttcttcggaattcctaatgaccgactacagcacttttctattgtgtttctgacgatcaccacatcctccaatccaaccttcacccattctatcacatcatgtctcaactcatcggcaatccagctctgggatcagctcgagtctggcatcacgtctcggcagagaacagaactctcggtatgtttgataaaacatatctcttgatattgggagattgtagaagaaatggtactgacggccaaattgagtaatccttcgatttggttctcatccgcttcgttctatcaggtaaactcgccacaagaatcgctcaggtgcttatgggaaaacacaagccagtgttcgatagaggtagtgcgtagtgatctctttgacgaactcccggtttctaatctcgaattgcatcaattaaaccagtagtatccaaagatatgaagtcttcaggctgacaattgcttgccaaacttggccataccacttggcacctatcttttcgttggatctgactctgctcggtactcgtctcaacgatgttagacgatgttggggattatgtcgtggtcaccaactgtgaaaagttgtatctgtcgggtaacaaatccaaacaaaagacgttcgttccttctctcctcccgtctttttcactcttactgcatatcgtagcgaaggccactctttacatgagtagaatcagaaccaactgacattggacggcaatttgtacaattaaaaataaaagatacttcaaacagtccactttcccgggaagatcgaggcacatccaatacaaaaatgtctatgaaaagcgcccagaagacgtgcgttatcctcatcatatatctatcctctctataccgttctctatagctcaacagactgactatctccttctgtaacgtctgctttttcttactctttctcttctctcttggaattgatatagatcttagctcatgcggtctctggaatgttacctaaaaacgatcatcgtttctcgcggctggcccgacttaaagtcttccagggagatttgaacccgtaccagcaaaacattctcaagcgatacgacctttcgcctgaaggaacgtggtcgggtaaaggagagatccctcaagggcctggaaaggcaagtactgcattcgaacgtgtcaagaagatggaaaggtggtagtcttgatctgtcaaagtgaacgacagaagaagacagtccgagatccatataaaaaacaaatatctatatcatcatgttctataaagtgatcgattgcaaggtatcttatgaacaatacagaccaagttcacttaaaacattcttgaaaagagtaatatggtgacaattatcaaagaagaaagcatcagcctcactcggtatcactgtctctcatgtcaaacacatccgagtttgcgctttcagtccctgttatatctccctcctcggcggtggctccctctttacttgttccttccggccggctctcacccccatccgaatgagagaatgaaggaggagaagaagactgagttggttctggggttggcgaaagtgctgattgaaaggggctgtacgatcgagtgaggacctgatgtcggacatgttcttctagcaggatgcctagagtattgccaaacatgacatccagaagacaagttcagcatacccagtgcggcatattgaagtaacggacaaaaggaaaagagaacaaaccaagagcgattaggctatctccatccagcgatttgtgcatatctaacttggagaccgctctccaccttgtccgtcgtttcttgttctttttggggccagcagagtctctcagaacgacctttttcattccgctcgccagccgaggcttctttccgcgcgttccgctcatccgtggatcacagtcatcagtgtcaatggatttcggtagggtacgaggtgttccttttgttttggttgaggctcttgatggtgggcgagacagatcgctggtggaatctgggcaagattttgaagtctcggcaacggtagattgagatctggttcgtcgaagggccttagaagtttgtgttaagcgggacgaaaaggaagaaccagacgaggacagggttgatgaagaagcgctggatgaggagtatgactcggaggacgaagacgaagaagacgaagagctgcctccatcttcttcatcctgaccatcttgtccaaaattaccaccaccttgtgcaaactgttttcttctcagtcgacgccgtctcctagtttgcttattggcatgtcgtgctagacgggccatatgggcaagatattggttgtatcctagttcatccagaagagggggggattgagaagtgtagtagtgtgtggccgaatggagaattgtcttcagaagctcctggaaagttcacagccatgacattatcataagatgttgtttcaggtgcggatggatataacacgtaagtgcaagacagaagatgagacgtacagaattaggtaggtcataataacgcgctatttggagggaacaaacgggttgaaaaaaaaagaagcctatcagttgagcatcatggaataccaatggtctcaagtaaaagcagaagggacgaacgatcgggatttcgtagaaagtccagggtttgagcctttaactgttctctgtacgactttttggcagacgcccttcttgcaacgtctcgttcgaaccattcctcttcctcatcctcgtcctcaccctccgactgatccccagaataatattcatcatctatttgacgttcctttcccttagctgttattgaatgactgctcctggctttcctgatctgcctgggcacttcgtcatccatcgctccgtttgttcttctctcggtgtttgtcaatcgctggctcggtttccgagacgattgatcgcctacggtgtcccatcctaaggcattcgagaaccatggctgagcatgctgatcaagtgtgagccggttattcaaatggagctgggcgtttctcctcggtggttgcaagagggatgaaattacgtaggccgatgttgttttcgaaggtggaccagtgttggcaatcggatgctcaaaattttttcccgaaagattcaactgaggaatttcgatgggcatctttccctgccgttgttgtcaatactgccttgagataactgatgagactgactgagaacaacgggtgatatggtggattgatttaacatttctaatttacaaaattcaaacattttgtaatgtttacattatcggccgtttccgccagagctgactcttccttctgcacaaacaatcatcttgtccatacgatcatcagaactatcaagtcgttatatcatcctacttaccgtatacaacacttaaattatgcacctcgtatcaatccttgcatctttctctttggtttcctttacagccctagctcaaaacccgtccttcaaacaaccctcaggaggatttgatggaacggtacgttaatttcctcggtgtacttcccctcagcttcttatgaggctgcggagttgttcagggaattttctgctttcgaaaagagttttatgatcaggaaacttacagattgatcaaattggaggttccataggccggaggcgattgtactgttgaatgggttgccggcaactggacaagtaggttttctgtttgggttcaagtctctcttgttccagtccagtagccataatcaacgcctatccggatccgatgttgaacaattttgtcttgtttaccttgcgccatgtctgaatgaagatgcacaactcgatggtatatatgttttccttcctgctctagattctctaagttatgagtctaactagtcagttataatcctgtcctctacatctgaactggaatgctcagttgtatcgggctgtgacaacatgcccagattcttggcaggtaagtcaacctccaagattactcatattcgtttttgagcaggaccctataatcttactctacccaatgttgtatcggtcactttctctgccattcatacagctgtgcggaccaactttgatgcttcgtcaagtaggttcttgtcagaggctgttctgtcggcgttacccggattcatgacctgctcaaatattgacgtgttatattgtgctggtgtattcttctcttgttcgaagctacatcaatcacttacgactgtcctagttcgttccttcttctttaatctgctctccgcgagcataatacggatacctcggtggaccatactctgagaatcttgtgcctttgcattcaaaaatatagatgtcgacacgtcctctaccatatacttctaccggatgactgatatcaactcgacaatcacccccatctacaccgaacgtttctgcgtacgtgactgtaactttctctcgtctcttacttctgcatatcaatgtcacttcgactcttatcggctttatggttgtattacgatgtgtttgtcctcaaaagatcaaggcgaacagcagtgccacctgtggaactcctgcgcatagtacccagccctcgggaactggtgacgcatggggaacaggatacattcaaaacagtcggttagtatcagacgatgccaaatctgtgaaggtggaacgagggtgtatgactgaatcgtttgtcacggatgataatttgacgtttataggctgtctctctacaatcaagaaggcaattccgcctttgatgattaataatcccccccccccttagatgtcctttcttccatatacaaaactgctcttagggtgatcctaaaacctcctgtctttttttttcttttcttttcttgtcttgtcttatcttgtcttgatccttcctctgcttggatacacttttttatacgccttggacgttatcattgaacaggatttgtttaacctagatagtttatcgatttgtttgctattcatgtaaatgtctacacatctatcaacgagaaagttgttcgagaagctacagtaaattgtaaggctaatttgatatccgtcgatcctgtgaaaagagataccttttgataaacttgaaggccaacttcataaaccatcaacctaactattcgcgcgaacaacaaaagacattacttctagcctttgcaaaattaagtggccagactcgatgtctttgtatcttgagatcgttttcttgcatgctctcagcgtataaccactatgatggtatcctttcgttcgctcttatcgtttcgccaagtctatcctacacgggtggatgaagtacgaaggatggacgaatgaataagctcgatatcacataagtaattcatttataatatttgattttcaacctccacgctacccaaccatcatctcataccatccttcttttctcgcctgaatctcgaactctcttctctcacacatcgatcgctttctctctctttctcttgtactctcgttctctctcatataaccccaaccatgtccgatccctcatccagcactcctctcctttcgcatcaagatcagtccaactcggtgcctccaacagagccatcaccggcagcagcatcctctgatgccgctcttcctgactcagcccccactccggtggaggaggactggagtgatattcctgatgacgtgatgaactccagcccagaggagatcaaactccaggcaaggttgattgaaaatgatatcaaggtgtgtggcaaattcaatgagcaagaaattacaaactgtcgttgatgaattggcagcatccaacgtggctcaaatctgttcttacatcaatctgtcttgatgctgactctctcttgagtgatgttttctctgtcttcatcgatttggtgatcaggtgatgcgctctgaaaatatgaggctacagcacgaaaagtccaacgtgagtaatacgagccaacgtcttgacttactgtactagctagactgctaatttaggaagaattggatgatacctcagatgctcgagaagatcacggacaataagcaaaaaatcaaacagaataaagtcttgccctatctagttgggaacgtagttgaggttcgtctattttgttctgagatgattcaggccatcatccatcttctgaaacaaacctaacatccgattttgaattagatcttggatgtggatgcagagaatgacgaagatggagccacagtaaacgaagataacaagcgatcaggcaagagtgcagttatcaaaacgacgactcgacaggtaggcaatacgattattgtttccgaatttaactacagcattgtaactgacttgtaaacccgcaaacgtagactatcttcctccctctggtgggactcgtaccatcagagaatctcaagccgggtgatctcatcggagtgaataaggattcatatctcatcctcgatacgttgccagctggttcgtccatctctgttacaactgatagttggtcgtatactgaactgtgtataacaaatccttcccgatgtagaatatgattcgagggtgaaggctatggaagtggaagagcgaccgacaggaacgtacacagatattggtggattggataaacaaatcgaggaactcgttgaagccatgtgcgtattttgtttagatcttgcgtcaaagcaaatatctgatctttatgtcgtacaatatctcaccctgctcggatggacaattggtagtgtgttacccatgcagcaggcagacaagttcaagacgttgggtatcaagcctcccaagggtgctttgatgtatggcccccctggtatgtctcatctttctcagcgcgatcatggtcgagcgtcagctaatctatttgacttgaattggcatcttctctcctaactctaggaacgggaaagacactgttagctagagtctgcgcagctcagacaaacgcttgctacctgaagctagctgggccttcccttgttcaggtaaggactttctgtcccctgatgcagactctcaggttttcaattttgatctcagtccgaccaaatctctaattcgactttcgatattacagatgtttatcggagacggcgccaaacttgttcgagacgcgttcgagcttgccaaagagaaggcgcccgcaatcatttttatcgatgagttagatgccattggaaccaaacgtttcgattctgacaagtcaggagacagggaggttcagagaacgatgctcgaattgctcaaccagctagatggatttggaagtgacgaaaggattaaggtgcgctatcacaatattctcgcttaagcaatatgatatgttatagatctcttagatcagcgctaatatctatcatcctcatgtgttcttattgttgtcatgctcttgtccatccattttgtctcaatcattcgtacaggtcattgcggcaaccaaccggattgatatccttgatccagctttgcttcgatcgggtcgattagatagaaagattgagttcccattgcctaaagaagacgcacgggcacggatcatggagattcattctagaaagatgaacgtcagcccgaacgtcaacttcgaagagcttgcagcttcgaccgagtacgttttaatttttatcatatagcgatatgtcgcatgaatagatgaaagatgtatcaagagacagaaacccaatagcgctaacgaactaatttgggtttcatgatgtgattgttgtgtcgattgtgcagcgagttcaatggagctcagctcaaagcagtctgcgtcgaagccggtacgtctttttcaacttggtctcgcaactcttcagggttttttccttcgatttttgagacgtctgtatttttgttgcattgtgttcatctgtacaggtatgtttgctcttcgatcgggaagctcggtgctcgaccatgagcacttctaccagggtattctggaaggttcgtttatcatgttcatatacagtctcgagtcaagatttcaaagactaggtcgactgatctggaaattcaacctgtcactttcctgacttcagtccaatctaaaaagaagaacgatcagtttgtgagtatcttccactcttgcatggtgtcaacgtgcgatttcctgatcaactttcttttcatccatgacatctatagtactttgcctagagagctaccacatcctttttcaatcataccacataccctctctcgctttgtccgtctcatagtcatgaatcaacacatcagcactcctctttcacgatcgcctactacattctttccttcattatatgtttttttcttcgtccatcatgtgttcactcttgctacttagagggctggaagagaaaaaaaagggattatgctctgttcgctctttcaatggcttgtctgatgtgtactaatccaaatggtgataagttatatagatagtttcctcccttggtcatgacgggcaaattgagagtgtacatgcaagaatgaatcccaagccataggaacctaagatctttaaatagtcagccaccttttgaggacatgttttgcctcgagcggggcgcccactgtgttgtacactagggagagattgtacgcggtttctcttacgagcgatccagcctgtcacgaccatagtgacaaagtgcgtttgaccgagaaatgagccgcatgaggtgaaacacgaggatgatcataaaaacaataagcaattgcgcaatagaaacatcaatgagcatgacttacgtcgtagatagattcagggtctcgactttctgcgtgtacgagtattcgcttgaagtgctttatagctaagggaaatagacctgtggtaacaatcacgaagatagtacaaaaagagggagacatcaggttgcgaattcaatctgagagagatagttattgttgtgcggttcttaccgagtctgtgaaaaagtgtcccgaaattgtactctacttcgtcgcattctggtcctcctggatgtagctttcggtatcgatcgaggaactctaaaccctaaaaatattgacagaacaaacccaatttgcgaagttagttcaatccacagccttcgacattcatggtttattcagaaaaaaaaaagtatctaacctgaatgataaaatagtttcgattatccgcttgtcgctgaaaagcacgaccgcagtatgatactgcgagtaggagacagataagcggatcttgcgggttcatgtcatatgctcgtaccaaataatctgatggtcagatgtgatatacgaaacattaaggaaccgtagaaattgttagagaagtcaaagatcggaggcacgcaagataagacacgtacatattgaactttgataacttcgcgccatcatcagcatgcacccataataagcgttcagtattggatttggttttgttggaatcttgatgatgggtcttccctcctgtacgatctctgccagtctagccgccgcgcctgatgacacaccctctcttatggtgggattttgtatcgcatgatctgaatctccatcaccatcggcttcgtcatcatcgtcatcgtcctcctcctgtcctgcaggttgctttcctatgctcgaactcttccggttcttggagggcaggtgccatctgaaccgactaggattccaaactaatcccggtccttcatgaagcggtctatcccatagtcgaagctctcgagccattgccttctgctgattataattcgaaaacgcctcggccgcttcaattccagagccgatggcaaacgtagcgatatggaagccgaggttggagaattgttgatacagtagtagagctcgtgcagcatcggatgtgttgagcgcattgttggttgccatagtacaggctacatgccgcgtacagcgaaatgatgttcaatcagattatggttatgcagcagtgactaccaaaggtcttcaaagatggacttaccaatcacgacgattcggagggactcttgtctttgtcgaggaatttggaatagagttgaccgagtgagatgctctgccacctctacggctagttctgcctcgtcgttcttcgccaacaggcagcagtactgtcaaaacaaagatatcccaatcaaattgcttagcatgttgagaaaattcaacaatatacaaaacgatgatctacctttatagctgtcacatgccatatgtcgacactgatcccgcggaagaactctgtttcggtaatcgtttctggaggcgcctcgccgtcatctaaatgaaccggttcgatcatgaacaggtgagtggatttttccttttaaatgaggatatgctatgcaagatatagatcagacggaccaagctccctctgaagacgttcagacatttcgccaacctgagcctcgatgctgacttttgctgctttagctcggcggttgaagtgtagatactgttttcaaaatataaaccaaggatgacaggggttaatataagaacagcgattttgttgatcagatactatattgataaagatgcaccctatcggaggggaagatggatcttgtttgtctaaacccttcgatgagttgcccagccaaatctatccactctttgactgattctgctcgtccagactcaacatcgtcctccagctcagataatcgctgaaagcttgtcttgactcgatgattccacgcctcctctcgttgcagccgatcacgtttagcctcagaccgcttggcctgtcggtcctgatgtttggatgttcgaaccgtctcgtcgaagaacgatccagtcgggtcattggtggacgtatcaactgcaggaatagatgtaagaatattatctcgagatgtagtatttttcggttcagaagggtcattgagaactgtatgagatatacagatgggatcaatggtcagattatgatcaagagaacgctccgacccgtttagatatgttgtgggtgatgctccgatcgtgagagtgcatgaaattagaccaaccactattaacgacctccaaagcctccctgagcatcccttttgactcatagacgccggccaatttcatcttgatgtcgagtaacgccggatcccccgtctcgtatgattcaacgactgtgagatgtgatatcaattaaagcatttgacttttgatcatcagaagataaaatatacggatctctgtcgcaagtgaatgacgcttaccgaaagcatacgattcaatagccccgtcgggatcgccgagggcgcgcaaacagtctcctctgccttcgacatgggatggatcgctctgtgaatttgttgtttaataagacaaagcatttcaaacgcattcgtaaattgcctgtttgcgtcagaaaggaagactagagttgaagacaagtacgtactgtaacttcggaaagtcgttcaaaaaactgtaaggcatcctcaaaaagtccgcgcttcagaaatgcttcacccgcttctccccagaagacatgatagacctcaggattgaggtcatgtataaatttaaaatgaatctgtgtattgagaatgaggaagataaggacatacaaaggcgatagagacaaatatgagattagagcagcgcaatctctaatcggggacaagggaacgtaccctggcttcactcaactcttccatctctagcctagcaagccctagtcgatgtctcagattgacatctagtacattacctccctcggaaacgagtcctccttctcttacaaagtcctctgggtcaaactctctatcatctccatatcgatcccaatgacgctcatcagctcttccatcaagccatctatatccctgtttgatttccctaacggcttcggcgtattcccctgtggaaaacatcaggtcgaataggatgatgagaagagagagagggaatatagtgtcatccgactcatgaagtgcagagctagaatctggatccgggtagaggcgctgttggtggtgcagtgcagagagtataagagtcttgccgagggagatctgatttgcttccacaaaagacggcgccatttcaagaattacgttcacatcatttggagaatgttgaagtatagattgaaacccctcaatcgcctattgacagagcaacaggtggttggagcatcagtgaaattaacttgatatatagaagaagaaactagacaaactttggcatgatttccagtttcacgaagtagatacgatctatcccagatggcatccacatccttcgggtcaacttccaccgcttttcgatagcagtacatggcttgctgagtggctcctacactcctgttgtgtcccggaagttgaaaattgtgagtgaaacgaactatgagcttcttgttgggtgcttaggtcacccgatttcgacatgacgaggaagctacgaacctactcttcttccccaattctttccatgtttcggccgccggcctcagatgagctgctacaacgtcacattgtaagctcttctcctcatttcccagttcttgatgacagagtgcaagcgaagcccaggctgcgtaagtggctggttcttggtgaataatatcttgatacacttgaatagcaggtatgtattcagacgagacataatgcatattcgcttgtcccagtaggcgttgaatctctggtgtaggctcaaggattcttgggccatggcgctaagagcagggtggaatgtcaaggttcccagatagatcaaaatcgagaacatctattacaataaaaatgggacaaacagcttactttacctgtcccctttttggactttccaatcccggaagcagctcttaagccggctcgatattcttcttcggcatcatccatagcagtgtcccagtcctgagtaagtaatgaggcattgttgctcagttctgatccggtcttcatggtctttactagaaggctgcatcaaacaaggccgttatactcgtcagctaagcgtaacgtagccagagcatagagaacgcgaggcttacttgaacttttcagcacctctgtcttctaaatcatcgtctccatcatcgtattctccagaaggttggttagatctactggtttcttgttcccttgcatattcgctctcgtcctcttcctcttcatctgtgtattctgattgctcagagtcatcctcactcgagtagtctgaattcgaccaaatcaatagttcaaacgtcataaaaccatacaaccatgcaacccgaagaacccaaagtacataccttgatcctccgggaacaagtccatgaaatcagctcgtatggatgtatgctgactgtcgttatccttccgattgatgtgtgctgcttgatatatacactgtcctcccctcgttcgaggtaatgttagttggcggtgaagggaatgagatattgagatgcacagccgtcgatgacatgtgcaagctgtcgccacatgcactcatgaagctctgaatcattcttccttgctcatctccagcatcatcaccatcttcttcaaatcctcataaggcgctcttcttacatctgctctgttcaggacagaggcatatcacaagaactgaagttgtttccgcacagattttgagctcaagagtttcaacatatcaatttctcatatcggtcgctcaaacaccatcattcaaatccctccaacattgcttcttcccaactgtcgatttctgatctcagaatgaatttttcttttgacgacatccagggagatttcgatgactttcaggctactcagacaggtcctcaaacacagactcagtctcaatctcagtctttgaccatgactcaagagggtatcgtggattattgtgcgtaatcttcgtgtttctcggacagtcatgccgctcatttattttcaagactaacgcgtttcggcacctcgcgctttcttctgcttccttcctttctctttgcttcacaagggggctcacttctgcttatgtcgagagcagcttcatctcagacctcaactggatttcagcaaggtctcctcagactttacaacacgaaacgcgtctacaaagttggaaggcatcatggatgtgatattcagttcgacgagtcgcgtatcagtgagtgacacgcatatttcaacaacaatagacaaattcccaagctgaacagagcgctcaattcccccttctttttctttgtaggtaacagccacctgacatttacgctgaatgattcagacccatcgggcatcatagtaatcatcgaggatcttcggttggtatagctggtgtttcgtttgaatacaatcatctcgtacctaattaacttaattgatgtcattttccgccataatcagctcgtccaatggtacttatgttaacagtacgttttattctctacctgtttctagcgagcatggctcatgatgcgtttgtttgtaatgtatagaccaacgtctacctccgaaacaaaagcgcgtcctcaaacatggagacgaaatcttcatcgggcagcgtacaggtcatacggctggtggtggagtcaaattactctatttgagtgtacaagctgagaaacaaggagaggtcagtgatagcagcgttctcatcgcgctctgaagctgatcgattaattacattcttgtttatgtattgtacagtgcgaagtcttcaatcgctgtgagaacactttcttagttcctaacatatgttttgttcctttactcatatgatgtgcattcatttcgtcttccaatcagatcacttcatgtgagttgcaatatgtttgaacgatatcagctatatgggaatactgacgaaagattgcggttatgacatctacttcttagcgaaaagattggctcgggaacctttgctgatgtgaaaagagccatcgctctcgatacaaacgaaaccgtcgctgtcaaaggtttatccagttcttccccagatgaggacatgtgtaccatccattctatattgaggctgacgagatttcgactgttttccggcttgttttgggacaactccaccatcctaatcgtatctgaaacaattgcagaaattcaaaagcacaagttcctgtcaaatccaaagacgctacagctatttgaacgggagataggaattttagaaaagcttcagcacgttcgtgtattccgacatgtatctgaggtatactatagccgacgcgtcgccactcacactaacgataatgcatcgttgttctctatcttcccattcgtcgtgcttttttttatttttaggaaaacatctgtcgttatgtcgagtatttcgaagactcgcggataatctacttgatactcgaggtgagtagtttatcaaggttccaatgaaatcatccgtgttcatgtcagttcgatatatctgacatctatcatagtatgtggatggagggaatctattggaatacatcatggatattccaggagaagctgggctctgtaagttctcatttcgcgttcccctcaagacgaacgctagttgaatcaacttttctcctgttgctcttggtgcatcagcggaggaagaagcgataggcttgaccagacagatctgcgcggcgatggcatacactcataagcaaggagtcacccatagagatttgaaaccagaagtacgtcgtcaagcacctctgttctgccgttctttgacttctcactcatgactgtttttttttaataaaaaaaactatctttctgtgactaaatgattacctttttgcaaaaagaatgtgcttctccaaaatacaaatccgaagatggtgaaggtaagtcatacagatttggactggtcttgttcaacgaacttaattttatcaatacttgcgctctgacttaatcgccattcagattgcagacttcggattggctaagatgattgacaatagcggaacgttgtaagtcttcgtttcctaatggacgcaacaagtgtcatgagctgagtggacggtatcgatatgttgcatgaagtttgaaaagcatggttgggaccccacaatacttagcacccgaggtaagctttttttgcctcatcagaatggtatctcacgaacatggtcactctaacactcctcattcaatcgactcaggttgtactacatacccagggggtgggatacgatcaggctgttgattcttggtcggtgggtatcatagtgtatgcaatgctgaccaaatgtaagtctgctttctatgatttgataaatcaatgtctttggtatcaacttcgaggattaacatgacattcatcctgttcaacgttcagtactgcctttctcggaaacctcggatgacccgatcgaggtcaaactgaagcggcgcaagctagaactcgttgatttttcaccgttcgaggatttcggcatctctgacattggtaagtctcataataactctttgacaaagatgccttctctaacagatgaacaagcacctacatacggatattagccaaagattttgtgaacagattacttagtaaagaaccccacacgaggttgtcacttgaagcagcgctcaatcatccttggcttcgctcgtcgtccgaggctgaacgccatgcaaatggaagttccgctatggccgcatcaaattcctttgtgaccaacacttctgttgatggtcatatgactacaaaagatcagcctgatgatctcagcgaacagccgagagatacatcaccaaatacgacacgtgttgacaacgaaatcgaagaggaggatgaaggtgaaatcgaagcctctcagcagttcagtcagctccgtattaaacagtcccccatacgatccgagctgctcgtagaaagcaaggtgcaagatactggagtaatctctcaaatcatagatgagactatgcttcctcctcagagtctctcgcgaccgatatcattctccaaatctcttccgacgattcccccaactccacgaaggatagttgctcatccatccgtagcaccgaagaatcctcgtcctcgagccaagcatccatcctctttcgtcatatccccttctcctcctcccccagctgttcagcattctccatcatccgcttccatagagaactctgcccctgctgcttctctccctaccactccacaggccgcgtccccgccacgtgctaggatctccacttccaaaaagatcttagttcgatcttctccaacgccttcttccaaaccgacacctcagaaacgtaaactaccaccgtcgccaccaagcccatgtgactcatacgtttcttcttcttcctccgaactgtcttctccacctccgtcttcatcccaagggatgcaacgttcatccgagccgacaaatcctttcactctgagagagagggcgccacctcaatctacaacgactaaggcaactcctgttcgatcaagtgctcggattcgagaaagggccaatggtacgcctggaaatacgttagacagggctacatctacggttgagaaggatgagggggatagaaggagaacaagacgaaagacgacgagtccatcgaaagtttaacgatgagaaaaattcattcctttcgtcttagagacgaaaagttgtgcaatcatggacatattgacgtgcagaatagatatgtattagtttaccagcaagtatcgatatagaaagaaaagatgagaattctaaagagaacgaatatcgccgtagaactccagtatttgtatctaaatggcaattgatccctgctcagactatacatctgagcaggccatgatacctagttcctagtcaacatctggtcagaggaatttgaattatcaaagtatcaagaaggattgaaacagagaaggattctacgaaacgtctggatacgatatcgatgaggattaccagtacgcgtcgatagaccggtttcgtagtactcgttgctcataattcccttctacaacgtatattttgacacaatagtagaggtcagtccataaagttctggcctatctctgtagagacagtggagttgcattgatgagtacagaagctggtgatagaaagaagtttaaaaggtatcgtccaaaagtaaacaaacatgactgttttgtggttgaacagcgaatctacagatctagattggcatttacctgttgaccgcctacctcgtttgatattctgttgttgttcccacaggtctccctctttcttccctttctagaggacaagatggacattcaaatgccagaagatccatattccgatcaagacgccataggggagcttgaggaggaagatgacgagtacgacacgtatgacgggatgtacaacggcgacatccatcggcctacctcactggtagagagtttcatcgatccagtttgtcctcaacaagctcattatcaagacagaatcttttcttgtaacttactgaatgatctgggtatgttgtttgttaaaagtcgttacgcgatcctcctatagatcagccggagaaagctctacattccgttgaggaacctgctactggcttcccagcggtcgaccccgacttccatttgggttttcatgatcaagcattggttcaagagtcaacaacacctctctctatcctatcaaacgagcatctatccgagcaatacccatccgagtaccctgcttctgttgcttctcccgctaccgatgtgtccaatgaggatgtatcttcatcatcaactcaccatcgaccaaaaagatcaacatcagttctcaacggtacttacatcatccccaaagccctcccgaaaggaaaagagaaaatggttgagaaaccgttgctcaaacagaccactgcttcttcgtctgcatcgatcaagaagaagtcgacaggctccgattttggatcaggtgtgagctccagggattcttccatcgttcgaattaacgctggtgatgcaaaagtcgagagaatcagaaagccgccgataccgaaagccatacccgacatcgactgctcgttctgtggaggagatgaccagatgaataaggctggtattccggaggatatgatatcgtgtcatctgtgcggtcgatcgggacatttatcatgcctaaggatggagaacaaggagctcatcgacacggtcagacgctatgagtggatgtgcatcgagtgcaaaagttgcgagatatgcggggtcaagggagatgatgtaggtttttaataagtacgtttgctaacagtgccattcatatcctgacacttgtctgtttcttcgaactctttttgcagtcaaagatcttgttctgtgataaatgcgatagagggtaccattgcgactgcctcacgccggtacgttaatctatcgatgttgtgtcatctgagtcataaaccaaaagcagcttgctcacgttgttacttaactttgtgttttgtccggaatagcccctgaaaaggcctcctaaaggtcagtcttgctatcagttctctcagtagtaaccttgtcgactgacccagtccgttcttgtcaatacacagatgattgggtctgccctccttgtcgaccaaaaaagaaacatcataagatagtcaacgaagacacaccagctcgatccatcattcttcacacttcgggttctacccctagcacatcgactaatacccctaccggccctcgaccacggggccgaccccgactgaatactacaaacacgactactccaccaccacccacaatcttgagactcaatctgggtgccgtgtctagagcaagtggagcggcgctccggttgacattcaaacgtccaaatgacgaaggactggatgatgacgatagggagaacggagagagtgagagcgaagaggatgaagaggaggacgaagcagagttgtattcattcgggtcgatactgagtgaggcagaggccgaatcaagttggtcgataccagataagtgggaccgagaactgttcaccagtattgagtctagacttaaggtagtgtttcggttttcctattttcttacggcttttcgccatcaaatgcataatctaactatgaatcttccaactatcggctttttgttgggtaaaaggcgagatccagagcagccttgagcatcagccatgtggattcgggcgcgtctgtctcaaacaacactccttcatcgtataaccaatatcttcatcgttcttttagagaccgagcgatggcggcgtctcagcctctgaatatgccctccactagttgggtttctggcaatggtttgagtgcagaagatactgtgccactggaacgagtaaaaaagatgcgattcggaccctacgagctagacacttggtatgatccgccgtatccagaagaatacaccatggttccggagggcagattattcatctgcgagttttgtctgcagtatatgggagacaagagagtatgggaataccatcgagttcgtaacttctgtattcttgccccatccctatctgcttttgcgaggtgtttggtcgtaggttatgatcaacaaagtcgcctgatacttttctccaatgtccattcatcaaaccgactaggcacgctgtcatacgtaccacccaccaggtgaagagatttaccgggatggtccagtgtctgtttttgaggtagatggacgaaagagcaaggtaggttttagttgttgatttgcattatcatctaaagccgcgctttggattcggtgttgactttggtttttccttgtctaaaagctctactgccaaaatctctgcatgatggctaagatgtttatcgatcacaagacattgtattatgatgtcgagccctttttgttctatgttctaacaacgaagaatagaggtgtttctcgatttgtcggatacttctcaaaggagaaaagcagtccgctaaatttcaacgtcagttgcatcttgactttgccgtttcatcagcggaatggatgggggaatttccttatagacttcagtgagtctttccattctttctttctttctttgtagctatgtgtgttatatgcgattctgatccctcgaagcgtgttcttaggctatctgctatctaaaaaagagggtcgcgtgggatcgcctgaaaagccattatcagatctaggactgctcagctatacgagatattggaccatatctgtatttaacttcttacgcacagcccaaaaaccactctctatacggagtaagtcgacgctcctggaggctcagtcactcactacccacctaaacttgatactgaccactttgccttacaaaaaaatcagccataagccgagcaacttctctcaccccagaagacatcatttatgttcttaaggcttacaacatgatcaccatccatatagatgcctcatcgggtgaagcttcacaccacatgcgcgttaaactccctcaacgtcaaatcgaccgatctcatcttggccttcacggccaactttctgacgctatcaaagagaaccaggccctctctattccatatgattacgatatttcgtgggatcctgaagtcgtcgaacgatatctgaacgatatcgaaaggaaacgatgggctacgatacaaccttcgtgtctcagatggacgccatttatcccagaaagaggaagacgtaagaggaaaaagaaggctggtcccccaccaccatccgatgctatcgagctcagcccgagaaaggcgagtaatggcgcgccgaccgaaaagaatgaactgaacggcgtttcgaataacatcactcgttcactcgctctcgcaacccattctggctatcatactcacccttccgcctcactccagacggttccgactcaggtcgttcttagtgattccttggcgatcaacccgacggaacacccaacatctatccgggcatcgacttgagctccttctcatctaaacggtgtcgcatatttcatcggcttcaactcctccatgactctgagatagggatgtcgactgggtgaactttataagaaatattcgcatcatctcgttgaggagtgataagggggaagagttgatctccttattaggcttagggttgtaaatctagatatatgtgttaatcatctaatttcacctctcttgcttgttgtagattacttgtcttataataataattcattccatcaaatattgcagctgatgttgaattgtcctacgttcaacaaggatgatacaagtgatgtcggtgttcgcttaaggcttgtctttaatgttcttgacgatcaaactgaaaaaagagaaacgaaaagaacagagtcagccttagtaggtagagatcagtaaaggcaaggcatcaaatagactggactcacctcttgtatgcgctaacatctccgtagaactgttgatcaggaagagaaagaaagatcagcatgcccacccactgacaatacaccctctttgttcatataaatatatatatatccatttgcgtaccttctggacagttccgtctgcacaaacccagagctccttggcgactatagtgattccgatgtaaaagagcatcagtctctgatcttcggcgctctcgttatatctcttgaggcgcgacgcaaagatgtacgcgcagatagattgaaaaactctgaacgaaccagtagtaatgaatcgggtgtcgtgcgaaattaggatgactcctccgttccacttctgaatagcagccatcaaagcgtcgataccctgcaaaacatcattggccgagactagattagtcaaacgctatcttcattgataatgatggaggaaaaaaagatcaacgtacttcgatatccaaatgattggaaggctaaacgagaccattgtttgatttattgattggttgatgatggaagattagtgttcgtgttacgccggcgttagagaacagacaaaagacagacctcatcgagcaagatgatgtgtggcctctgcatactgagcacagcgaacgccactcgactcttctgacctcctgacaaggtcgcgatcttctgcagaccagtcaaaccagtgattccgaacgctccaaggtgctacaagagaacaaaagaagacaaggtcagcttagctttgtttgcttgcttgcttgtatttgtttgagaagaaggggatacagaatagaaggatatagacaaacctgtcggtactcttgttccgattgaccagggaattgagcggcaaggaaggcgacaggcgaggcagttaggtctaatgagtcgacgtgctatccgatttacatggtgaaagcagtgaccagaagtcatgaacaacgtaaggctctgaaaatatctcgctcatgatacctcagcaatatagggacgtacgtgctgagcaaagaacgcaattcgtaatcgaccgtttcgaacggccgttccttgcattgcttctaagtctccaacaagaagtttgatcctatttgaacccgcattatcagtcccgactgtcttcccgaaggaagtgatatgagtgataaatactactcacagagtagatttaccagctccgttaggaccgataacggcgattctcgagtcaagtccaacatcaatattcacattcttcaggatgattttttctttagtataaccgaatgtgacgtcgtctagctgaagcaacggtggcgaaatcttttcagtctccgggaacctgttcataatttgttcatatgatcagaaccagtcagtatcttgagcgtttctaaacaaaacgcttcgaatgatttctaaaacaaaacgagtaaagacatacttgaatgtttccgaatcatcctcctcaggtggctccaactcgggaagcttctccaagatcttgatcttcgactgagcctgggcggctgtagtggagaaaagaaatgagttatcgccatcaagtcagccaactcgtctgactattagacagacaaacacagagcatggagagagagaaaggggtacagacctcggttcgcgttgtatctccatcggtcaatgaaagcctggagatgttgcctgtacgccagctgggtctcgtattccttcttctgagtcttgagtcggtcggtctttgtcgcatagaactgggtaaagttacccttgtaataatcgagtcgttcagagtgttgccaaattatactattgtgccgaaacagaatggagaatctcagcaatgtcggtgtaacccaggtttgataaaacaaagagaagacgtactcagtagcgacagcgtcgaggaatgatcgatcgtgggaaacaaccaagagagtcgactcccaagtttgcaagtagtcttcgagccaggcaatctgtcaagagatataatttggcactgttaatttcgcgcttgacaaataccaaaagtgtgagagtactagtgtgaagaatcgaggaaacgaacggcattgagatccaacatattcgaaggctcatccagcatgagcagatcgggtttgacgaacaaggctcgtgccaacgctaatctcattctgtaatcataaacgcgatgcattcagatttgattgacatgaatatgatcggttagaaaagcccaaaaattttgaagaaccgtgaatcagaaagagaagaaagacaaacctccatcctcctgagaaagctcttgttggcttctgctgatctgccacctcgaatcccaaaccaaccaaaagctgggcagctctcgacggtccggtctcggcttcgatctcgatcaactttgcctggacctcgcctagacgcttggtcagaccctcggcatcatcgtccgacaaggtggtagaattgagttgagtcgtaagagtagcttcctccgtgagaaggtggtgtcgccagacatctgcttgtaagacggattgaagagccgtagtgtcgtctcccacgatctaagttagcaacataggaacaagtaagagactgtcagcaagagaaggactaagagtcacaaaaacggatagaaggcatggaacgactaacttcttgctcgacgtaaagcactgagatatgttgtgggatggcaacttccctgagcgccatgtttcgaagcaatgtagactttccaattccgtttcgaccgatgagaccgtaccgtcgtccgtgagcgagagtaagagtagctcccgaactgttgggtttgaatatccaaatacggggatgagtttgtggatacgaaagttgccgtcgcagcagaaagatattagagaactcacagaatacggttggatccaaaggagacatcgatgttggacaagtggatatctttggattttcccttgctggaagacatatccaacgggttgacctgatcaagccggacgagaatcatgaagtaagcgggcgtacttgaaggagcagaaagaatgaaagctcttatgacgcaccttcatgaacatctcctcgtaagactcctgttgagaagcgttggtcgtgatgtgtgacacagaaatataaaggataagtcacaaatcttttggactactaagagaaacgaagagagcaggataagaatcggacgaacctgtttcttctggatgtccataagtttggaaccttcgtatagggcgtgtcggtttcgtttctcaagctttgcctagagggaatagtagaatatggccggactcaagtcaatcgacagaccagagtgagtatattgataaatctagcacgttcataccttaatcttggcctctgctttctcaagcttcttcaagtcaactcgactggcctgtaaattcgagagaaacacgcgaaggtatacatataaatctttgaatgaccgagggagaaaacagacagagaacgacatacctgaccctttccgtggtgctcaagatcgacctggccgttcagtccgagtgtagagctgagagcggctcctgctcgcttcatgtcgatcacctggtccaacgccttgacagacgactttgtctttggtttctgccgggtcgtcgaggcttgaaggaactcggccatctgggcgatgctattgaatttcccatcaacgaggcgtacagacatcagccatacattgacacattgttggaagccaagagagaaagaagaagaagaagaggaagacgaacagtcggtcgagctctgctaactttgcgtctccatcgggtccaccttcgagcatacctctcgacatggacaagatctctgcctcttcttcctcttcgtcctcaagaagaccgacgatgtatgacacaacggtctcgtctgtataaggcagagttgtcctgatatcttcagctagttctgccatcgatgtgtatgtatgtgtgtgtgtgtaggtgtgttgtaagtttgggcggtggtggctgtaagagaaggaaggcagaggtgagccaaaaaagaccggggcagacggaattttcgccttcactttctatcgaccatcgtcttccctctttccatcaaccttcaaggtttcccttcctcggccctctctttcgcccacgatgctccgtcatctctcccttatgtctctcggccggacggctcctgtggcgtctagctcaggaattgttagaagttttcacctctcggctcctacgtttgaatccaagttcaagcgaaagattagagaaaaccgaaagcgacttgaagcctctaaggagagggtcaagcgcgattggttgaacagccagcctgaccctttccttggagttcctctcgtggtacgttttcttttcctactgtaggagagagtgttggggacttttctctcttctttctctttgaaggaagggtgaaaagggagcggtatgacctggtcggatgatgtttgagtttcgtgcatggactaaacttggtcatggcttcctctttctttccttctttgccttcttcctctcggttttcattagtacaaggatggtgtggccgagcacgagaaacaatggagacagacaaagatagcgtcggctatacttgacccgcaagcactctggatgacgggtctgaacaagccaaagaacgtgtttacctcactgtcttcttcaccagcaccgacagtgaccattccgaatgaagaagatgtagacatcattgaatctgaacaaccgccctcggatgctactgccgatgtcactactggggctacgatctatacaccgtcgaacccgattgagtctttccggttgccggtgtatatggcacaccacctgtcgaacgaggagaaggagtttttgttctctaccctgccatactttactacggatgtcaaatcgttgacgacctcgccgacggatacgttgactgctgaggaacaggccaggcagaacgttcaagcgagagagtcgatgaaggctgaggaacaatcgctcgaggcgatgggtcggatcttgagcttgaggaacgcgagtgcaaaggtgattttgaaggagaacatgaagagggtgatcaaagctttcgaagcaccagaataccagtccttccagcagaatgctccccgatcgagaaaagggacggacactggatccccagaagttcaaggtatatccttctttgcattctcctttgcttcttcctttgctctgcttgcattgcaaacccctcgctcaccccatcgccctttgcaatataagccgcgatatacacgctccgaatccgagcgcttcgagcacacctgatggtccaccaccaagacacagccaacacgacgaaactccgacatatggcccacaagcgaaaacgggtgttggaatacctaaagacgctcgatcgggtgaggtacgacaaatgtctgatggagcttgggatcgacaagcgagcggtcgaaggtcaacttgtcatccacaagttctggtacgtcgctttctttgctctcgactgtcgtcctcctactcttttcttcgtcagcctcttaactttctttgttgacaaacatcactgcttcactctgttaaaaaaacgcacgaacgatgactgaacaaaaggcgacaaatccctcaaacgcaaaacaaggctcagaaagatgttaaatatatcggtcaggtcggcaaacgaggatcgatctctcaacgaaaacgacggggaatgcagggcaagcggatgtgggagaagaacccggaggctcactactagatgtgtctcaaatgaatcaacaacaacaaaaaagaatccgatcagagactcgaatggatttgtagcagaagccagacagaagaggaacgggttctatttatgtgtctttttgtttaaaccgcccatcatctgttcttgcaaatatagacagaaggcagacgttttttttctccttcctctccctatgtttggaagtttgtgccagaccgatgaaacaggtctgaggcatgacgatggaatgaatcagtgacggatcgagtgaggtcatcagattacaattgatatcaactacgtaagacagaggagcacgggatgataaagaagacggagaaatagaagcactactcaaagacaagcgaacaaacaggtgtacaaaatgcagagtataaagaggcctagggctggaggaagaaatccgaaggagcctgaatcttaaagcaccttgtcaaggaactctaaagcatctttgaacgcatcctccttggtctttaactcgtggtcatccgttagatcacctctgacggcgaatccatggacagccttatgataaagcttgaggtcgagtccttcggaatggtttgtttccttccgttcttgaataatctgtttgatctgttcgacctgagacataggcaccatatcgtcctcctatgtggattggaagtataagaagagtcatcagaggcgttgggagtggtcaggatggcatctaaagtacgggtgggtgtgccgtataagtggaagaaatgctcacatctccgaccgcgatgaatgtgggtttcatgatcgcgttgatttcggaggggacggaaacttgggactagggtggaccaaaaaaaaaagtgtaagtacaaaaggaagcactcagcattcaatgttagcaagttgactatacaaaacttcagactcactggatggtaggcgacagcggcactgtaagaatatcacaaacagaatgatccgtcagtcaaacccaaaagagtctcattgcaaagtctgcactggtacgcactcgatcacaccgtccttatcggcggcaaggatggcgtgtctacctccgaaacagaatccgacggcgacgatcttcttgacctctggatctgcccggacggctttgaggtaatcgttgatgatgggcagaatgacggagtcccgatgagtgaacgtccacggaccgaatgtggcgcccaactttacggtatcgatcgctttatcggccagcgtctttttttctcggtctcgaaggttgggaatagttgtctgatgaggaggcaatgggcatgtacagaggcatgtgaacatggacataagaaaacgtgagcatgcgagcatgtggaagaaagataggaataagatcaagatcgaaacgacaagctgatacgtaccaacaaatcgagagggactgagtcaccggcaaagatatctggaataagcgttctatagcccttggcggcccactcgtctgctacgagtctgatgttggttgtctcccatccaaagatatccctgatagaatctcgagatgagttattttccgaccgaggcgtccgaagagtgggagactgctataatttagacgtgagaacaagatgatactcacgggataatcatcacggtcttttcttttgatcctccttttggatttgcgatataagtgggaagtccatagaccgtggtagcctgtccaccgggtgttccgctatggatgtctagatgcgagcaagcgaaagatcagagggagagagaaaggcatctgaattgagtggaacacagttcgacgcgaaccagacgcaagcaagtgatgtaatactaacggccagaaacgcagcattctttgagttctccagacatgacaagtataagtatggctgatggtatgagtgttgctacaaatgctatcacggacgtggacgtttaatgttcccaagatggtgatggaaacctggacagggcaacttctgaagccgattaagatgccctgatgtcctgatgccctgatggtcagtaaccctaataatacgtcatcggagaacacgtgtgggtaggtgtgaccacgattgggaaacgtattacataatccaactggcgtgcccttcgatgccgaattcggccgagcgtgccgagagccggacggaaggctcgctttgtggggaaagatacttgattgctttatgaatcacggtgaattccatttatgatccttaaacaaccataattagatctattacatgctctttcttttcaccgttccccccggaaagagtccacttggctgttggtcttcttggctctataatggcatggatgggacggatctctggatgctcaagtgttctcttggcctctcgggtcgtcatgttggaaaatggttcgaaaatgatatctgactcggccgccttaagtctgtgctgtaggagacaccaccaagaaggcttaggctctataggctgtccaaagaccgccttctttacacagcgaatatgcttgccggtcttggaataaagacacggccgagaacaatagatagagcatagagtattctgagcacaacgagaggagtgagcgacataaccgacatacatcttcactcagtcatcctctcttcctttggcaaaagaaggtaagaaaagacaagacaagacaagaagaaagcataatccggggatgcaaatcatagttcttaccccaaggcggggctagatttgacatgccgaccggccccggctatacagaaccaaatcccttccgccctccagaggggcctcagctgggacgtcgatcgttcttctcgaggggaccaaccagaggaatacgggctaatgtagtcggggggaagggaaattatcttgggctctccgcacaagctgtccccactatccccagtggagcccagtggtgtagaggtaaatctttttcttttagattctcgctttgtgggactcctgatgcgcatccgcttcccaaacgtccgcttcccttccctttccgtccgtcctgctttgccgtgtcttgcccggatgatccttcgtttccttgtctggtcctccgcgttttttctccatcccgaagatgttggaccccctggaaagagttgggcctccgttgccgattctattaaagggcccaccccatgattgccttctctcttttttctctttcccctcttctccattctccatccaaacttttcattcatcctacaatcccaacacatatattacagtccttcctctaggttatccttaaccacaaccacaacagccctttccctgtagtactcaatcgaggcattcaaccatgggaaaaaactttacccttactctatgcttcttccagtctcttgctggtctcctcttcggatgggagcagtctgtcatttccggagtaagctttttccttctttgcgctcgtttctctctttgtctgcgcgtttctttctttgcgcccatgttgatcgcttgtcgttctctctccagctcatgctcatgcccgacttcaaagagaggttcggaacatgtaccgataatggcacttgcgccgttgcctcccagcgacagagtgtcattactggtatcttctctgtcggtcagtaatttttctttaacctttgtctgaactttactcgatgcgatttctggttctaaccttttctttcctgtttttccttctgctgcaggttgcttcattggagctcttatttctggagccttggcgtaagtcacaagggtttcaatttttcttgatggacaaaatgacgcgctcgacaggaaaaagtcctcagttcttttagttccggatctgacccgtttcaccttcaccttctcttcttgccttcctttactttctcttgccttctcgtctgtcttcttcctgccctcacagtggaaagatcggactccgaaatgccaacttgttcagtttgatcctcttcatggccggtatcgccatcgaggttagtccccatattgtttttctctcccgtgctcttcccgtttccattccgttactaattgcctccgatttatccgacttttaccagacctctgcccagaacacctacgcccagctcgtcgttggtcgagtgttgaccggatactctgtcggttgcctttccggtttggttcctactttccaggccgaggcttgcccgccaaaatggcgaggagtcgtcaccggttctttccagggttgcgttactctcggtattttccttgccaacgtcgtcaacaagggtatgaacacctacaaaggagcgacctcctggcgagtccctatcgctatccagcttgccttcggtcttctcctcttcatcggtttcgtcttctcccccgagtcccccacgtactttgccaagcgaggtgagaccgagaagtgccgagccgccattgccagacttcgaggaactgatcttgactctgctgagaccgaggagttcttccagaacatccaggtccgacagcagcaggaggccgccctcggagattccacctaccgagagtgcttctcccccaacggacgaatccttttccgaactgccatcggctgcatcatccagatcggacagcaggtcactggtatcaacttcttcttctcgtacggtgcccagttcttccagaacgccggactttctgatcccttccttgtccagatcatcctctctgctgtcaacttggccatgactttccctggaatgtacgtcatgtacgccgtcggtcgacgaaacgtcatgatctggggagcggtcgtcatgttcatcggtcagatcatcgtcggtttcatcggtcacttcctggctggagagtccgtcgccggtaaggtcctcatcgccttctcctgtgtcttcatcgccgcctttgcatgcacctggggtcctgtcgcttgggtcgttaccggagagaccttcccgaccaggttggctgccaagtgtgtcaccatcgccaccgcctccaactggggaatgaacaccatcattgccttcgtcgtccctatcgtcactcaggaggacggagccaacctcggaccgatgatctgctgggtctgggctggattcatcctcgccatcggtgtcttcaccttcttcttcgtccctgagaccaagggtcttagtatcgagagcatcgacgacctttaccacgcccgaatccccgcctggaagtctgcatcctggaacgcccagcgaagggccgagcaggacgccggcgctcacgacgagtccgtccacgcccacaagctcaagaacatggtcgaccagccagtcaagatcgaccacaagcacttgcccgattccggccatgctaccccgttgcacaacctttcccctaccaactctatctgagcggtggtgatagtcttttctgtgtgatttcgggttctgtcttgcttttctttctgtcttgcttttctttctttctttaatactttcgaacctacataccaaaaaaaggagcgatcgctcctgaccttttactcttttcttcggtggtctttcgtgttttccctcttttcctaccgtctaatttctttggttatggtgtct

SEQ ID NO: 1267 - DNA, 69921 bp, Xanthophyllomyces dendrorhous
ccccttcccttctgcccaaacttcaattcatctacgcatccttgcatcgcatcgcatcgcatcctttctgtattatttcgtcttctcttttattccaaaccaagaaatcgcatggctttcttttaatcaaacaaccaagaacgacacatatacacgcacacgcacaagctagaacaagtctacagtaccaaccgctcaactgatacagaaaatttgtcgtcttaagctgcacgtgatcgccatgttggaagccagaacttgtactcacattcgcgtcgtccagacgttgctctatcttttttgaattttggaaaaatagtcctcttccttctttctacgttgctcatcccagctttagaacctcaacaggaggctcatgtacaaccgagttctatcattctacagattacgacccgtccggacattaacgtttctctccacccgctcgtttcatagatcacctcttctcttttctgctcttgatcaacctaccaaagacaaccagtccgccgccgagtctgaaagtcgacccaagaccgaacatcgttccatacaaccacccaggattcacagaccgcgaacaatgttcaacacttccattcgaccggcaattcccaagttcccgggaatgacaaccctcgacaaggaggcgttcaatatacagataccagtcgtgagagcaaaagtgccaacaagtgctatgaggcaaatcaatcggaaccctcttttcaaaatgcaagtccttcttccttttgatttcttcttctctgatttctatatatattctttgtcctgttcgcgtgttccctggcttgatctgatacctccgtcttcttcatgggtcttcctcttttcttcctagcaggactaaacaatctggagtgacaggtaaagggttggccgtagtgactgacgagaaggatagcgatatgaggtggattcctctacctgctcatactaagggtgagtcttgttatactatgctgcgtctacctcagctgcctttgcaagaggaaacgctttttctgaatctgactatgcctcttgttcctactgctaaacgactgatcggatcaaacagccgacctgcctcaggagacgcttgatgcgctattagagttagccgggtttgtcgaggtcgaggattcatccgtcacccttggttggaactactggaccgtccgtgagtgttctcttctctctttgggcctctttcttcccttggcattctttcttgtcggtcgaagattggctgccgaggatacatcaaacgaagaaaggacgaaacggaaagaagacggctgatgaataaatctgatggttcgcttcgtccacccccgcagaggaaatcatctcggccatccttcctgaagatgcagatatgcaggatggaatcccttcgagtttcaccatgaccggccatgttggtgcgtctattcttctctctattcggaaggtgctagtaaaggtggtcgttccggagctgatatggatagaaaacgtcctgttttccctcgctttgctgcttcactatttctcgtcctaactttcctcttctattggacagcccacttgaacttgaaaaagtcaatgctgccgtacagattcttgattggccagatcttgctcgacaaagcacagacaatcgaaacggttgtcaacaagttggatacgatcgaggaccagttccgagtgttcaagatggagttgctcgctggaaaggacgactatcttgtttcccaggctcgttcttctcttctttccctttcttgcttttgttccatctgaaaatgtttccctctcggttcgactgacaatctcgggtttgcgccgctctagatcgagcaagaatgcaaattcacgttcgacttttcccaagtatactggaactcgagactaacgaacgagcatcgaagactcgttaatctgttcaacccgggtgatctcgtggtcgatgtgatggcaggtgttggcccgttcgtcgttccggccgcgaagaagggatgttatgtgctcggaaatgatttgaaccctcatagttacaagtacatgcgactcaacaccgaacaaaacaaggtacgtcttgttctggtccacagcacatggcggatctactcagcgcacttcgacggctaagcccttgattacttaccgtaccctctctctttcctctcaaggttgtggataacgttcgactgtttaacgacgatggccgaaatttcattcaaacgatcgctttcgaggcatacatgttcccgttcctggaaccctccctcgagagacaacttctttgtcgaccagacataccgaacatcggcaagattcccggcagcatgggcttccagtcttcgaacgaaacacacccgccggtagactcagcatcgcgccagactgaacatcactcctcccatacctttcctgaccttgccatccttcattcagatagtcgttcagcagtttctccttcagatcctacctccacaaccacaaccacaaccactaccactactcccaacactacagtacaacatcccaatcccgatgtagccggtcgatctcgcaggagggtcaaagcacctaagccgatctacgaaccaactctgttcatcaaacattttgtgatgaaccttccagattcagcgctcgagttcttggatgcctacagaggctgttacagacctttggtggacgatgccggactgtcggaacacaagatcgagatgccgatgattcacgtgcattgcttcgctccatctattgcggagggtgctcataaagagatcttccaggttagccctttttttttctttttttcttttttcttttagtcaagtttctatgaaagaagaggtttagtgagaagaacacgaaactaaacatgcctttgtttctgggcttttcctatttccttcccatgcacgcttctcagcgagcgagcgaacgactaggatacaccatcgatccggctaacgacccaacggtttacatcgagcaggttcgtttggtcgctcccaagaaatggatgtactgtctagggtttactcttcccagggaggtcgctttcgcatgcaagggatctgtcggaacccaaaaagaagaggagaagaaagaggccgtggaaaagggagagaatgattctactcaggacctatgaggatggatgaaacgaagttagagatcaagatcaagttatatttcccccccccttcggagacctggttcggtcctcatgggatatgctcgaaggcagatcacataaatatcctcgtataagaaatctcaaagctagaatacatacgaaagaaaactacaaactcagaccacgagacatacaaaaataaacattaggcatacttaagatataaaaaaaaataagaaataaaagagagaccgaaagcatgtccaaggaggattagacggcagttacaattgagaaaagaccttgtatcgagttttgtaacctacggcccaaccgagccatcgggctatttagtcgtgcgatatcagatggggtttgagaaagttagcagaaaacaaaagaaaaagaggaaaagacagattagacccgactgaccaccgacgttcagagcacgagcgataacggttggaagatctccgagtacgacatcagcctattttcatccaaactccgatcagttacgatagaccttatcttgatcttaggatctctagtcgttcttcatcgggacgattgagacgggaaacaagatcaaagggggtgagagaacgacgtacagaatcaagcatcatgaatatctggaccgggtttggttcgacgttttctgcgatgcaggaagaaacgtacccaaagaacgaattcagaaagtattcatcaaatccacctgctgatgtgctgatctcgacgtctaggtcatcgtcaacagaggtatctggccagaactattgtgaaaaagaagatgcgaacaaagacgttggacagatatccagaattgaagaagttagaagacggacgatagaagagacggagggataagatcggtggacagacggtatgaacttgtcgaggcaggatcaagatctcttccccagggttgactgaaccctgctttccatcacgaatgtagagcatccttcctttcaactgaaaccagtctccgcgttcgattcatagcacataaacatgctgatgagcactcgagctgtaggattaaagatttgagcgaaacagatcagactcacacaccgaaacctttctttctgatacaggtggtaatgtaaaggaggcgtggccttcgcctccctcgagttagtccagagtgacgatcgactgatgatctgacgaatcatcgtgctctcttctccgtcgatcgtcgtattaatcgaaggaaatgagactactccgccttcaaagaacagaagcgcgcctggatgggtaggggacggttctggagcatgcagggtctgatccacgaagatggatcaaacagtcagttctcgtcacaaagctcggggttggtacgagacagggaaagactcaaacagtttttgggaagaatatatccagcatagtgcaacagaaatcaaaaaatgtaggtaacaaagtatgagatgatgaaaagaaagtttgagggttcaatgtatgaatggttgatcttgtctaatacgtgtgctctgaatcaccgtctatcgcgccaaccgcaattaacgcatggcagtatccttctcttaacatgttgtacatcaatgcttccccttccagccaagccagccgacaaactttccaccagcgccgtcaccgtcgccccaatcaaatctgttgacgatccagtgaactttgtttccgtccgacttcccattttgcaaccaagtctcgagaaactctccgacgacatcctcagctcgaacctccatcactatacaaatgaccgttctgccttcctctgcctggctgtcgaatgtctggacgagtccttttatcacattagggttataaacgcaatccaagcaaaggatcaaatcgtatgcttcggtaggaggaggcgtagagtgaagccaatcgacttcggcaatctcgatatttgtcttgtttgatgggtcaagcgaagatacgttctgagagatcaatttgaggcagtcaagtctagcgcggacgaagaagagatatcagactagtgaataaccttaatcaggtgctcacttgtcatgagacaagtaaccgtcaaagacagagacttactggtctgaacagacccatcgtctgacgaatttcgccaagaaagtagcaacgagacccgtacccgaccctaactcgagcacgttcgcttgttgaagtgcttctacgttaaatagcggagggtatagtgaaggcatagaagagaagtataactgaggaagcagatattccaagaaataaagactgacaaaacagaaggtttgattcctaagtgcattcagtcggctaccacgacaaagagaaaatcgcaaatgctcacctcgttctccagacaacacaacccgtcccgccagcatggcccttcaatcgtttcatatcctgtttgacctctacctcgagttctacatcctttggtcttcttccctctttcctgactttacctcttgacggccttttccttctctctgctgttgatatcgacgtcaaggactctacatgacctgaagcctgtgtgatgtccacgtccgataactttggaggagaaatgacgagccgaacggacatccgatcctcgcggtcgttcaaaattcccagatgagactcttggctgtcagatgaatacctggaagaaatcgctcggttggttataacctcaaaggcctttgtttcaagaaatgaacgaaaatagacatagtaaatatgttaccagacaagaagaagaagaatgttttagtaaaacacatagtcagtttcagcagattcggaaagagcgaacttcttgatcggcatctgtcactgaagttagtatacttgaacgatgcacaaggttgggtatcatttctgtcatcgccatcccggatgagcagcgatgggtgtaaacactttgggcttaatggtagtgcggagtgaggactgataaaattgatgagctaaccctaacagtcatcctgacggttgaaacttcagcaagccattctcccacacagccaatcccatcaaaccctttcttttcattccctcatataccagatagatctgttgatagagccagcagaggttcgattcctcatccagaagccaaatccaagataagtgagtgtgtgtgtgtttatctttttgaagtctctcgatcgggtaaagtcgtcgagacacttgctccctttggaggaattctttcatttagtcaaaatgttttctaagaactgtatgactcggattcttcctgctgcttcttacattggtcattgtctcatccgtaatattcttcgctattaaactggtgctgagctctgactttcatctgttgctcctttgttttgctctgtttgctctccctccttcctcctcgctctcttatgaatcagttgaaaggcaatccgacgcgtcgttctcgttctccttcatttcgactttctctttgccctgagcgacctctagactcgattttaacgccagaaatgcattctggaatgtccgagccgagtggatcgaatttcaagaaacgtaagaagaccaatgatgatgatgacgacgagagatcaggcacgagcaccaacggcggcggtggaagtcggagaggtagcgcagtgctaatgccgatgacgaaagcagagaaagagagagaaaaagagaaggaaaagaagaaaggcttcagttgtagcgagtgccataggcgaaaggtttggtatgttttccgtcttctgatttctcatctctgcgtctacttttcgatagaggagatcatcaactgacctttactcactacaaattctcagttaatgttcatgcttatggtctttggaccctccgaacacgagagaaactcataggctgatatgatcgagaacattgtgtggtttggactgaaatccgtctagcaaaaatgcaaccgagaaactccctgtcgtacgtgtgccctcgtatatctttttgtttgatatatgagcgaatgcaaaaattgacctataatatacgcttcgtcgcgtggcgcttcaacgtctatcctttggactttggggctcaccagatcattgcgtggctcgaaaagtaccagataggtgtcatcctttcagtaaggctttctgtcttgttcaacctactcgtactcttctaactccatctatccctcacttctacatagctccgggcaagcctgaggatgagcttctcgcacgattactccggacagaaaaaatcttatcgcttcagtttccacagtataattcctcagacgcccttcccgactatccactcccgacaaaccatccgttcgtaacccaatctggcggacgatcgaaaggcagcgaagaggagagtgaggatgaagagttgaaggaggaggataaagacaggggtagaggacgactcacaaaagggaaatggtttggcgtggttcgtataccttcttttctgatatctgcttaatagcatctcaagagatagcttagaacacgtctgatgttcaattggatttcggtccacacagagcgctgtccagtccatgtcggaggcacctcttctagacaaagtacgcccttgtcatccaaccaggtccttctttcttcctaagcgcaaaggaaactcatctgtgttgatatctttcaattcatagctacgagcagagaatacgacgatgaacttattacaagcagaacacgtcgcgattgaactgcagttagaagataattcatcaccgggttagtcaccataattctccttaggatgttccttgtttcatttcatttcatttcgttttttttttctttcatatttcattcaactaacgatgaatttgatcactgcgaattgtcatgctacattgatctggttgaaaacgtctagctgaaaacctacaggtatgttctgcctgctctgttttaaattcgaaggagagttagttgaatattcatcatgcttgttgaaccttctctttctattaccagcgcctgattaccgagtgtggagtgtcgcctacaaaagtagcagaactcgtacaagagctccctcctaaggactttgcaaacatatgtatgtcttggcactctgttcctctatctttttgccaatattcgactttccgaccgttggagatgctgaatgtgttgcgaggaaacagtggtggactggttctttggtaagctgtccaaacaatctcttgtccaatactctcaatgctattctgcctgttgctcaaattgtgaacacatcatttcgcagccaagataaatttcacgagataccctatccatgagggcatgttcagaggtgcgctttattacttagtttgtttctaccataatttgcatcggcactaaactttcatttggtcaatataaaattctgtcaacagtttgtaagtcgtgagagctcacatacaaccgggccgtcagctgggcccttacattctgtcttgtcttctcgctcgtcaaacgttcttacacgacgcgtatagcctacgaggcgttatacgcaaacggactgaagacagatccatcaaacgttcggtcgttacctctcgtattcataattcttgccaccgttcgttccttcttccctctttctcaactatagaaatccactgacacgtgcccatgacgcgtcaatatatattttccccaatcaacaccgacatgtggcatgactccacttaggctgtccgactctcaccggaacatattggaggtgatgaccggacgcggagattgacttccctccgatattactggtccagtcggcgaagtattttaattgccacagccatccaaagtgagagtctcgagctcgtgatcacgagactattgagctcgcggtatctaataatggttcacgacagacgacttacagtacgctacctgaccttcccttgttttcgctgatgtacaatatgaagaagcaagtcatgaaaacaagacagaaagctaatcagtcagcggtcattttttttcttctataggaatgctggagtcaacttggagccagtctgcgaaccgctcaggcgattggtctgcatcgggatggtacgaagcttggattggagttagtgtccgttatgttttggtcatattgttttctttgtaaactgatcgtttttgtctttttttcttctgcgtatctcctctttcacaaagcgcgttccaaacggaatatcgccgtcgaatctggagttatctatatcacgccgatcgaacatattctttgatccttggccgcccacctgcaatctctgatgtctacaccgacacattacctccctcaaatatcgaagattctgagcttgttcctggtgttgctcccgaaccgaggccattaagcgagccgacgccagtctcatactcagtattaaggcatagtttaagtaggatcatcggaaaaatcacacattacttccaacaattggcagagccaagtcattatagtgatgtcttgaagttggacgatgaactgaatatgtttgttacgggtttgccggctcattttgagtaagtatagttccagttgcccatctatctcaatctttcaaggatatacgcgcttcggtgacgatcaacagttgactcttccatttttttgctggttgggtagtatggagaatccggacaagtctctagatgggtaagaaatctagtttcgtgttactcgcatatgcttacaaactcaccaaaatatttatatgggatatttgtttcttcgttcaacagtgtatattccgcgttcttgcctatgcgtatgttccctcagacatctcaatatttgatatcttatgttaaagacgatcgagctaacttctctcctgactctgtcctttcagatcgattcttcctacataccgaaatcctttttgtcagaatcactctgcatgtacgtctgacctcacttgtactttcgtctgctgatccttagagaagcttatactccccgatgacttttttccatccagcgaccttggctgttacgaaagttaaagtcggataagttcttggtctcccgaaatgcgtaagtacatggagtctttcgcttgtctgttggccatgtgttctctataccatgagtgtttgagagctaacatatctgagttgatacagctgttttgagtcggccaaacgagattttgtcatcgttagtatcggatctctattctttgtaaagccaaattcacgtaggaacttaattttgactctattcaaccaacagagacaagctttcaaaaaagaatcttcggttgatgtctcggccgtcatgggtggacgtgagttgtgtcctgtatctctagctctttgtgttatattggagcactgattttgtaataatattgtcgatgtttcccgatgcagagttccgagagtttaacgctgctatgattgctggttggttgtttttaccatttccttatcgatcgtcctcgtatatagttttaacccacctttggtttcttgaaacaggcataagcgcgattgtcgatccacacggatctgaaggtccagatatgagaggtatcctagctacgttcttggatgaccacccgccggcatccgctatcgatcctaccaccaagaaagaacgaaacatcgtgggttgccttctcttgacgtctcaatcatttttctttgtccacaacttttcaatcagaatcaactctgatgtgtcttgctctacctccttgcatgtcagatcgaaaccctcttccatcgatctgtgcaattacttaacaaagaaaatgatccgcaagttgatccagcacgtactttactcgacccaggggtcgaaaaagagaaccacgctcgaacactactcaatctttccggccatcaagctaccaaagcctcaccaacagcttccgccgctgcagctgctcattacctatcgaggccaccgctaggcggtggaccttcggcatctgcttccggttcgaaccagacgggcagtaccagaacgggtcacggcgggatggatccagattcgaccttctctcccggaggaaacggggctgcccaatgggtgatgcatagagattcaccacaaagtagttcaaggatgggagacacgccgcctagcattgaagacgagagcgcgcaaaacttacttgataaattttggcaggaagtatgtcttccgttaccttcttctagatagggcatcccatgctgagtgagaaggctaatcctttgtcatcatctattcctttcagaacttagttttggatactgtacgtctaacggatttgagtgtttctaaaactctctgctcacctttatcggaataaattttgatcaacagatgggaaatcacgaacaaatatttccttccaacttacaatcaacgtcagtcctgctttaacttaatttatgcttcctttatgtctataatactgatcttctcatgagttaatctgtcggtgacatcgaatagggctacagcttctcttgagtttccggggtcgggcgcgaatggtaattatgcgagtgggacgtcaatggccggcccgtcaaatgacccgctagattttgattcgggcgttcagccggcgacacctggtgatctcaattactggaattcgctgatcgtacgtttcgttgctcgacatctgattcgtgatgactgctcatagatactgatgactttctctttcccctcctctcagaactcgattttgacacaaggtggagataccaaatcgaatcccatgcttacgggagagaacggcagtcgctgagagccaaaaggcgactatcaatcatctaccaacaactccttatgtgttccaactcctctcgtttagttctcatccatctgtcggctatctatgtttgaagctattgtcgatgatatgtactcactcctacttttcgacaatttccctcaccaatagttccattatgaactcagttgtcttatatatttaataggagttttctttcttatagagacgtttatgcatttttatctcattcttcgttctcaactgtcgccaagttcatatgttgtctgctgtgtcagtctgctctaaaattgaggtcaaatcataatatcgataaatcggccaagtggtctcatgttctgtatgtacaatctcaggagagtagggcttagtcaagtcatcagatgatggcgaagaaagtttagagatttgttcgacctacaagacgtcttccaagcttccgtcgctgcctgccggccttgatcaaacccgtgacctgcgagattgaaaaagcgaaagataccccagaaggctctgcatgattagtacaaatagatctgagtctgtacaaatactacacgggatgtgacctaccccattcccatgcgaattcaccagagcctcgttgagcgatgtgttcttcgaatcgtctaccagccaaagtattagctaccaagcagcatgttctgcctaacttcaaaacatggatacaagaaccgcgctgtagaatcatgtgaactcaccgaactttccattgcccgcctgctgcaggtatctctgctgccggtccgtttccgtacacagtacccgagctcaagaaatgtagggcatcctcccagcctgtcgtataacctgactggaaccggtcatgttccatgggtcgacggactgccttatcccaatattgactatgtgcatctgttgattttattcaatgagatagtaagagttcattcatgcttatccattgagttggaacagaaaggctacaagaaagaggcaacaagaggaaagcgtactggttgcgaattgtcgtctctgactcagaagatcaggggaaatctgaacattacccttgtgcttgggcccaaggaagacaggaatgatttctgctcgacaagcatctttgaagctccctatttatccaacggcagtaccaatcaaagcgattaggtttggacccgaccagcagaaagtaaacagtgcagtcgaatacataaaaagccgattggatagcatgggttgacggggaaaaaatgagtgatggaagaaaagagaacgaacagccagcatcccatccatcttgctttcgataggtccaaaaaaagtatccgctggtcttgccctcgaatacctgttactcagagtcaacgattctcacaaactgagtacttggggaagggataaatagactatgcgagttgcaagaaagaaacacacttcgagctgagcgcgcacaaaatttcgtcgcttggcatcttgttctccaccttgagaaccattaagagatccacttaagatcccagaacgcgttgcaaaaagtaagtagatcgagcgcgggctgatgaacatcgactgtctaatacgtacggattcagcgctccactccactctccgacgattactcttcctcccccactttctgacttctgcacgaggtccgtacccaaacgacccgatagatcccctcggacctcctctgcgtgcctttcagctgatttagcgcaatcatccgaggtgaaacatcgatagacatgggtgtcgagtagaataaaggacgaagtagggaagtaaatctttagaccagcctcaagctgccaagcatcggatatcatcctgttctcgtcatattgtataaacccgtgattttagcttagataaccttggggtgtattatacagcgaaatggcaaggaagacatacaaagggaaatcaggaccacaaatcgaacgaagtcggttcagagtgtttaaatgaaacttttgaagctgagggcaggccgcaggctcgttcattagctccagtctttggtcatgagagaaacaagcatgtatattcagtttcataagtcagagtacgctaagatgatctactgagacgaggggatactaggtttttccccactcaagacatcgacagaaggaacttacccaataacgttttcgacgcccgctatagcccttagtaatacttccaacgtccggactgtctgagcctggtacttctggtgagtgaacaagagagcctcatgagacgctccggcatgagcatctgggttctgttttcccggaaccgcgtggagatctataccatcaataaagcttgtgagccgtgcgatggtccttgaggaacctcatttctagatgaagaacgaaccaacgagaacacctatatgatatctgtttgcccactcaaatgctctcgtaattctagaccaagcgccctgatagatttcaactgtaaaatcgaactcagtatccttaacaagggatggatctaggccagatagatgatagtatgatatctgctctctcccaaagcaaacaaagaagtactcaaattcagcaaggtgtagaccgtcgagaacaagcaaagaaccttatagaaaagcagcatagatgggacgaacgggtaaccgaattgagttgatccctctttgggccagaaactcgaaatcgctctcgacgatccatgtatcccaatgctgttcaagcttccgtttgatctcttctttcggcctgcctgatttacagatatcaaggtcggatcctcctgatgatggaaagagatcataaagctgttaaacctctctccttagtcaatatgcatatcgaagaagagagaagaaacagaccgggaggagcagcgccctcgaatggactacttgagatccatttttcaagagtgaaccaagaacctggagtcgagaccgtccaaacatacataatggatgagtctgcagtactatctctcaaaaaatcgatagaaacaatcttgacctagattgactcctgcccagaatctaattccatcattcacaattcgtcaatgtatcgggtttctttgaggttctctatatatgacttgcgaaagacgaagaaagagatgggaggacaaatatggtatacagacctatatcgcatgatctcgctctttgatccattaccgatggggatccttcctccagcttccgatccaggttgagaaaagctttgttgctgttgttgactattgacacccgtgcccgggaatgatgagcccggaggcttggaatcatctacaagcgacctgaccttgttagataactttgcgaaaatgggcatgtccagagatgatagtgtcaagagttgatggaggttggtcggccagaaacaccgccagtaagcggattagataatggattaagcagtcttacgtcatcgactaccctacagatcaactaacaacgacgcaagcggccacaacgacaggagatgtatgatcaatcatgtataacatgtacaatctacaaggtgtatatttgtaaggatacagctgggcaaatcaaccgactctaagaagaaacgcataggaaaaaagagagataaaggagagtaaacgttctaagcggcgtctttgccaatctaatttgtgtacgacaggcaagcacatcattgttagttctttcaagcccatcgttggagaagatatttcgaatcgacgaacctcgattccaggcttggctcccaaggcatccttgatctccgagtaaataaggaattgaccagcgaccaatccagcggctgtttcgatcgtttttatcattcatgttagctctcaagcaagagtagtataatatgtcaataatctgaacaaaacagtacgtactcatcagcatcctaggtccaagacctgcgaacaaccccgcgaatccagcttgcctgcctagagtcaacagcctgcccaacataggacctttcggtccatctcccttattgatctgtgagagaagggtgtccgcaggctagcaatggatatgcatcagagggatgtacatagacagttaaactgttcagttaaccgaacaacgcgactaaacaggaggacaggcgcgatagagaagtaaactcacgtgagagagcacagcggcgacgataccagcggtgataccagatccaaggttgatacccagtctttttgtggtcgatagattctcctgctcctccttcgtcattgacttgtaagcgagctcatgcataaactcgtttgttgctatcgattgccgagagagatcattgagaaagtcgtcgcgtcaaatcccatgtctgcttcggcaagagcagaatgaagcacgaaggacacgtccgacttactgaattgaccctgatataggtagaccagactcaaacaacgatcagcaaaggcagagtgagaatcaataggctcaaggaactataactcacgatagtgtacggaacctgcttgcacacgatcggaatgaatccagaatacagtccagagaatccttcggttgaggccaacttggtgaatccagaaaccaagccggatgcgtactgtggttccaatgtgtgaacagaaggagaaaaaccagacaaaattcaacccgggtaagcattgagttgtgcatatgtagccaaacgagatgacaaaagaaaagcaaatcattaggagtcttcgaaccttcggattggaaaccagccgaatccttgtcgcctccaatggagtcaagaaaatgtctgcaaagaactcggagacggaagctccgaccaggtagatagttgttcggttggcaaccgcggcttcaggggaaccggcaactgtgtttcggagagttcagaattataattggaaggtaagcgaaccggatggaatatggacagagataagggaaaagataacggacgatcaaccagcctcttcttcatgtactcataaccggcaaacttgagaccacctagatgttccgacgataccaaatgggattttgataaaaccaaggtgaatacatatacaactaaaactgaaaaaaaaaacagattaagaaaataaggccacaaaccctgaataagataccctacggccgtgggtccaaatctgtagcggtacatccatcgatcagtttacggtgagatatttggtaaagacggaacagaaaaatggacaagatgcgtcatccttacccggtcattaaaccggccgctccttcagcagcaacaatctttcttcctgcagtcaacattgagtttcgcttcaaagcagggtcgatttggatccttgtcttgatgatatcgatcggggtcatcaacccatgagtgctatcagtttcaatcaatccacgataagagtcagctttttgtgaacacactatcaaggtaaaccgcgtatcagccggagcaagaacagttacccaaagaatgatggacaaacatggtgcagcaagaagcacccgccaggaagaacgtgctgtaatcctgacgggtgaaatttggtgtaagcgagctctttacggtctgtggcatgttgaatttcttgattgagacaagagatgaacgagtgtgaatgcaatcaaggagaaaacgagaagcaaaaaatcggcatcctggtttattcttataagaaacaatcattccgactgtttctgacccccggccgctcatctccgcctccgttacgtcatcaccagctttttttgttgcactcaaatccgttgtcaccatccaccacgtcccagtaatccggagggacaactgattggcttcgttactcatcgagtttatctcgtaaagtcctttcatgtgttcccacacctcattcgagagagcaatcaagcaacgaccgagcgtgctgtcgaccgtgtttcgcaagtcattgactggcaagtacatttggaggtgatactttcatgatttgtattatagataaaagacggttccccgccgaaatagccgcatccgttatatatgtaatgagaagactcagaaactggctttcaccacaaacgcacatatgacagaaacaaggagaaagaaaaggaagaaaaatagagaagacaacggaaaagaaaattggaattcatgctgcaagctgaatttcatggtgtagctttgaattcaggtccgacgtctaatgtggactgacctatgtgaactgcttgatgagttcactagtccgaactatctatcttggttcgtttgggcctccaacacataatcaagctcagttcgatatattatattatcaatcgagctgtcgtctgttgagtcatcacgtgcattttcctgattcaagtccatatcttacggtacatcgttgtgagaagctcactcgagatggacatgaatagagtctccggagcggatgtccctctagatttgtgacgggtgcaggtcttgaccaataaatgataatgcatcggaacacgggcagaaaagccggcgacagataggatggaaaactagtaagataggtatacaaattgatgtgaaaccaaaagcacaagatttgatacttgagtttaccggttattacaacatattctcctctccatcttgatgtacgacccacccggacatgaagtttcgaccctcttggagaatcttctgtaccagattcttcaccacttcaagtgtctatatcggccggaaggatcaccaagcggaccagtcgaatacatccgatacttgatcagaggtgacgctcaagaaggagtcagaatgtcggaaagaaagatggcagggcgttctcgagtagctaacaacagaagaagcgagagactctgaacaagcacctacctttcattctttcccaactgtttgagatcaatgccggcgatcttgacaaaatccaagcagaatcgaattttatattgtatgagaaagaacgagtgagctcgacggccaaagaaaaagaaacctttcatcgaccagtgatgttggccgctgcgttgcctctattcgttgtgtttcctggggcctttttaaacactagaggccacgttcctccccggaggctgggcgggagaagctttcctacggacgcctggccagcgatggaaggaatcgtgaatttgaacggaatggcgaaagtatcttagacatgggtctagttgttcagaaggtctaaagactatatagtgcttgattccctatacttcacatcataaaacaaaaatacatcgatgagccaactgtgatgatcgatctatgaacaaagcagatgatgaacggcaaggattcacaaatctaatgacctgttattcaggtcctcgactggagctatgtatctgggtttgtacaagagcatcaaacaaacatctcaatcttgttagatcacaaccatcgacagctagatacaaaaaagaatctctaacctgaagagcccgaatcttgaccgtgaattccgcaataccattcaaccgacaccattgtgtcggaacatcaacaataccgcagacgaccgagccgcatgtatagatatctcattgtttagggaacgagacgccaaacgaagagccatagaactcggagactgccaggccggtgacctttggagaaaaactgggcgagcgataataggtgattatgagatagtaaatctggctgatgtttggtgatatctttgctttgttgaagtatgcagtctagacttcgacgcaattttgatgagtatttatctatcacgagaggtgccaaacgagcagaggtcacacaaaatcttcttccgatcagttccaagtcagttcctctctttccacttctgtttctcaatctatctgctgagcatgtggatcggcgtgtactttgggtcgcagtttggacgcttgttgaggacaaggtggctgacgatagaagagagagttatgatgacatattgtggggttgatagcacccgacagtcatgatcatgggtgagctcgttcgataagggagatccagcacagtagacttatctgcaaggagaaagcctgctcaggcaaaacagcaatccacatactataagatggttgtgtaaatctcatctaatctcaagccaaggcttttttggcggcatctcgcttctgccgtcgtttctccagagcggccctgttcttctgtttctctccaaatccagaatcatgtaaagcctagaatcgtaccaaaagacagcccaagaacatgatcagatctcaagtgcatccaagcctttgcttgataaaaagactatctctcgaaatttttaccatcgcggccactcgtttagcggtggaaactttgttgagcgattcaagaactttgtcttctggaagggtgtactctgacaatgtagcgtctgaatgttattattaaaaataaaaaaaagaaagaaagagagaattaagaatatacagagaaaaaaattattattgggaaaagctggatgggacgaaacgtgaacacgtactgatcttcttctcgatcacttccaccaactctgtatctctctcagtcaccattgtgatcgccacaccaccccttcccgctcgagccgttctaccaactcgatggatataatcctctccaacccttgggcaatcccagttgacgactaaagcaacctctggaatatccaaacctctactacctacatcagtcgctatcagtactggtgccctaccagctcggaaggtcgacaacgattgtagtcgttcgtgctgagacaaatacgaatgaagcgcgacagaagggatttctagttcggtcaatagagcctggacatgagcagccgtctgacaacgagacgtaaagatgatggtcgatggaggccagggacgggtctcgacgtcttcggaaacggcagtagtcgcagacgagacgggtgggttgcgcttccgtttagatgaaatgggcttggaggaagacgttggatttgggttcgctcggataagatgcttgattgattccggggggttcaaaaggagatagtataggtatgtttctcgtatgtgggaagggatgaagagataatgttgtttcagcgtgctgacggtcgttgtactgtcgagtacacccataaagcatcacagatcgatcagtcaaaagaagaggagaagaaaaaaggtcacggacgacaaaaggtctcggcttactctgacgcgactttgtgcacaaagatcttttcttttcctttctttggttctcgttgttccaaagttcggatcgcgtctgactctgtggcagtgaacaaacaggtttgccgctcctctggtatccgagaaaagatgtaagccaaatcggcagcgaatgtcggtgtcaacatccgatcggcctcatctagcacctaaaccaaggtgaaaaaagttttcagtaatgttcagacaggctctctattcacgctttatacaatccgagccaacttgggtagggtagtacataccaatgtctgcaccttgtccaatccccactccattccactacccttcaacagatcagccagccgtccaggagtagcaactatcacatgaggcctgttcactagctcctgagcctgtgcaatcacgtccatcccaccaacaattacggaagtcttgatgtgcaacgggacaccgagaacgtggaactgctctgcgatttggaacgccagttctctgatcatcgagaaccaaaccgaagcgaacatgataaattgtgctgaacaaacaaaagaacgcacggcgtagataattcatacagtaaaagagaacgtaccgagtaggcgtaaggacgacagcccagattccatacggatcgcgagaaatccgttgaaggattggaagcgcaaatgccaacgtctttccggaacctgtttgagcaagtccaatgcaatctcgacctttgggtgtaagaatcgcgcatgaaagcttatgtcaatacttgctgaatgaggttctcaaagaggaaaagagaagagaaaatacacataccagcaaggatagcaggtatacaaccctcctggatggacgttggtcgtcggatggacattgtacccattgcagcaatcaacgcgtttgatactccgatactcgagaacgttttcttcttcttcaattcttggataatagagtctacttgactatcctgatcgttttcctgttctgccgccaaagtcttagttagactttcagccgacggtccgaaagaggatgatgaggatgcgggaaggctcgacttgactcttgacacaggcacccgagaaggaagtttaattcgagaaggcaaagccgtagtggtgatcgatggcccagattcaggttctggagagggagaaagttcaattcttgtgcgttggtgaaacgaatgttcgtccggaaagtcggcatcgtcgtccattacctctgggtcatcgtcctcagagtcagactcgtcgtccagggagtcagttgagaaaccgtcgtggttgtcgccatcaattccctgatgctttttttctgtaaacgacggctggaagttcgtgttgatggaagagtctttttgagtcttcagcttcttagatataggcgccatttgtctagccgagtggtcgtctatgtcggcaggaatgatggtccgatatgtttgctaattctatcggacaagaaagtggagtagttagattttgtaagttaggtgagtaaccacaccgctttcgagcaacgacaaacacgtgatttaaaatccgctcctgccttcttctatttgttgaggatactcatcctcatagcaccaccgtctgagaaaacatcagcaaggagcgcgtatctgaccagaagacgaacaacagagaccttttcgaacgtagtagcattcaaaataatcgttttcgcagagcattaagttatgggcgctgcgagcgcctctcgacattgggatgatgttccagaaattgcgcgggcggcggcggcgacggcagcggtagcagcagcagcagcatcaacaacagcggcagcagaagaagcagcagtagtcgtatcatcattgtcaatgaaacaacatttgataaagagagtttttctaatatatatgcagagactatccagacttgagatagcataattctcgacaaggtccacgcttcctttgtaaggacacgtttctttgtctggcttctggattctgcgcgaaaacagaatgtgtttatatacaaactgatcatgaagaggaaattgttattcactatagaatataatgcaactcacgcaacatcaatgaatccgaaccaccagatattcgtctctagaacaagcatgttgagctctgaatacactgagaccgtaagaaatctatcaagttaaacgaaccgggctaataagctataaccggtggattacatcattctagtgctaaaaccccgaacccctccactttcttaatcagatcgtatctctcttcgatcgtttttgttgttcaagtagacgactatagtcagctccatccttaccatcaccatccattcgacttgcaacatgacagtctcacctctatctgattctattaccttcaagaaatctggctttgtggcaaaaaacaggtctgtgtttttcccgtcgttctctccgaataaatcagccgtataaatacatgctgccgaactgatcttttttcggcacccaacggcttttcacataggtttctcaagtctgctatgactgagagactctgtacgttttctcaggaggaccacggcgctcggtttgtcttcttcatcgcctgtgcttagattgcatgaggtcctagatttgacacagactgtctccgcgcgttgatctctcatagagggaagtctactcctgaatatgtgcgactatacgaagagtggggaaaaggcgagatgtacgtccatcagtttctgctcgaatctaaatttcttgatcattcatattgacactcacccaatctgtccagtggtgtgatcgttcttggaaacattcccattgatcgaactgctctcgaggctgctggaaacatcgtgatcgacaagcgatcgtctttcgatcctgttgagaacatcaagcctgtcattgaggcctccaaagcccacggaagcatcatcattggtcagcttactcacggcggtcgccaggtaagaccttttgattcaacgttcgtcaacttttcaattgtgtgcgatatgcgctgaagctttcgtgctgttcgactggtcgatcgtgcgctagacctcggagaacatcaactcgcaaccgttatcggcatccgatattcaatgcccttcttttgccggcatggccttcgctgagcctaagcctgcgtcgcttgaagaaattgacgctatcgttgagggtttcgcttatggagccgaagttctttacaaagcgggggctcatggggctcagttgcacggagctcatggatagtacgtttgtgccttgaagactgtcgacgctatttttcccgttatgataagtttctgatctgtcattgtttttcttgagcgcatctacagcctcttgtctcaattcttgtccgctcggattaacaagcggactgatggtacgtttcgctgtcctttattgagtcaagttttatgcttatctcaaacggctgatgcgtttaacaaacagattatggtggatccctcgagaaccgaatgcggattatcattcgaattatcaatgagataaagcaacgaattcctgaggacaagttcattttgtccatcaagatgaacaggtgcgctgcttcataaaaagagtcggtgatgagttgacgtgaacggttggttgctgatctatcacactgatctgtgtatgctggaaatggtttacagtgccgacttcgcggacggaggacttacccctgaggaatcttctactggtgagtttcagaatctagtataattgctctgatgaattcattctgactttgctccaaatgtccatcctctcgtagttgcccagcagctggataagcttggtctagacttgatcgaagtttgttcaatctcgtcactttgtttcaattcaaagcatttacccacgttcccttccatttatataatgtttcttctgcgcactcatcagcttagcggagggtcctatgagtccatggctttcgaacacaagaaagagagcacgatcaagagggaaggatatttcattgagtttgcggaacacattcgttcgtcattcatatgtctctcttctcttgatagaagctactagatcgtcgatctggaacctgtttctgttctttcgctcctttttttttctttcacaaaataggaccccacttgacgaatgccgttttggccgttactggtggcttccgaggaaaggctgctatggagagagccgtcgctgagagcagtacggacagtgcgttccgttctgaccaattctctagcagcgtattcttcattattgaaagaaaactgatctgtctgattttggatcatatcgcgtcaattaccattgatctcgaccgaaacagtcatcggtctagctcgacctcttacggctgaaccgtgcttctgcagagacatcctttctggcgcaatatccgaggccaagcccaacaaagttgttcgtcttcactctcggcctctttcttatcttgttctcggtatcataaatttgatcacaatatgcatctgtttactattcctagccaaccgccgttcagactggaacctccatcgctcagattggagcaatcgggcatggaaagtctattcccgacctctcagatgagaaatcgtgagtcctcctttttccaccaacataaatatttttcgtgttattaaactcaaatattgtgctttactcctccttgatgtcaaaaacgtgtatcacgacaatcagagctcaagaatgtttggacgccgtcatgggcaaagctcctcctaaacaaaaagttgacggccacaacaccactgagtacgctggtcagaaggaggaatagagtttctacagtcatgctgtttcttcttctgttatattctatccttctgtttaagagtgtcttctaagtgaggtttcagactgtctgtatttccactctgtacatcgagtagactggacggtgttcgttagtctcttctcatctttcttccacttcatcaatagagctatgtcgttcttgtgatcaatcttaaaagacgccaaagggtatgctcgatatcagattaggaacattttcagcatttcatcttaacaggctaagcagcttagttgcaaatggcaacgggaaacaaaaacatatatcattacgatgttataaccagaacgagagtgatagtaagagtggtacaagtagatgaagcgaaggtatggaatattagaacccaaccactcagattctcttttcgatcaacgggattccaaggcatttactacaagcattatttttttgagttttatttaagtagacctatattcccctagaaggctgaggcggtttcgatggtagcccctctggcgctacaggaagggtagaattcgatgccgaagtagtatcggatgaggatgctgctgatgactttttcatttgagcgagttttgcttcaagagccgcgatttgggcgtcggctctgattggaatattggacgtacagcgtttaacgaatagtactcttgtcagtccgttacacaaaacgatacattcgaacagaagagaaacggaagaacgaacccttgaggagctcgttggtttttgaccatactcaacgtagtcctcctatcgtgagatccagaacctgaattcgagccgtatttaccaccgttcgatgaaaacgagcttccgtccccattttgcatcttttgtgacgtttcaaatccatcgcggttcattaaaatgaagggtaattttcagaatgttagctattagtaagacgatcttcacgatgatgatgatgatgacgatgatgataataagaggggacaagagaagaatgagaacgagagaatttacctgagaagcgaacgtcacgaccaagtttcgtcctcgaagcggcttgtcatgtagtcccgtcaaagctttcatcgcgtcctgtgcacattcattcgagtgacacagaagaagaatcaacaccacgtatagatgacgatgacatagtattgtaggtagaaacgaagccagacaaactaacctccttagtagcaaactcgacgaacgcgtaacctctcggtttccctctcatcggcccagatttatggaagagaaagtccaacttggcaatcttgccgaaccttgagaagatcttgatgagagcgaatcttgcgcaattagaaagcgaatatgtttcaaaggtttcattcaacgagttcgataaggcaattgaaagggaaagcagaaggtgcgatagtgttagggccgacggtatacatcaataaggagagtagagagcatccataaaagcaaaaacaacctactcatccacagtaaactggagattgccgacatacagcctcggcgttgcgttcttagatatctccgaggtagccatagttctatgctgggatttcttgtggccagagaacaactggtgagtgagtgttggtggagaacacggtcagcgtaaaattcatatttactttgaagcccaaccgatgacgctctctcgcttatctcctataaagcaaccggccaacggactcgacgacatcaatccaccaccgtacttatcacagagaacatcagtatcgtacgtgcacaactaggatcactccagagggtgaacaatggctttcttgatcccactccttgcgccttcaatagcagaggcgtcggccaacttgggtgagtttctcttatggcttatggatctataccgtgctgtctgagtcacacactagacgtcctgttgaccaacccgttatgatctttatgttcatcaaacgatgcacaccacagcaatcggtatatccaatgcagttcagggaacttcatcctcggtgtcgattcaaatcgggaagaaagtgtttacgaataacaaagggttcaacctatctggcttaccatacgaacttcgagaaaagatcctgctcatggcactggatgaaagcaagaggtttgttgatctggtttgacaaaccgtcttcatcttcatcttagactgtctgatcaagctgacatcttccatcctcttcgaagtcttgttgtacctatactgaagctgacgaatccgtatggagtgacacctcaacaatacgccgcgctggaaaagcgatcacctttaaatcgctcaaacccaaactaccgatcggtcatgaacgagtatagatcggccaatggatatccactctcgagttggcgatggttgagagtttgtagagaatggtgggctctgttgaggagggaattatggaagagatgtacgatcgatggatggaatccgttagtgacgcttttcttcttctttctgacgttgctcttccagagagtgtgcggataaagcagtggactgaaatagacgagaaacactgtcgtttatagatatcaagtgtttctacgtctgctggaaagcgacgactttcatgccgctccatttatcagaacactcagtctgctagatggcttttcttccccttcggacctttgtacgtgaactgttctagccaactgtgtgcgcacgagctatcactgatggatttcttgatgatcatgccagatacaatattgacatcaccaaaaatgaaacacttggagacgctcaacattctcccgatctatctagagagctctgcgtttaatccttatttgcctccgcctcgcccgttcccattcggtgttcatctgatacctgtcggaacgatccgatctgtatctatcggtctaccactcgatcaatgcacaaatcagaccaccagacgtcatctttcgtctctccaacttgattttctgggggtcaccctaaaccgacctagcgagcaactgtttgcagagcttgccgatctcgtcggtaagaccgtccagacaatctcgataagatacttgccggacctcacggtaccgctgagagcctttgtggacccgggggtgttaactggcccgtcgataaggtcgtttgagagggtggtgatcactttgcccaaaatcacttcgtttggtagaataccttatcagaaccagccggaagctaacgaattgggagagagagtggcgttctcccaacgattgatcgatctattggatatggacaacgaggggccaacggtcagggtttctggagcgggcgacaggtttgaagacaaaggggacatgaatagggacgagcaactcgaaagtagaggaggtttaagaaaccggacggtcgtctatctaggaagaagccacggagacgaagaggagcatggtctgtcgacaggccgacgaatctggccgttgaccgatgagtttgcgtttgagcccatcgagaaacgacccatgatggacaagaacaagtcgggatcgaggctaagtaacggccaatgcgagggcgggaatgacgagaaagacgacaaaccggacaatacggttgagtcttgggaacgccagactgatctccggttgttcggtgggttgattgggattcgaatggagtccaagaagcgatgatgtgtacgcgcgttgttttacatgccgttatctgctctgtatcctttgtatcgtctacatgttctgtatgttctatatattgtatcttacccaaacgtcctatcacatctacatgtatcatttatcctttgaattcatgagccgatacatctcatcccaggcgggatgtttctcaactgcgctagtcactcggctctgaccggcccggggtttatcttctgttggtagtgctcgaccggacttccttcttacctgcttaccttcatcccatcaacgacctttgtttgcttgcttgcctttcgctcgttatatctctggtctagtgttcgtgtgtaggacaacgatcaagattgatacactgaaggaaactggagttttcgtccctcggtgtcatctctggcacgatgaatccgacggcggtctgttctccgacatcaactccttcctcgcctagattgcattcatcacattcttcaccacagacaacagcgattgcagcatcaacaacagcaggaggcttctatatgaagtctccctcctatccttctactccagctcctcattatcggacaagtattcattcgtctcacttcccgcctcagacgcctccgcctggttatactcaccctccacctccaccttcgcactcacacccgtctctgtcgaatcgtcagcagggacaacgccatgggcattcgcgatcgaactccaattcaagcatctaccattcatatcagtatcaacataaccaatcgcatccctatccgtttccgtcgacatcgatggtagatcctgtaagccctggcggcttgacaggtttaggtttcgattcggccaatcctgataggcaggttgtccatctagataggctcgatgtatcagaactctcgagagccctgcggagggcgagagccgttatgggatatcaacagcttgacggagacgaagaggatatcgaagagggagtagaaggagagagggaagaaagtctacccagttatagatccagaggcaggggtggtacgtctccgatgttttcgatctctttccttctactaactctaatttggagtgtatctgacctcaccctcatcatctgcttttgtctatgaaatttcctctccggcgcagtgtacggctcgtctagatcgacccttcttacttcgttctccactggtctccctcatcctcttccttcctcctcattcccatccgactctacttatcgtcctaaccctaaccacatcagttcaaccagcttccaatctggtccttcccgacgagtatcatgtcttccctcagctcaaaccggtcccttcttcacagaaggaactagcccaattctctgtccactagaagatgcccaccgatcgggcgagatcgatctcggggacggagaccgggatgcggaggaggacgatgttagagtcagtgggtcatgggtcatctggggacttggagtcgggctgggcataggttcgattggatgggcttatgtctctcatggttgaaagtgaaactccaggtcgagtccggtcctgaatatcgagccaagctcgagcggggtaacaggatggtgtatctatcctttcttcattcttttctttcccataggtggagcttccatatatgtttggtatttgtatccgtactgttgtaggtttgtagcattatgataagggacatttgcgaggataacaacaacagagttcctcttcggtacataacttgagggacgaggctacttgaaactctaaggagaataatagatctagacggactatacagacaagtggcttggaaaggaaactctaacgagaaacataggtctcaaaaggcatgaaccaacccaaacggtaagagacagataagtaaaggaatgagaggaacgagagaaaactgttaccaatccagcagagtcttccctggatctctcctcaaattacctcctcctcttagatgttcaggaaggacttgacctctcaatatcgtcttttccaccacgtccacacatgccttcggggtcactctgccgtagtaaaggatggaacccgatgggaaacaaatctgttgccggacaataagaagaggatcaagaggtcgtcgtcgtttgatgagatatagttgggcgaacaaatggaaaacaagcacaatgggaaaggaaaaaaagaggacgaacgatcatgacaccggcgtatcggtgtccacccaaatggctgattttgaagacaccgacttccttacttccttccccatgcgatctagtatcagaactagctccagctgcttttctcaacaggtccttcaccgcctgatctcctccctcgatcgactcgagccgttcggagcgtgggaggtcgtgtaaagattcaccggtggtgtccgctgtgtagccgtgtatggagagagtggaggagatcacctgttcaagtaagtttgccgcgatatgacatttcttatcccttgtcttgtgggagcctatggtgggtgtgtatgattgatttgatgcaattcagtcaagtggtcataagcgcgcagggcgagaagaaaaggacgaacaaagcagaacgacagctctgtacggcaagacccaactctccattccatctttcaccgtgtcctgatcagtactagcaccagccaacccgacggtgggactcaaaatccgatcgtagagtctctgagcgccaggcttgttcacattcacgttagaaacgactttgaaatctggaaagaccaagacgctcgtcttgtttgtgtcgtcttcttctgtcgggtcgtcaaatggctcgacactagaagcaaggacggatagtttaccggattcagaggtttggtacactccggggatctcggttacagcaggtgatggagaagatgagggaggcggtctggtccgggtaacagattctaaatagaatgctaacgagtcctgatctgatgagcttttaaggtaagaatgacaataaaacgacataaagggatagcgtaagattcaaccagatccggacaaatgaaggaaagtaaggattaaaaaaaaaaacaaaaaaaacgcacatatctcgaggccaatccgatttcgagctggaaatcaatgccaaccgatgcatcggttctgaacaagattttagccattctacctacctctctctttcctctgctctcgcgtttgaacaaagaacgatcactcactcgtggaacccaacatctcgctgtcgtaatccactccgaactttgccgggaaaccgtcgccttcctcctcttctccttcctgcccgccgactctaatggcctgtccgtcgactccctctccaaatccggtatcgcacccatcacactcgtcagggagagagactggaacctgtgctttcaactcgttcacccatttctcggctggaagtgtaggacccgtggccggagctctgtcagccgatgagctgacaaatgattttagcctattaagcatgatgtatccgtgtggttgtatgagtgggagagatgtgactgatggatccgacaagttgggtttgaaggagaaaagaacgaagagatacgattattaaccgtcctcgttgaatgatgttcactttctcacgttagcggcgcggtcacttaattacgccgcgtcattcaatcgggccggtcccgatttgcttgcttatagttgccacatgtgttacagatagaaaagcacatgctgattcataaacaggtagagttggatgataaacaggaaattagagtaagcaaaggaaagagagaagcatgaacggagagggagagattcagattggaatatatcgagtgaaacaagtggagtgacatgactgagtgatgtgggagaagatggaaaagaggaaagaaaatgcaagcatgtctaacagagcgactttatatacacttgaattctaatgataaagtatctacagaggaaaggcagccttaaagctcagaaacctcgaaagtgcgctctctcctgtttttctcctcggtctctttcaaccgcaacctttcgacttcttcctctgcagctcggagggctgcgttcctctttttcttgtcgagttctgatggtcaaagggagaaggaatcgttgtcagacaagatagaaatcccgttcaaaaaggataacgaaaactcaccctggaagaagagagcaacattggaagaaacaacgttgtcgtcgtcctgctcgtcctctgggatttcgttcaacttctcctgaagcattctagcgtaagtctcactagaaatttcgaaatagccgccagtgcagagagggaaagcaggtagaatcagcaaactagcacggtcgactaatataattgaaaaaaagaaagaaagacacaaagctctcacctaagctcctccatcttcgcagctcgatccttctctgggtcgtaagccaaatgtcttttcaaaaccatcgtctcccacaagctcaagtgtcgtttgtgaacggcgattccatggtattctccagccttaccagcccggacgaacgaccagtatcgctcttgctctctgtaaattcagacatgcgcgcgtcagagcaaaggtcagtaagtgagggtagaagagaaaggattttttagagaccgagaaaggcacggaccgaagatcaagaccggtggtatcaggaatgaaaactacagtgaggacaaaaccgagaagaccgaaccaggtgacgacccagaactttgttctcacatcggccaactgagtagagtcaaatgtttatacatgttgtgaaaacaaggagaagagtaagcgtttcctcttgagtaagcccatcaaagtattgaaagatatcgacgaacgtagttgtacaagatcgcgggggccaaagctcccaactttccagcggcagcgctcagtccgtggcaggtagcccgaatagaagtcgggtagacctcggcagcaagcaagaaagtggtagagttcggaccaaactggttgaagaacgaagaaagatagtagattgcttgaagaccgtgaatgttttctggcttgatgagatcggtgtacatggcagcggctacaaggataaggataaagtccatgatgaaaccaacgctctgcattcggactcgaccgtacatctacggaggtgggataagaaacgaaaagagtcaggatgttgtggttagaaaagaacaactccggaagagaggccgcaccttgtggtcgatcaagaaggcggcaaggtagtaaccagcaagagaaacaccaatgttgatcaagttgtacaaccaaccatccatcacggtcgattttccaggcaaaagaacggagatgaacgtcctttgatacaatagaacaagttgggtatcagactaggatctggttcaaaccaacagaaaagaaagatggactaacgactggaagagcttgttaccgtagaagaagaaatcgttggcaaaccaggttccacacgttccgatcatccttcctccaaagtgacccatggcaagtttcaaactagtggcatcgtaaccggtaaccgcgccctgtttcttcttcttgttctgaagctttcggtcgacggaatagtctccatggtagaatcggtggtaggctagccagagggtcatgacaccgacgacagcgaactggactcggaaggtccattggacagagagggtactgtaaggtgggtttcctgatccatggtggaagatgatcaaaaggacgctaaagaaggaggagaaggtcagtatattatgccttcttgtggttgagagaaacatgtggatagcgacggacatcaagatgacttggttgaagagctgaccccatccttgcactaaagaggccgagagcatagtcaagaaggaagcgacgttcagtccaggcgctcatgagggcacacggaatatgaggtcaaagtcaatggaagacatactcaggaaggcaagtccgacgtttcgtcctcggtgaagtcggtcatcagtaagggcttcggcagagactccgctcttagcttccaaagcagaagtcgacgtcatcgggtattctcctcccactccgattccgtacacaaacagacaccatccgtagcaaatctgtagtgaggaagaagacagtagatgaccaaaaaacaaaaaaaaacaaaaaaaaaacacaagcggttaagtgctgagaagatataaaggtaggggcagaggcaaaaagagaaaagaactgacaacccagccgttcaggtcaacaccccaactggcggtcaacatgaccaaaccgagggtcatgatgagagcgtcctggacgagaccccatcttcttccgacccaatcaccttcaaacccgacgaggatctgaccgcagatgataccgaggatctcaaggtactcgatggcattgatccagcctttgctacaaaccttgtgattggagaaacattgcggccaaactgcggcgtacaatggcttgaggtttccgatggagaacaacgttgctccctgatgatatgatgttgtgtattaaaagaatatacatgcactcaacgttcattagtccgaacgtttcgactatgaacgtgggggtttaaaaaaaacctcaaaggggaaggcaggatgaagacgatgaagcgatgacgaacctcggtaaagagacccattccagtgacgacatagttcgagaagtatgccgagaagggcgacaaaggatcctgtaaacataaagggatgattcatccgtgtgtgtatgcaagtgtatcgcagcatgtggattggcaggttgcaggacagaacatgttgagttgtgagcggagaaataaaaaggaaacttttaatgatcggagattccacaccagccggatgaggacgcggaaggacgaaccttcttgaacatgccaccgatgacagaaagctctcgtttagcctcctcagtcgactgtctgaaagcaaactgaactcgacctatcgaatgaatcgaacaaatggcatttgtggtcaacggtcaagacttctctagcctctctgaaaggaagggaagaattcaaagtaacatgaaacacaacttaccggatctgggcaaatcagcccagtaagttccgttgtgataactatccgctgggaagaactcttcaaccaacaattcgtgaacacccataggagtcttgacacccgaaggttgccagtcctgttcttgaggcttccccttctccttcaatgttccatcgttggatgagtcggacgacgacgaggtcgagttgttgataggtcgacccttttcgtctgttatcggagcgccaagtgagttgtgttcgaccgagaaaagcgggtaaccttgcgcgttcccaacgggacctcctgagcgaggcatttcttttttgatgatgagagaaagacgaggagagaaaacgagactaaggagagagttgaaagtagaaggtgttggaccggaaaggaagtcaagaacgggaaatcttatgctgtttcgttttggggtaaaaaaatattgaatgataaaaaatgatgtaaaataataaaatttaaataagcccaaaaagatcttccggaaagatcgtcaccggctctccgagccgatcaggtactagacggtggagtgttgtttttgtccgcagctggtctatttttataccctgcacgcgacctggttcttatagtggcacacacgttcgtgggagaaggagagcggagtatttgatatataagcgattcacatatgtgacacactgcgatttacgtatctatctaagtgttgtcttgctcttgtcggtgtctctgtcttggactgtttgtttacacatctctgcttgcgtgcatgtgtatattctcctctgaatagacgatgtaatggactcatcgtttgtacttttgtacagctcgtacatacactcacacgactcactcttgtgatgccatttttcatatcagatccaatctactacagcccgagctgcgccctcgcctctctcagcacggcatctattgcctgctccacatccgccagcccagagccctcatcatcgcccggttggttcttattgttgacggcctgagcgactcccttttggacaagggcccaagcctctggctcggtgtgagcctcgacccaacggacatactctccttcactccatccgtgttgctggtgaggtaaagaaagtggcgaccgaacaagaatatgatgtgatactacgagcgcagggagatgaaccgtcctcgccgggtcactcaacaggcaagtctccaagaataagaatggtcggaaagctcgcaagcaaaggtacgcctctccgatatcttgaatcttgagcgcgttccttcggtcgttcccgctggcggccaacaggaaggtaccgagcgagaactcgagctctgtcatgtcgctcgtcaaccggagctttccgctctcacccaaaggagaaacgatcgatgcatgaaggacgaacgtctggatgatgtatcgaaccaattcgaccgtccattccttcttcagaggaccgacattgtaaggcgcaagaattcttgtccggacgaatgacattcgttcttgaaggtctttcatgtatggactgctcgctccgcccatcgacatcatcgaaccatcggcttccttcgcgccatcagcatagtccacccggtgaagtcttcccagcgtattgctgaactctcgacggatcgcacccagcaagtcggccgtatgtttcttgtacagtttctcgagttcctgccaatgagtgattgaatcaatcgtaagcttgggcaaaaaaacctcatatcgcatgcttggcatcatatcaaatataaattagaaaaaaaaaagaggaaacgaaacgaaccaggattgagggtcgaagcaaattcatcacgcgttcattgtactccccctcgatctttcctacagcggaatggcaatgataaagcgcgctagtcagctgcgcgttcaacacctgagcactagtctccgaggtcccggtcatcgtgtaagccgcgttgtccgtgatcaacagattgtccatcctcgatcggaatccaccgagagcaactccgacgttccgggcgacactcctcaacaacaacggatcaaactttgcagaatctaactcgtttgttatcacccgagctattgctaggccctcattcgcaccaggtggcgatcgaatgccaccggcgaacgcgttggacaccacttcgttcacccggcccgtcgaccgcgttagatattggttttcaaacgtcgagagcgatcggagtaataacaccgtttctgggctaaaagtatatatgtgttagacgaagtttcttctttttctcaacgcagaggacaagatatggcaaggaagaaaacccttacctttgttggttttgggtatagaccgtatcggtgaggacagaaatttttgcgaaaaactgatggaacaatcgaagtagtcggggataacctgcgctcaacgtttgctggatgaatccagaacctatccggtttcaatgagaagttaaagcccagtgatcaactttcatcgcgcaatcttttcgacgacaattctttcagtgaggatatcatacttcgagctgcttctttactttgagtttccagcgtacgggctaatgtcgtccagaatgtataactcggtttgttgtccaacacctacgatagatcaagaactgtttttttagaacttttcccacaacatatccactatacaaatcgaattcttatgaagacttcagaactaaccttcatagcttcatcgaggaaagcaactccagaggccggatcctttttgaccttcaacaccttttctaagatatatacctgactcaaagaagacaggtaagaacagagacagaccgaaagatcaacatccggtcgctcaggtttacaaactttacaatccagaggtatatgaaacagaattcaccttgatacaacactcaaccatgtcctcaatcaaattactcattcgggcccacagagcattcgcccaaagctgggcattttgcggggtcggctcatttttcccactcgcatttccagaagaccgatatttgtatccagacgtgtcagacggggcgacttctggtttaaagagagggaacaaaatgaagagtaagaaaccttgtcggcgaggatgtcgcgccaagaatcggatgctcgcctttgagaccggcttccttggccaattgagaaggatcaaacgtctttttaatccgagactcgacagcttcagtcaggtccccaagcaaagaagacacaagtgatggcaaaagcccaagattgaatgctgtttgaagagccgatgccaagatcggttggttctatcatgatcaattggagtcgatcgaaatgagaatgatgtctactgatgagcatagagctcaccgcccatgatcgcaagttagatataatcatcaggagtacgaactaattttgaaagtcctttaaacacttgattctccatctcactgacgagtgtttccttggaaatttgaagaacaggaaggtatctggtgacctggttgatggcagtaagtggaatcggtcgctcttccgttgaagcggtttcctgttcttccgccgaaggcttcaaaggatatgccagcagggattctgtacgttcccccaaccatcaaatgttctatcagcttcctgccagcttgcagtcaagcaacacagttgtcgaatatggactgacccatctctgctatactgattgcagccttgttcatcgctcgttctttccttccttctccctcagccttttcctcctcgtcagccgtgctgatcatctctccgatctgtagttccaaccgtcgggccacaaggataaacctatgtgtccgtcggaggacgtcttgagccttctgaagatgtgataaccgagtaacagacgtctggagcgtttgatgaggaactcgaatcttgagccgtagtcgctcgagtgaaagcgatacttgagtcagaccgtgtcgaacttgggtgagtgaagtcgaaaggtgggtcgttgtagatgagagcgagaggagggaggtatgatgcgtcgtgatctataaccagaagagagagatcagccacctaaacccagtaaggaaggtcagaagaacgagtctgacgcctcgaaagaaaaatactaacctctgctttcagctgcctcgtcacttcatcaattccaaagttcaacctggccagcgtgagcgagatatcaactttggactctcgttctcgctctagcccagacacgtttgaacctcttctacttgtcggtctgaaatctgagcccactgctggagccaaagccgaagtcgaaggcgtcggatcagaaggatggtaagactctccagcgagaatgctagctgagagttgatgaggagagaaagccggatgaagatagacctggtggtctgatcagaaaataatggatgcccaagatgaagcttgatgtcagccacatttaaattgagtattctaagcgagacaggccgactacgatctcacccaagtatggttcggacgacattgtggtcaatcgtgcaagagctgttgatggacagaacgatatttagagatggaggagcgagtgaagggatagaccgagagccgaacgccacagaaccaacccggaagctgtgcaggctcctattcgtcctgctctctgcatgataagatcatcttggctttgtttctctcatcaattgtctgcttcttcctctcgttcaaaccggccaatgaacatgatacctatataggaattcaacttagacagtggaccagagtgatgtacagcgaggcatatataggaagagaaactggacaattcagcgaatgggtatctagcgttttaactgtgttctcatagccagatgagcatgtcacttgttctacgagcgcatagggtatatataatgtcttcggtttctggtacaaggagataatgaaatgaagagtttcactttgaaagtaaaaagatagagggctgtgcgctcaaggcaatgatgatgtatattgcttcatgagtctttctagtctgttaaacacgacgcgtgtgacataagatggaagaactatcagtcgataacaccaaaaccttgataagaatgaaagagaaaaaacctgtttttctcgtatgtgacatgatctagttctcgtctcaatgaactaagccaaggaatgcaagaaagaggaaacatgcaggcattcgatattaacttttctagtcaaaaagaccaacgtaagaagtaaaatggcttacgcgttttctaaccgaagcgcgtttcgatcggctttagcaatttgaagatctcgtttcatcgccacgttggattctgcgcctggcaaattcatgtcagaatactagatagtgcacagttcggaggaaatccaggtatcagatttaataagacaatataggcggttcaagatgcgattatgtataattggacgcaccatttgttcgagctcctcgttaaaagcctgcataaatacgtcccacaaggtgcaaattagacaaacataaccagccatcgaaaagaacaaaaaacctcggtctttaacttacgtcatacaatgttgcgttctcactcttgatatcaacaagctcaaggccctgcctttcgattaaactgatagcttcctgatgtgtgactcgtagctcctccagctctcgcaaaagcttgagagtgttcgacgagaccggcgtctcagtgttctagtgaggcatcaatgttaagagttagtaagtgtttgttgatactaaaacaatgtcaaagacatcagaataacgagtcacgaactttgatagaaccaacacgcgatgaactcggtgttgattgatttatagctcttgaagacccgccatcaccggtctccaaaggtctcaatgctgatctcggactgtcttctccaaaatgtctcggtttcttgtctaaagaaggggatagactttccattgattttgcgcgatctcgcttgaggacggttgatggcgaaggagaatctgcctcgtcatcttcatgcttaaccgctgttgatttggctgaaggaagcggtcgtctgggtcccattggacgacgggaatctgaagtcgatagcgttcggccgaccgagggggaaagaacttgttgttctgatgtaggggacgccatcagatcaatcctgttagaagctttggaaggcgaaagagattgagtaggaccaaatccattcagaggttcgaatcctgatgaagaaggaatttggggagtcttgttccgaacacatagcggaccagccgtagcgaaagaaggggtcgatggaggtttaggccgtgatgaacttcgtgtcgaaatggaacctcctcgatctgatgatagagagtcttttagacatcacaaggaaaactcccgagccaagttagcaacagcaatggaggcagagtcaaagggataagcgtaccgaaactgagacggttgacttcgacaggttgtttgacctcgacctgttctactttctgttccactgcttctgaagagatcacttcctcaaccatgttctgcccattcttctttgccaactccaatcgttctgtcagctcgacctcggaaccatccagcagttcatcagttggaactggttttcgagcactatatggactggttgatcctccccgggatcctatacctggactcttcgaacgaggactttttgaagtcggacttctcggtgtcggggatttctctctagggtgatagtcgctgtaagtcgtcatggaagacattgtcgatcttgtcgttgatctggtcgctgtactattcatagtagaagatttagaaccgacagatcgagaatgtcggtgcgagactgatcctttggaaccaacagagccagaaccgaacagatttctggagatgacatccaggcccaggattggtcgccgactgacagcgtgagaagacggagtattaggagcggaacgaggatccagtcgaggccgataaatatcgtgttgatggatttttttgatgatattagacattacagttatcgtcggtgtgatctcttcctccgcgtctagcccagatatcttattcgaaaccctagcaagtcctccgacgagaggttgaattctgaagaaaagtgacggggctcgctcatcatccgtaagcagcggggtcgatcttccggattcgtccacctgaatgactactttcgacttggccatatcctgctcccattcatttctcctccaaacgttataaaatccttttgcacactctcctgcactgtttccttcacttgcaccgatgagtctctcttcctcagtgctcgcaaacgccaaacttttcccgcctcgagcacggatgagcgtctgggcggcccaaacattctggatgaaatggtatctgtcagaggctatcgaggctggatcgatcgaataggggagaggaggatgaacgacagtgtaggatcggaagggacggttggaccaacgatcggactgatcgacaggcggatatggtaggtagacagagaaatctatcagattgaggaagcagagaggaaagagttcaatatcgtttttttaggctgaaggtctgtccttcagattaccgaaagctgacgagaaagacgaacctcctccacctgaatcagtgacgacgagatccaacaatcctaccaaacctttcgaactcatcttccccgttgacccgtctgaactatctcccgaccttctgttcgacgacattgacattgctgacgaagagttcgacgagcccgcttgagaaggcgcgacactgcctctccagagtcgggctacgtcgtccaacccggtaagttttcgcccggacgcgcctgcggatggtcgcttggcaatcaagatacgatctgagaacagataaagtgtcgaatgaagggtagcgatgtttccaagaggtgaagccggagaagcgtgggaatttgtgatgaattccggtgggagatcttcgacatctactgaggctagatagtctcgattattgttgatcaactcggcctgtatgagatacggaccatgagataaacaaaccccgtcaattgtaagtaacaaacttggttgcaatgaggatttacaacgtcaaaggaagaactgatacataccgggaatccatccacgctcttcgacaaagccatcatgaccatcatccgcttcgtatgcggatctttctcacatgtggcaacggcagtagcgatatcggtcgcttccaccagtttctgcctctgaggatccgacagagacatgtgtttgatcatcactatgttttttttttttgcaagcataaacgaccaaaatgattattagtcaagatataaattcgacggaacactgtgaacacggttcttgacatacgttgccaaatcatggtgtaacgaggtatgcgctgcacgggctccatcagtaattccctcaagccgacattcgagattccctccgtcttgtattttgaagcctgacggcgcgacatgcatttcaaaacaaaaaaagtagatcagacttgaaagcttaccaagtgaaagcacacgtgaaaacgtatgagtcgaacagacagcgaacgtacagaaacgaaatcggcaaactgttttcgtttgacgatcatgtctgcaaacatagtctgcgcatcttcacatttgtcataatacgtcttgtaacagtcgaacgcgcgaagatccttgaactgatgagacatgcgcgagaccaaagggaaccaccgtcaagaacgacattaaaaaacccgaattgttaggaagcacagtttgagaagaggagaatatatgacgaacatgttttaaggctacatccccgataccccattcgtcttcagtgtcgaccttatactccgtactatgttgcccctgcccgatgacagtctctagatctgccaagaaagcctcattcactttgataataacatcaatgtttccgaacagctgattcgcgttatataccggaatgattgccgtcgagggatctttagaaaacaaccgaagcgggtcggcgtaagtctgtttgagcgcgcgaagtcggcggacatatgtctgttcagtcgacagcagttcggacaagagcggaggaagcttggaaagattcggaagcgaaggagatgtctaggaagcgtagggtgatatatgagaagcatgatcagggagtcaaaaccaatccttatctacataacacgatatggatgttgcttgtatctggagagcacaacttaccgacatgatgtccacgctcccactcctctccattcttcctggaacattcagatgtgacctctctgtttctgatgaacttcgattattcgttggcggagccgacgatgaagaaagtgggacggaaggaacagcaggatagggtatagcatgtagttgatctcccaacgtcgacaagaacaagtttgtctctattggcgacagagcgaccgaggaagaagatgacccgtatgagcatgatcccaggacaaacagtgcctaactggagaccaaagagcagcagtaattggaaaagaaacacaaggacgaaccatcactctctcttccatcctccagaacgatatcacagaagaaagctcttttcaacagccttcccgaacccccactacttcctccagaatgtccgagcattgaactcgttttgaggcctcctggggttcctccttctccaccagctgactgaggtcttcgcccagatgccaagggtttcacaggcgatgacccagtcggatgagtagatacagagccagaaacacggccagatctggagtccgaagcatgtgtctgttcggcaggaaggccaggaagagatttatgatagatcggagaggcgggctgggtagttgccgcggcaaaaggcgaatgctgacggtgttgttgtgattgatgaggctgacgaggatgatctacagtgtcaggatatggagatgaagtatgcatcttgattcaagaagaataccgtctgggtctttcagaacaagaatagcagaaggtcgtttactggatgttgtggatgtgactgagaaaaggtgaacgatggaaaaacaatggaaattccggttagaaaactctccaaattcattaggccgaaattctgatgctttcgactgggatcagtacatgtttcgtcacattcttaaacagatcttcattcatagcatcacagagggtgtaggaaaggaaagagcaaacgagacaagatatatggcagcatgttcaaaaaagaaaaacatatcagcgtcgaagccattaatcccactcgtcgtcactctcttcttcttcatcgctatcacccatgtttccctttctcgtactcaacgccgcagccaacgcgcttgcaagatcaccacctccagcagaattgtcctcaggggcagcgaccgagatcgctcctgcgcctacacctgctcctgctcccaccgccgctgctatggccggtgatgccgaagtaggagcgggaggaggcggtgctctggccggcggaagcggcggtgcacctcctcctcctgcgtcttcccttgcagaccctccgctctttgatttgaggttttgtattcctactccttggatggaagccaacagatttgctcttggctctgtgacttcagggagaccaagactggtcgtgggaaccggtggcgcagacccagacgatggtggcggcggaggaggcggtggaacgggtcctcgagagggtaatgaaggtgccatcggaggtggagcagacctactaggcgggggcggaggttgttgttggtatggtgctgacacaggagcgggaggaggaggaggaggaggaagtgtggacgtcggtcgggatggcatcggaggtgtagacggggtatgagaagccgctaccgtggtcatcgtccgagaaggagggggtggaggggcttttcttttggaagtgggtgccggtgggggtgctcgtttttttggttctggcttgaatggctatattcaccaaacaataatccgatgttaacgacgaatatgatcgacgacttagttgaaacatgacattcactaacaggtggacctccactcttctgaacgaaatctcgaatgaaaccttcattctccatgatttgtttctgactgattccctgactgcctagctgatcaagcaatgcctgccaagatggatcaacacctgacgaggaaaatcctgattcggaggaataacccatatgtgcgacgtgcttgaacgatccttccgactgtagcgcgcgacacgaagaacagtttaaaaaatttggtatcagagtagggagaaactcgtgagatatatagaaaaggacaacatacaggaccagagattaacgacttgtcgatcttgcctcctttcttcttcttgacggatccagtagatgacgcaccgctcggcgcctttgtctttttcttgtctttgtctacacggattggtctgatgagtacgttccgatgtgtagagatcagataaaaaagggagtctatcaaaacacgtacaatactttccacgagcgtgaacttttttgtacatctcacccgcctcaccctcatccgcaaacacgaacgcgacgtttgtgtcctgatatacaacaagaacctcgatcacgtcagctgaaaggctcgagatgtagacaagatgtcgaaagaagagaaagaggagagagaaacaacaagacacatacttcgctaggaaaggtatgaaagaatcctcggtcttggttgtatgaccacgtagatgacgacggcagttcgtgttcccagatcacgcctctcgtacccttgatgggattcccgccgaaacaagagacacgatgtctttagtacataatgcattctcctatgattaacatgaaagaatgaagcaattcggcccgctcaccaagagatcaacgaccttccaccagacacctcctctttgcttgtcgaacactaaacaggctcccccttggacgccagaatagacccaatcgttcccactttgatagaatattctgacgacggtagcagtcaggatcttgtttcccgacgggattgctttcttgatcaacgccttatcctcggctaggagtgaagatgtggatggcattcttgagctctgtcgtttggttcaccgagtgatggcttgaatgagagacacactcgcagctcattgtctcaccgatcacagatggaagacacgaggcgatgacgggacgagagttcgctcgccttacctaagcaaattccttagcggccgttctcccactcctttctctactcatacctgccccggctctctctttcttcaggtggatctgcgccttggatctcttgaagaagaggccatgtgcatcgtttgtgtcctctccattgtttgttttcgattgttctcacggctttgcgagcttcgccgaattattcgtgaagagagatctgaaagaaacgagacgaaacgaaaagatggatataaccttctgatattgatatcatatgtaagaaaaaaagccaaagaaacaaaacaaaatcacatgaacaacaacaggcaaggatggaaagataaatataagaagggaacatcctgaaagaggtgaagacatcaagataaaggagaaagaaggttctcttttgtgaaatgttcttgggttccttcaaagcaaaagatcctcgaacggatccttctttgtcacaccctgagtcccagcgttcgatcctgtcccaggagaagccccgggagagactccaaccccatactgtccgttagccagtccattcgaactccagaaaccactcgatccaccgggcccaatgttcaaactgattcctccacctcctcctcctccgttacccgacgagaattgactgctgcctcctgccggggctgacgacatgccccaacccatctgtgatgtcccttgagcttgagactgagattgagctgtctgttggtatgattgctgtggtggcggcggcggctgctgctgctgctgctgctgttggtaaggatttcgataaggttgggcatatagcgaactcaggtctgcccctgccaaaaattttgagttgacagggcccgaagtcgagcccccaaggttcaaactgggcgctgccggagcggaaaacaagtcgagaggaagtccagagaacgagggtgggggtgaaggtgctgcagttgatgtggctacagatgctggtgatgtcgatgctaatgctgcggatgaagagacaaacgactcggaagggggatcatcggcaaatgcgtcaaacgagattagagagggttccggagcgggtggcgcagtgaatgttctgtgtttcaagttaagcatcaaaagggatcttctgtcactatccgtcgagagaacaataatggaggaatagggaagctgataaacgaacgagaccgcaatatttcttcctttggaccaatcgcccttcctgcacgcctcgtatctttcgataaccccgttgatgagatcgttgattaaaagtagccgatctgttcatcattcggacatgaaaacgagtgggggtttgccggggttagtccgaaatggcgtcttgaatccatcaaagatgatcaaggaaagagagagaaaaaaagtagatggagtattcagtcgactcacccatcgaatccggctcatcctcgctcacttcgccaatccacttttgaatctttggcctagcctgcatacacacgagcgcgacctgctgataagcgtcaccttcgagtccgattcgctcgttctcattggcgctgttgagcatatcgttcaacaggatcgcctttgcctggactttgtcaagctccttggcagtctgcgatcggtagtctggtgctttctccggctcctaatcatttgtttgttttcgtttataaaccgatcaagccaagacatcaggatgagggttcagaagggcatgtttctttgggacaagtgattcagatcaaggaaaacggtcacgtacgaagcctgagagatccttcatcagttcttgcgctgccaacaaatctttcggtttccctcgacgaataagctcttgtaatttctgctcgacatcaaaaagtgttccgaaaagatcacatgagtacgaatcacctatcaactcaagtaaagcaagcatgctctcacagccgatttcatttgacgatcctcctcttcgagctcttgaggtgatttaagattctgttggtacaagtttgatccaacagatcccaaagagagtcttcgttagctaaatcatgaaaacacaatctcttgggtgaacccgacaaacctctgtttcttgagacgtgatgctggtagagtttgctcgagagtctttgaaccgataacctggtgtcaccgacagatatgatagttcatcaagatcagctgattagtcgcgaagaagataacacaaatatccgtgttggcagaatcttacccttatagcttagcaagcgatgcatatctcggatgtggactaggtcctccttccacttggcggtcacacaaatggtattcttccattcatgaatcaactaagccacgtagaacaatcgactcagtgttcttcagcaaagctcaacgatctctatcaagatgatcctgataaggaagaatggaaggagatatataagaatttgaagaacatacctccaacgtcttttgcatggtatacggcggatacactggcggtcgttccggaaactttcgaacaagctcgttgaggaattctttagtacctacttgaagttgaaacgggtatccgcagttcttgaccaaagtgtcgagtaactgtgatgaataaagtgaaaaccatgtgccgagagaaagagataagcaaagtaaccaagacggaacgaattggatacaggaattggatccaatgtcgtgtgcgatggcggttgaagcaaacgaccgacagagcggtccgatcagacttacgtgtagagccaggacagagacgtgagggttccgatgattcaccatccgaaccacttccaccgccgcctctctcggtctgtttgtcaaggaagacccaaacaaaagaagaaaaacagatgacagggacgtaaggtcatcagttcgaatggcgatcgatgtccatacgagtaaaggcttgtctgtatacgctagaaaatcccggaccaaaaatagacgaaggttgtggatggttcgacgaatgaacttacgtgttggccttcttctcatcaatgtaatcggccagctccaagttgagagtataggctggctcttgaagcgatggttcacatgcacgctctgggtaccatatgtaagtgttagatagaaagtatggacaaattcgggccaaataacgaaagtaatattgagcaagaccgacgtgaaagatgagatggagaagttgcactgggaaggcgagtacgggaaaggagactgggcatgaaggaaacgtgggcacacatacctacaagagactgtacaggagatacggatccccaagtcgatgggcctcgaggggcatacatggcaaagaagatgagttgagagagtgagcgaagtggatggttgataggttgatggagccaacgagagaacttgttgaggatgaacatatcgcgagcaggcttatgtcagcatgataaacagtcatttctgccgccagtgttcgtcctcccttcggtctgctcatctcgtttggaatgtagacgttgatgagaatggcatcgaactggaggaaggctgaatatatatacatgtgtatggaggagagtgtgttatatgattacaagaatgatatctaaagatagtacaagtgaaggcagcggcaacgaagttgaccacgtcgtttcgaggagaagatggaacaaagaaacggcaacgaagaatggagttcccatcaatcatccctccaagagacctcgccacggccccatcgttcggaccagatggcgcgtttgtggtaaacctttctggcgcctttgaattctctggtaaagtcctccaatgctctggcctgaagattgagtggatgcgaaaacgagtcagcatgtatcttatacgtcaaacacgaagacggatggacagaatgacgtagacttactcctctatcattggagccagcggttcccgagacgtcgagagatggagtgtctgctctagagccttcgatgaacgcattggcgagtgcttccgaagtgtcgtcttgatctactagcgcgtgtcggaggcgaagattgagaaaggaagccgagaagcgctggacagatagaattttatgtgtgtttacgtcgttgatgtttcagaagacagctatctcgtcagccttctctgtacgaaattaaacatgctttcaagggagcaaaagggacgaacttggtataacgacgcctgctctttttcaatctccttccaacgagcctttagttgctcggcttccgtgaaggctgctagtgtttccgatcggagttggactaagccgggctgtaaactctgatttttctctagagtacagaccacaaaacagccgaaagatgagcatcggttccgacagggtccgatcagatgaacgagctgaagcaagggaacctaccggctaacgtctcgttgtcctttgcgaccttggatatgctctcgatcttgtctgctacctgagggagtgtgttgacgaaggcttctctgtaggcttcatctgtaagaagctcgtgcagatcgtcgttcctgttataaggttgaccgatgagagaggatgatgagcgtgaagcgttgatgccgtacacaatccgggcgataacgaacttacgagagagcttttgtctgtggaaacgcctgatacagagaagatacaaacgttgttgtcgttgtcatcgttgagataggtgtatgcgtatgtctgatgggtctgtcaagccggttcgttctcgatgatggtgatggtgatgatgatgcgatgtgttggctgtcgtacagaactcattacaaacacggactaggcgggcattaggaaggcatccggaaaacactacgaaaagcggatttacagaaaactacaaaagacgactagaggaaactacagccatgactaggaaaagacagcaaaacgggcattacaaaaaagactacgatattctcacaaactcaatacaaaaaattcgatttttttctattcgccaggaattttccattttctctccttttttccccgccaaccttctttctctcttcattccatcttaagtactgtcggtcaacccgttcgatcgtcttctatcggccagagaatcaagctcaaagctactgatcgatagtcctaggatagcttcagctctgttctctctcgcttcccttttcttttcttctctttccatacctgtcatacacaatgttcgcctcgacccgggctacccagcatctgcacctccgtccggcggcagcccggttcttctcgtcaaccttggcaactcctcagtcatcgggtcccaagtcgtcccagcaagccagtaagcaatcttttctttcaaagtagaagctggagcgaatcatggatgattccatgcttcaccttgctcatcgttctgtctaacggatgtctttactctgtcttactttttttttcccctcgttccctgatttgccgggtttctctccttctctctctccatttcatcttcttcgaaaccgtctcacgtcacgagctagatcccgagaatgctgccagcatggaattcgtccctcagggaacgccaccagtatctagagcgagcagaggaagcagaggccgtggagacggaggaggatccgtcaaactccgtaagtgatacatcataggcctaccaacgttcagacacttgaactgtcattgaccatcagcgtccactcctttgtcctaaacttgtttctcccttagttcgtgtgtactggaacaaacaccgatcgccagatcgaattcgttcaagccaagctgctcacggtcaatttgacgacgcccctgctcagtttaaaaacaagccgtctggcaaccgagcaaatcgacctagtgaatctcgacgatctgatgattcggtcaccatccaactcgacagtcctacccgccgccgaatggaagaacgaacgccacaaggccagatcatcaagcattaccaagataaagctcagggaaaattcgctaggttcggccctggaagaggtggcgctcccaactcgagtggtgaacgaagaccctatgtcccccgggagaacggtccgagctctcgatatggtggcgctggtggtgctagagatagaaagccgtccaacaagtcggcagctccaaggaaacaacagtacactggtgatccttaccgaaccatcagagagcttccaacgatggcaccttcaacattacccggtctccacttgctttaccaatcggataatatccttgccggcgaggaagacgcaccgacgactgctcctccgaaaatcacaaagggccctaaagccaatgtgttccctcctcaaacagctttccagcagaagatccacaacgtcgtcaacgaccaagctccttacgccggcatcaagatgctccgaaagaagaaccctttgccattccttcccgacacgctgtctggaaatcagccaaggttgatcaaacaacgcgccaaagagtacgacatgatggtctctcccgagtttgccgacgtcgaggggatcaatgaaaagattgataacgaacgggttggtggtgattattcgcgatactacgatcgagaaaggctcgatcaagatgtcaagactctcaacaatggtgacaagtccgcgaaggagaacggaaagattctggccgagtacggagtgagctggaatggagatctcggaatgagagagagagagatgatcaagagcttggtcgatgaattcatgggcatgaaattgacaaagcccaaggagacagccaagtagtggctgtttgatttggagcaatttaaatacaatgactattgttctgctatgttttgtttcctcttgccttaattgaggactgtctcgtatgtgtgtgagaggagcagacttctcgaatgaccaaaggatggggttgggtcgttcgtatcgaagatgattgtaccaaaaaaaaataaaaaaatctaggattgaatgaagaaaggaaaatgaaataccgttcccctaacacagacactttcaaggtcaacgaccatccaccatcaatcacttcgcatgccattatctcttctcatttagcacacatacacacagacgcacacatacatagcaaacatagcaggctcctatgtcgactcccatattcaaaaagctcaaaaagacttcgctccgacccacgtcgtcatcgtcaatccgggatacaatttctacccccgaaaacgacgtgtcacctctttcacgatcgacagagtccatcgcgaacgcgtctgtctcgtcggataggccgaacggaaaggatggtcaagaagaggatgacggagattttagtccgtcagcagcaatagcagcagcaaaagccaggacgaagaaggaaaagaagaagagaccggtcgaacggttaagctttggaggagaggaggatgtatgtcttttcttttctagactctcatccgttaggactcaactgggatcgactctgatgggtcctctaactgtttcttgttcttttcttcgtttccataaatggttctacctaggaatcatcatcaacaaccttcgttcccaagaaatcggctctctcccgcgctctccaactccctcgtccacctatatcctccgacttgactctatcccagcaaacccctgcctcagcgatcccttcatcatattcatcaagctatctatccgagttgaaagcgtcgacccctactagacctggtccgcttccaccgtctgcaggagatcgagatggtggcgaatatgacgcgatcacccgcgcaaaatataatatcaccgcagacgaaggtggtgtgcctataattccgacgcaatccgctatcgacgctgcgaagaacagacggtcaaagttgcgatcaaccggtggggacaaccaagatcaagacggtttcatctccatcagagaagggggcagaaagggagcattggtcatcagagatgaggaggttgaccttggaagaacagggttgatgagagaggatgatgagttgggagacggagcggacggtacgtgaatctttcagtttccatgaccttttttctttgctttttctttgtcaatcgaatcgctcagaagagggttatccatagatgttgacaagctttcactctcaatctttgacagaatttgccgagtttacagaagcaaacgttcggatccccttgggcaaagctgccaacaaaaaggcagctcgattgttgaaaggagagaaacaacaacttatcgaagaaaggtcagttcaacctcgcggacgtatttaattacctgttttcctacctgaattcgtatctgattctcttaccaccatctggctcgactgggataatcgtatcaagagaggaagaggacgaggaagagagtgacggggagggaatggaatgggaggatgcacagatccggcgggcaaacttgtgggcagagtctgaggatcaacaggatgcgtccaagacgccctaccgagcagctcacagtatgatagtttcatttcctttctttcgtattgtaagattacagatcataccaagctcatccttccgttttttccttggttctcttacgttcgctcgttgatcaagttcccacacctgtgcccctgccttctctatcaaacgcctcagccaggctgtcagaagctctttctacattgacaatgtcccacgcggaacacactgcccgtttggaaagcgcggctgcagagttgacagctttggatcaccaggagaacgatcttcggagagaggtagaacgagtggaggaaaagagagagtgggcagaggagttcaaaggatgggtggaggaggtcgggaaattcttagaagtcaaggttcgtcaagcgctgagctccttttttttttcttcgctcgctttgacaacggctgacatattgatctattcaatttttgactcattcgcttaaaaagtatcctgagatggaaaagatcgagaaggaaaacatagaacttttaacggaacgttaccggatgatctcacttcggcgacttgaggacgattccgatgatctgtgcctctgtcttggaacccctctcgagaatctttcttctctcggtcccaagctgtcagcatcaatctcctcgtcaacaccaaacacactggacttgatttccccaccgatgtctgatatccgaactcaacgccgggagacccgtcaagctcgactcgcgagctcgacgtccgcgccgtcatcactcgagacaaccccgttcgtatcttcatccgatcaaggatatttgaccgactcgaccctccctccatccgaagaatctgactatgcactcgctcgggccggtctagatgagaggagacggcaggtgttgggtgatgtaagtgctgtggacctgagagatccagagctcggattagtgcgcagatttaaaatctggcgagaaagagacggaggagaggagtatctgaaagcttggggtggagaagcgttagtgaccgcctgggagttttgggccaggttggatttatccggttgggatcctttgactgtatgttcaatatctgtcattcgagatgtccgagaattttcgactgaaaatcttttttttttcctcaacaactgtatgtgatcagtcctcagaaacactcgatcacttcccattttatacctctcttcatcactattctcgcccgcctataccccatgatgaagacgatgacgaccttatggaggatgagaaacctccgttgggtcccgaaggggatctcgtggcttccatcttgaaaaacactgtcttacctaggctgaccaaagtgttcgagtctggaggcgcgttcgatccgtattcgggcgtgcagactagacgggcggttgatttggttgagttgttggaggagggtgttggaaaagatagcgctaggttccaggtgggtggcttatcgtcgtctctaccatcacaacataccatttatctgactcggaaacatgaccccttttttttgtgttgtcaacagaccttcgtcaaagctcttctcacgtcgttcaatagcttattggaaaccttgtcttcccttacaatggcttgtagacaaggctcgccccctccagcattcaacccgttatctttctcctcacgaacgcgtttcctgtcgcgcgtattgaaagtgatcaagaacgcgctcgcctttcactcatacgaaccgagccaagtcggtaggcttgtagaaggattagtcgaggttggcaggatggtagctgagttgggatgggaggaggaaggcggaggtagagaatggggagcgaaagtaaggagtttggtgccgggtggtttgttgaacatagatttggagaggagactggcaagtggaccgcctcagggatggtagattttcttttcctgagaataagggaagactttgatgaagcatggttctctttctctctctatctcgtctacctttctagcgttgtatcgatggggtgtgtacgtgtttgcttgcgtgcataacggtggtgtttgatgaaagtcggagagaaaaagaatcaaccctttccatccatcctccagcatacacaatgtcggacaaaccgtatctacccttcgacatctggcaacatgtcctcccacatctggctgattcaccatcgacacttgtttcactatctctcgtgtgtacttttttagctgagctgacgaccaggtcgttgtacacacatgtccatctggccaagtcatcgatagcgtaccagtcgttcttcagaacgttcacttccccgttgtatgaccagccgaaagagcgagaatctcctctcaagttcacaaaaaccctgacgttgggcgcatatggagaagaaagcatctcaaagtcggcatcaacatcaatgttgacatccttgactacgacaacaagaagttcagcgaagatcgaagagctcaatcttccgccattgccaagatcgttgtttcctcagttggagacccttgagattggatgcacccattcggatcagatcgcatccattctacccatcctgatcacattgaatccagttcatgttcggttgtgtgcttccgcccctgaacctccgttctcatcaggaggcgaacaggtgatgatgaaaccacaatcaataaagttctcattcataccacatttcacgtgggtgatgtacaaccgtctagaatctgtctttatttcaaagtgtgatgtccatcccccgtcgtcgtcagactaccctccatactacgagtttccatttccttcgacatgcacaactctccgatcagtcgaatgggattttaggggtgcgataggaaatcctccgttgttcagagggttctttagaaatcagatcggtttatgggattggaagacaccgttgcgagttagcgtctgggttgatgaagagagtgaaggggaggggatgctcaaaagcagtctagcatctgttcttggagatctggtctatgaaggaggcgaagaatgtgagaaagagtgggtcgattcgaaagtaaggattgggctcttcatcaacggagccaagtatgttggatttcatgaagagtcatcctagacggagagggagaggtatgtgagagagcgatgatctagatgcatgtacaacatcttctatcagacaaagctgtagttctcttgccatcctccatgtcggctctaagctggacacatggaaggacgaagaaagcaaagaaatcgcgatccgatgatgatggtgatgatgacaacacatcaaataagatggagaagaacatcgatttgtttcatctcgaccatcaacagccagatggatcatccatcgtctctcaccattcctcccatcaccaagcgttaagttgatcccgatggctcgggaaccatctcaaacagatcccatgcgggcttacagagccgagatgaactctcgtcgaaagctcgtcctcgatagttatctaatcctcggtttcatctcctccggaacatacggccgggtatacaaagctcgactcaagccggctttcaactcgttcgacccaacatgcccaaccagacctggagatagaataggcaaagaaggggagctctatgctatcaagaaattcaaaccagacaaggaaggagaggttgtgacgtatactggaatcagtcagagtgccatcagagaaatcgcggtatggtctttgttgccttgcgagtgaaagaggatgtcatagcactcaccatgcttcttccttgttctcttcagatcaatcgagaagtagaccatgagaacgtcgtggcacttcgagaagtcatcctccaagataaaagtatcttcatggtctttggctatgctgaacatgactttcttgtaagacttctctccctcttctccttgatgctttcccgaagctcacttgtttcacccatcaatctggaacaacatctgataccatcttatggtctgaagcaaatcatccatcaccactctcaaacgctgcgtttgccagttcctcctcctacactcaagtctcttctacatcaactccttctcggcacgctttacctacatacccatcatatcctccatcgagacctcaaaccggctaacatcctggttaccaaccagggtgtagtcaagattggtgatctcggtttagccagggtcagcagagacccactccagccactctggcaaggtgacaaggtcgtagttacgatttggtacagaagtccagaacttcttttgggcggacgacattatactggcgctatcggttagttttattatcatataactttctttcttatttcttcaacaaagccaaaacattagaagaaagctctgatcgtcggcagggggattcttgttggattctatccactagatatgtgggcagtgggatgcatctatgcagagcttttgtcgttgcgcccgatctttaaaggtgaggaagcaaaaatcgacagcaaaaaacaactgccatttcagaaggatcagatgagtaagatcctagaggtcttagggagcatcgacagtaagttttgctgaggcgtcccggttcttctgtgtgatttctctcttcgtggaaagattagctaacggtgtgttggtatcttgatagaggagaaatggccaaatttacatcactatccagaaacaccacatctagctcgaatggaacggtccgtttctcgtttttcaatgtctctgcctgattattctacctattctcacttgccgttacgctcatcaacagatatcaccctggactagcgcattggtacaagaccaaatctggcccatccttttcacccaaaggatttgacctcctctcttcgatgtttgagttcgacccagaacgaagaataactgctagggaagcactcaaacattcttggttcttagacgacggaggcgttagctcgaagtacgtctttccacctgtttcgtctcgtctgttcgttttccatcgacattaattcccattccatcgtctcgcttatacggaaaacacagcgcgtttgcttcgtctaacttggtctatccagatcgtagagtgacacacgacaacgaattatcctctcagccccttcctccttcacaagcccagggtcaaacatcgaacacaacaacagcaaacaaccaaaaccgatctatccatcttgcaggtgacccgtcgagaatacataattcatcaatccctccacctgcaccgcctagtgtgatcccgatgcctgtgtacccagcaagctctagaccaggtagtgggatgagaccaggggtgggaagcgtagggcctggtggaatcggaagtgcggctggaccgggaagcgcagggaacagtgctggcagaatggttggtaaagcggtagatggcagtcggaaaaaaagtcggatcatataattcttctttccaatgatccgaccagtgtcgcacgtttcgtagatttagtttctcgcagataatgtatattcaattcgagaaataaaaacatcaacttcctttcaaaagatcttcaagcagatatcaatagatataatggagagcagaaacccaacatatatctcatcaatagattcattcgttcctcgacagacaacttcgcagtccagcaagatacgtttcagatatagctgaaaagtaataggaatgttgagcgttatgaggagagacaagattatgagcaatttcgtgcgcgagtgtaaagtacctatggtatatgaacatcgatttgcatttttcagtcaagtcacagtcaaagcctcaaaaagacgagttgatacggaccaagatgtcagggcctcatcgagctttccgtttcgaacgagatcagcgtgccaggcgagatagtatcgcaagttcataaacacttatcgtttacaagaccataacaaagatcgaatcagaccaataagaaaactttaagcatcgtcatgctcattccatattgaatcaggagaagattgatagcttacaagaaccgcttcgattaaaggcaataagaggtccagatacgtcatggaaaatgtgctgagaagaaccatcaatcgaccccattgacgacaaacgttagctcggtaagagaacacatcgagattgaaaaaagtataagaagactcaccaaagacaaggagctcattttgaaaacgtctgaaagtggtaaaaggactcttccagcgaacaattcgatatcaacctggtgtctcgcaagaagaccctttggattctcctcgctcttgtcggcatagaactgaagcttagacttgtcatcgtttccgacaaagacaaggtttgtgttcacgccggtcgtatcacagaaatctttggtctcttgaacagggacagtctgctgtttagaaataagagtggatgatcggtttcctcgggaggcgttgacagccttctcgacattggacctacagagccgagtgtcaaagagatgtaggatatgaattgcagaatcagcaacaaatcaaacaccatgaatgcaaaaatgacaaaccggatatcttttgtcggtgtcacgatacttgtccgaggttctgtttgaccgatttgcctatgaacggcgggtattggagtcgatacagtttctttgaccgagggcttcttcagtccgcttttgaaagaactgaagaagcctttggggccagaagtcgaaggagatcgggtgagaccagaagaagaagatggagatttcgataacgaagactcgctagatggggattgaactttagaatgggaatttgtagctcgtttagggtaagatttttccaaaagctcgtttgtggcattgacaagatggttctcggtctgagcgcgtagcctacgctgaatttctaagggatcacagtcagggaataacttcaaagtaaaacgatgtcgcgtgagatacaaaccacctttaactagaatcataatggattgatgatagatacctcttctaattctacacccattgctttgaacttttgctcctcttgaagacgtaatttctcagccgactcttgagctaatctctcaatcttcttttgtttgagaacccgatccgtcgcaaaccctcttctgcgctgtacatcctcaaatcgatataatcagccacatcaaaaaacaacattgatgaaatacgtcgatgcatgaaaacggcctatacgtaccaaagccgataaaggtgttgaaaggattgtcgagagtagcaaggcgtccgtggagcgagactgaacaggaaggtgcttgatgagagccgacgcaacctcgtatagctcaagatctatacttgaggacacagccaaccgaatcttaccccctctatcctcggaagcagcagcagacacaggctcgatactagtcttgacaattgtgcctatacgcaaagttcgtttcaactctaatttgtgtacttcataaacctctatggaatttcgaagtgtctccgtcgtgatcggatgctgtttctcatgaaggtagatgggaagccgttcgagaataagatggttcgtttgataggcgagtttggattgagagttgacagctccagtagcactgtagtcctctacaaataaacggaatggaatcagtatgatgacaacgaaagcttataccagccatatgcgatatgcctgatgttgagcttaccttttacctgtctgcttagcttcatagagccaagtttcaaatagaatctaacatcaccaacttagtgatcttctgatccaatcccttcatatgcagagatacacttactcttcgagagcgggctcttcaggagctgccaatatagattcttggaaaatcaagtggatcactggatcatcgaggatcataatctctcgggggtacgctaacgtccaaatgttttctgaagaaacaagatagccaatcggggcaacaagttagtagatcagactatactcggacgcatgcgcaggttgagggtcgaaacagcataccgtattcctcgtcatcttcagcctttgaagcaagtttgacacgcttgaaaccgagaagtacttgattttctcccatcgatcgcaaaacactattggggagattagatatacttaaattcctcaaaacgtcgaggtacctatgaatagattcaaacaaatcgatgagagctgtgtttgtatgcagaacgtttcctggacttacaattcaggagtgccagccaggtctaatacaacgcgggggctgaaaatggacgatacagccgtcgttaacataacgagaagaaggctaagcagttagattgtcttactctttgataaccatcttggcgacttctgtaggacttggttcagcttgtaccccgatagctcgtagaaatgtgtttcctttagcgccaaagtcaacgtagacaaatctaaagaaaataccaggttgaaggtcagtgatatgaacgagtagtagcgatgccatgccttacgcacagagctttgtacattgatgagctgctcgcgtcatgattgacgaagtagacttcactgttttcataaatgagagaacgacaatgagacggagagatccgagactaccaaatagactgacaaaggagattcatactttgaacgatgaagcttaatgcttccggtcttatgagcagggatgaacggcaccgtgttgagcctctttaacgacacatgatcaaacgtggacagtcttgaggccagatactgcaaataacacaatagttgtctaataagcttcacacatggtcaaattaatcactcagatacacatacttcaaatatctcttgagcatgagtaacattctgaggagctttgctgatgagtgcatcaaccagcgcagaggctatggtttgtcgttgaagtcagaaacagatggattggagaagagagcggtagtagggaaatatagagtcgtatcagtaaatcgatgcaccatagtatatcgtggtgcaagacacgaacctttaggatccatgtcaactaagagcggaaggactggtacctctcggatggagcttgctacaactgaaaagcctagaagtttggcatccagatttcggtagacgtccaagggagagcctagaaatgcagatccatcctgcttgatacaaggaatgaatgcgagtttccggttttcagatgcgggatctagcaaatcgaagttgagaaaaatgtaaacagtcaaatatttcattataatgtgtcagatatatgcttgaaatacagagacttcgagaaaagaactcacaagtttgcgcatagtacttcgtaaagttctcaaatagaaactcaagagctacagttcgaacggaattaacagaaccagcggctagaggcaaaagagtgtcgatggatgggtacctcatcaatccaagagagaataaaaatttggctagtttgtgatcacaaaaatcgacactgtgagctctaattccagattgcttctagcagaagtgtggaagacgctcaccctcatctgaattcgatctccacttagctttccaatctaagataggaaggccgagcttccgaagcgaatctgatggttcgtatatctgtctaggtaagaatctcgaggtagaaccttcgacgggaaatgcagccgtatttttcaaccggttgatctcagctgggcggagattttcttggacagagaccaggtatttcgtcactgttggagattctcttgaaatgatatcagtgcatctcctagagatagcttgatcaagtttggtcactgacagtccatcacactccatccacctgcgcctagaagcctgctgaagaccaactgaagttcaacatgttttcgaacccccaaagccatcaatagcttttccatgtttccctttaacgaagatcctttcgggaaagcaataattcttttaagccggttccgaaacccatttagtttctgcgtttcgttgtggcgaaggagtatacaggaaaggcttacgggagatccgggaagaggctgacatttggaaagtaagcctctccaggagaaacctgttcttccaacgaaagatgtaaagatacatcatggagtgatcatcaactttgtatgtgaagtagaatagtgaagtcgactgtgcagtgggaaacaggaacttaccatcccagatttagaaggtatgatcttctttcctgacaatagtccaaatatttttgcctgagtctgcgcgtttgcacttgtccaagctctggcgacaattcccagaaccctctccgcgaaagtagctgagacttccatatccaactctggatcatcttttgcccgttctaaaaggttttctaaccagaccgggagagaaatctcctgtaagccaagagcgaagggaatacgctgtatatcaagttgttttgaaatagctgggggaagcatatccaatgggaaggggagatcggatggaatgaccgagcgaggttgatgaaacgtccgcatggaagataattgagctatctctggctctcctgtcttcttcgattcaacgttttgatggggccgaatggtgaatatagcgtaatcgagaattttggacctgagcgacttgtcatattccggggcttgactaagttcgatccaccatttgaggcaatccaccatttcttcttctgtcaacaatctactctttaactcgcctgcgatatcgtctaacgacatatctttaagcattcctctcgttttcaaacgagtcaccattgatgaagcaccgtccaggactggtgacggtacaacaggaaccttgcggatgaaatttgtagtggcagcatgaggcatcctgacctcaagcattgcatcagcaacgccttgcgtagatattatgtggaaaggtctcgacctgccagagcatgcaaagaacgcggcctccatatgacgagacacgacgcccgatggtgtcgaggagaggaaagtgaaaaaacgtaatgcatgaagtgctcgggaggtgaggacttcttggaattgaggggatggagagtcagtcagagatgggcccttccataacgagcggatctcggaaagctctgtttcgtagactgcacggcacagaaatcctatcattgcccaaaatgatacatcagctatgtaatcgatcctcgagatgaatcaggatccttaacacatatatgaacagtacctgcaacgtataacagctgtacgagccgatcaagagacaaaaacgccataagttcgtttcaaatattataatatattgcgcattgagatagatgttgactaaagacatacctccttgttccattggctgacatatcgatctaccaagtcgatgctttctctttctacagtgggtatgaatctaccagctgatgatgtctccatggtgagtgttatcagcagtgaaggcttcatatgtatgaacatatatttgacctacatatatgacccccaattcctgtcgtctgtcctgtggcgtgtccaatgaaaatctttgcgagtccttgtctggtgttatcaagaaatgcaagttgttaaacagtaacttccaagtttgataagtgaaacgagcaagaatggtcgatgagaacaaacatacccttctaaatccgctcggagccctctgaagatgctgttttcccccgtaccttctttctcgttctccctctctttctcggccgcatcccattcgtctttactcgtccataccaacacaactttagtcctgcttggtggctgcttcttcattgcgcgttccatctcttttccgaaagcctgtgagattccgactttggcgtcagcagcgatgaggttgagttctaatccagtttctatcaactcgaatggatccttaggttttgcaatagagggcggaggtagagcaacgggtacgggagaagatcgaccgaacaaggccgacgatagcatcgacgtaaatgaagtcgtaggagctgctgaaggtggtttgagaagtttcggaagagaccttagagggggagtcgcactattgtatatcgctcgaggaaccttcgcagtgatcttgatggctgcaaataagagtagtgaggttaagaaacgcttgaatgccctttggagtgaacaagaaggagggtggatcataacgaacaagtgctagctaactcgtcaacagtcatcattcctccttcactctttctccccaacccgacagggacctccatcaactttgaggctctcacatccttctcgatcaacgctgctctcatatcgtcgaagaaaagctcggctcgcttgatttggaccataaatgtgatgcttgttgccaagaatctggctagatccaggagtgagttttccatcggtgcgggtgtacgaaggtcaagcgtaaatgttgtccacggctgattgaaataagaaacagaaggatttgaagaaggaggaagggaacctgctctcgcaaacagctgtattttaaggacgaacagaaaccagtgcgttgaacataacaaagatccaatttggagagtcaagaagtcacatacctgatcgccgccacctttccaatgaaagcccatccatgttccattactctcgacgtgaggctcctcagtgatcgaaaacaacgcatagaatccaacaccatatgccccgatcttgatcgagtcgttatttccgtcggcaatctttttgagtcgactccagtcttctggccggaaaggtatctaggatatcgattcgatgataggggaatgtttagtaagctttcaaatcctgaggaacaagtaagtttgtagactgaacataccccatcatttcggaactctattctcacaacctaagaatcactccaatacttgtcaatattgaatcattgtcctcgcggtcaagaaggattgtaccaacaggatcatccttgaagttcggaggagtcccgtctgtatcttgctccttgtcatcaaccacctgatttgactctgttggatcttgcttaagccgagctctctcacggtcaagccccttttgagtgaaaaacttgatttgaaccgaagaagcctctgcatcgtctgcattctgcagcagctctcttcattaagagcaacaatatataaggg

SEQ ID NO: 1268 - DNA, 20108 bp, Xanthophyllomyces dendrorhous
  misc_feature (8704)..(8713): n is a, c, g, or t
atataagggccaacacgatcccaaatcagttctgactgaaatctagagaatgataggagggtagcgaactatggaaatagatttgtagaaaggaactcgcctgaagatcgtgtgttctccactgtaacgagcaagcaccttatcgatcaacgctctctggttcacactaacagcttcatcttgacccgagtcccacaaattctttctatccatttctgaagctgtaatggttgatgtgatggcggaagatgtttggaatgattatgatgttcaagcgtccaagcggtggaaggtagtaaccggtctgctcggtcttagccgcgctcatttgacgatgaaccgatatacaacatacatacacacaaaataagcacagaataacattgagaccaaagattttatcgtggcgtctagcattacattgtgaagtaaggtgaagtatgacaacgaaataagtcaaaacaaacaggcagaaacttgaaatacaacatgattggatatggtatgttatggcaatgacctcagaggaagaataacaaaaaaaaatgaagcgagaccaaaaactaacagagaatatggagatgaattccgatagatacacgcaaagacagtcaaccgcccatctcgatttctgtcttttcgtctggccgctcactaagacttccaaccctgcttcgtttccctatcaccccatcctctccctcatcctccgcacccatgcttttggactcgtctccttctgaatcctcgatctctgttctctttcttcctacactcgagccgtccagccacccatcaggccctgaaactcctctggacgtcgctctcgctctcacaggcgttgaagcgccagattttaaaggtgaacgatagccacttcttgtgtccgtcccttctggtaataagtcttccggactagagcgcgagaacggactaagctctaaagaaaggtcttgagggtgaggctcgagaagggcttgacctcgattcgcttgttggcgttgtggacccaagatccgaagtctttcgatccaactatacaggtgatttgaacgaaaattcagtctcttataagcaagtgaagacaaagatggcaaatagacgaacgcttcggccctttctaaactttcaccaaatacctgagcaagacctgtgatcatatccagactttccactgctaatgtcataaccctgccagccgcaccccttgccatcccaacttgtactcccggcacccctgcttctagctcaccagactgaccactctctctgttaagtcgctcgttcgccctttcccaacgttccggtaagccaaggatgaatcttcgaacggtccgtcgggcaggttctggtaaggctccaccagcgtattttgatacgacatcaacgaccttgcggatggtgtttaccacgtcagctttaatcttggaaagagactccaaggccgaaggagagatcaaagcttgagatgaagccgaggagtcatttaaggatgcgatgaagtttcgaaggatgctaatctggttggttatatgcgatgtcgcgtactgtttgtttcgaattgcgcaagtcggagtgatcagaaaatgagcctatggaaaaatagaggagaaagaaaaaggaataggtgaagatgataaaaaaagcctacttgtagccactgcagacaatacgtcaaactcttcatgctctcttcgcttaccgccgctcctattcctccagcagtcatacctgcctcgacaagcatcgaagaccatcgcccagtgtttcctccagtcgttcgttctacctctttcgtctccgatggaacatggacgagcgcttggcctggttgagaagtcggtcttacccgagattgagaacgcgaagttgaacgatgaagaagtgggaaagaggatgaacctaaaatagatgtatatcatataaatgatcagaacggaataagaggattgctgaataggtgactcctagatgttcataacctcaccctgagcttgaggatcttcctctcgtttcactctgttctctagaccaggactatctctggagctcatatgatcgcttccgcttaaggaggatgatcttattgagctcgtcgctgtcgaggttgacctatatctttcttcaatattggttggcggcaaggaagacgatccaggtgttgatagcttcatatcgtcagcacaaaaacgatggtccaacgcaaaagtggttaaaaagtaagaaatttagaggcaaagtcaaggaagcgaagagatataaacacaaagaccaactccaactcgatcaagagtccgacagccccaatcatccattgcacccgtcagtctaggatctattcgatccatgaccggtcttgagattgtcttgaccgaagactcgacaatttctgctccatactgcaaagcaaatcggatgaagatactttgtcaaccaacgatattcaaacaaagaacgaatggcaaaacatactttgacaactcgggatcctcctttggctgtttcataagcttttaacgcagtgttgacaacaggcatcatcgatactctagatacgaagtcggcctcattctgggatggtctggtaaactcatcaaattggttgatcgataaataggaacattcagaaacattgtcagtcaagggatcgtcgaaacaagaaagagacccatacgacgaacatgttagaaggagaaggtccgagatctaaagggttcgagtagaccgaggacgccagagagggagttgtcgccacggttgatgaaggagtcaaggatggacctgaatcagtgagggcatctgtgagtgaagatgaacgatggaatcaatatatgtgtaacttataagcaattgaatagaggtgatgatgatataacgaagggagatcaaagcatcgacagagagaaccaaaggacctcatggtatcttgagggacgatggattgacgagtatcccttcttgagcacttgtgctcgagtttgccggacacccagccggatagatccgtataagtgaacccatggtggagtggaagctctttctatcctggtcaatattcctttcccgtccaactctctctgtttactgaatgcactgccctgttcgatacgaaacgaatgatcttaccatgtccgaaactagagtcggtatggatagaagaagcaagtgacatagcggactccccacagaccgtactgttgctgctactgtcactgtgttcggctaccggccgcggcggcccggtgggcgatttagatgccatcatgtgtagagctgtgatggcgatgagttcgtcttgatccctaggtggccaaattggaggatctggttgtgtagatgagcccttcatcttagtcaaaggatatgtctgacgtggaagatggtatgaaaggatggtgtagcgaaagacagaggcggcaaggatgcgagtgcgtctgcttggaattgtgactgaaggatagtaaccggatggtgaaccggctagatgagtacgagatttgcttgctctccgctcaatcttgatcgacttcacctttaacatgtcgttgtcaaagaaaccggtcgacattgaagatgttcttgaaggtaagctcttcaatcttagctttgatcttgttcaccgaccaactttctctcgtttcctttgtttgatagtcgtagacaagactgtcctcagaccgttcatcgcgatatcgatctctctcgccgtttgggtcttgggttattcatggactagtcgactcttccagggcactttgatatataccactctagtcgttctatactgtaggtttcgctgctctggttcagtccggtttcgtttgcgcttaataatcctcttgccttatatcattagccctcatccctcatctcatctcgattgccctctcgcctcatccgcgaaaatacctgttttctccacccaagatcgactggtccgaacagatcgttctcgttaccggtgcagctggagaaataggcttcactctcgtccaagctctgtctaccaaaggtgctcgtgtaatcgcgctcgacatcaagcctgagtctgattgggtgttcaccggagatgagacaggtagtggtcagagtgtgttctattacaggtgtgacatttcaaagaaggaagaggttgattcagtggcagagaggatctggaaggatctaggagatccaacgatagtagtgaataatgctgggattgttcaagggaagaagatcttggatttgaccgagcaggacatcaaagagtacgccatggttaatttgtttaatcaatcaagtcgtatatccgcttatactctcatctcatctgtgggtcctggttggcactagaacggttggagtcaactatgtttctcatttttggatcgttaaagctttcttgccagccatgctgaagactaagcgaggtcatatcgtaagtactttgctttttcttgtacgtgtcactgagtgatcactcgagttattgacatcatgcaatgtccccgtggcgaaactatatctgatcaccagttgacggtggcaagtgtgttaggccttattggctgtgctcgtctcagtcagtcttggaacctgtcactttgcatgatcatcggtctggattgagaagtctgtgatatctgatatgattctaggcgttttcctcgttttctagccgactattgttctaccaaggctgccatcattcagtaagtctgggtttgcgacgtctcaaccagatagttgatcggcttgttgacagaccgtcttcaaatccatctcttccttggaacagatttcatgaggcgcttcgatttgagcttaatacccagtccgtctcaaatacctgtttccttcgtactgttcacctatttgagttcactaatcgatattcaatggacctcagatacgacgctccagagatttataccactcttctccttccgtctttcgttcacggtccgctcttcgcgtcagtaacgatgtcaaacaatccgttcatcaaatttttctctcctgcacttgaggcgagagatatcgttcaacgaatgatcgaccggttgggcgtagagcagagcggggtgatcatgatgcctaggtgagactttgttggtcctccttcacaaagagatagttgatctgatctttttcggagtccccgtgggaaatacagctacgtccggattgtgccatttatgagatggattcctgggctaagagagatctgtcagaatgtttgtacaagttctcatctctctttttgtctttcttcgttttggtattcataacgagaactaatcagtatacacgggattattcataatcgcctctggggcaactagctttctgaagcagaccacgcgatggacaagtttgtccgaccaggcaagaaagcagattgattatatatgcctaaaccctagatttgtcgagagaaaacttctgttgcttatgtttcgctcctcgacaaactgcttttacatgatactcctctgagtcgttctcctagatcttgttaagccaaaagaccatcacaagagaagaataaggggagaacaatttatcgatcaaatatactaccactcttcttcactccatcacccgttctggatacatttgagctcttatcctgttctttttctttcttcttcttatcttcggacatctgtttaatcgtgtcgatgacttgagacacatgagacgatgcaacaaacacacgcatcacaaaggttgtcatttgtacctaaacagagattgaacaagtacgcaggaacgaaccctctcgctctgatgccttcttatgcggccgggcagaatgggcgtctccggtgagatggacgctggacatgttgatgctcgggatgctaactcgtaattcaatggtggtcggttgatgaacgagttcaacagacgggtgtcagataccaagagaatagaactacacgggcgcaatgttagggttaaatgacgtcattgatctacagttaggctctgtgcacagccacatccggtatcgcgcacggaccgccaaaaagaggaacatctccaatcatcccgagcctctttctctttcttaccctcaccttcattgatccaaccattcatccagccatcaatcacttgctcaaacactatgtctgccactcaggatcacaccgctactccccctactgctgcatctggctcttcggtccctccctctgtcgaagctgctgctcagtctgcccagaatatcctcgcccaggctcagcaggtcagttcaatccatcggcatcttgaaaatttccaggtcttgctttggtttcacccttgaaagattactcacccgtttggatgccatcccaacatatacacatcaaattatagcaagccgctccttatttgactaaggcccaggagatcgccgcaccttatattgagaagggtaaggagttcaccgctcccattatcgccaaggttcgttcaatcgagtatgctcttgttatctcagcgcagacagttatcttacgttttgttcttgatatatcatcatttagggtggagaagttctcaatgctgcccaggctcgggctgatgagctcatcaaggaagggaaggccaacagtgctgccgctgccgtacgcattcatctccatctctcaagtctcagtcgcgtccttctactcttgctgtttgatactcatctctcagtgtcatactttggaacaatagggtcagactcggtcagccgccgacgatttgaaacaggaggcttcggctaccactaaccaggccgctcaggagggttctcacaacttggagcaggccaaagagtatctcgccggagttgctagcaccgtcactgtatgtctcgagtctgtctgctctgagcgcaactgtatccttacaatcacatgtgccatatagactcggcctgaaacgatttcttgtcttaaatagggaactctcagttcgctctcgcatcagttgaatgacaagaccgctaccgcttctcacccaggagtcgtgactcagctgttcgtcgcgtctcccttgtactctctatataacatgagactaaaaaatctaacatccagctttctttccctctcttctgttttacccctctcgcttcaacagcacgaacgcgttcagctcagctcagtcgtacatcaacactcatctgccccagtcatcaactaccgtcgaagaaccagtcggaactgtgatctctgacgtcgccaacaacaaggctgacgaggctgagatcaaggatgctcttaggcagctcgccggaaagggagaagagactttggagggagcgagggagcagttggaggatgtcaagaggccttaaatggtcagagtgtagattatagaattgtagaaaccatgtcttgtgtttttcctgttccatctccttttctcgcttcggttacatctgttcttcatttgtcccaaatctgttttctccaaatctttgggttgtatcatgtgttaaagtttaattttatctatctgatgaatcatgatgtctgctacgtcttgtatatgaatccacgagggtcggaaagcccaagatgaggctgactcggtccgacgcgacggctgtgaatttcctgggttcagtcccatctcgcctctctttggtcaatctcactatcaaccatcctttcaccatcactcatctgatccatcgatacagccatgccaccctggaatgctgcacgagcccggatccaactcaagtgacgtcctttcctcttgggatctcaccttctgctgtctgttgccctctgcttataccttctttggcgtttatcgcctgctatgctatatctgtcatcctttgcgattacttttagactttcaatccaacgacttcagcttttgcaagataaaaagacggcgattgctaagaagacaagaagagatattgcggatctgcttctgaagaacaaagtcgagactgccagagtcaggtgtgaggttgtcattggagatgagatcaccgtggagcttcttgagttgctttccgttcgtcgtttctcttccctttctctcttcttggctcatcgggacttatattcagtgataaactggaagacagttgtacgcagaactgctcctcgctagattcgccctactcgacaacacatattcttcttccgaacccgatcaaggtatccacgaagctgtctgtactctcatctatgccggaccgagaacggaggtcgctgaacttcatcatctgcgagaactactcgtacacaaggtgagaatcctcttttcgcgttgttttactctcgatagcctttgttttttttcccctcaacaaaacaaaccttttactcgccaaatcattttgtatcagttctcgagagatttcgctatagcggcaatagagaacaaggatggctgtgtgaacgatcgggtgtttgcaaaactccagatatacagaccaccgaccgagttgatagacgcatacttggatgagatcgcgaggacatacaaagtcaattggagttccggaagagaagatccagcgaacggggatgtccctgcagggtttgaacaatcgactgaaaaaccagacgattcggccagtcaacccacatctacggacccagcctccttgcccaacactactgtcgctggcaactcttctactataaatactactacgccgaaccctcctccaccatcctatcaacctgcatcctcctcctcttcttcttcnnnnnnnnnnacttcctagtgagaagacagatgcatccaacgaatctaaaccatcagctccacctgcgcctagcgcgagagcacaacagaaatcggcggatgacctactagcagctcgatttgcagctctcaaacaaaggtaggccctcatttccttcttctctagcaattgttcagaaccatgtcgctggcagattcgatacagacgattgatatcacttgaaattacatcgctagataagttacgtacgcccgacgccttccccttcatctttacttttacctccgaccatgtcttcccatcctatcgacgcatctaacatcatcaaaaatactacaacaaccgccatctccgctactacgatcgaaacactaaaaggagaagaatttgaaccagagccaaccacatacactgaaatcgaagaactgaacgatgactacgaagacaacgatcgcaaagaagaagtagtggaggaagtagaagaagtggaagaagtggaagaagaagaaatagtagtagtagcagcagcagctgaaacgagaaaaacgggaattagcacgaatatggtggcgttcaatgaaaactatctgatcaacttggcaagtggtagtctaggtctgcttgttggtagtttgtttggattcggaattgttttgggaggtttcacatgggtcataggtcttttctttggacttggagatggatggcacggacgagaagaggcgtaaaattaacttggtcgttcagagtgaggcaggttgtatcaatggaatttttcaagatcaagagggggttgtttgtcatttcccaaatcaatcttggctgaaatgaacaaagagacatctgtgtgtctaagcaaagacaacgaagtggatacagtctttttactctcatctcctatcttttgctgaccatccaccaccaccagcagatctcccttcatcttcccttccccgaccatatcttctcccctcctctcctttctcagccccaaacctagacccagatcctccccgaccaccgtctcgaggtcgagagtcgaaccctctactagacccacctgagcgagacgctcgttcgactgagtaccggcccttcttttgagaatcttgcggtttctgggagtaagctttagcttgagaccgagtgtctatcacctatatatcatgggtgccgatatcgatgtttgaaagagaacaggaggcgaggagagcgatgagtcgtagaaaaagatcattaaacagagaaacggagcaaacctcataatcagtctcggctcgccgagtctcatcaaccgctttctgatcggtatgatcaatcaatgcatgacccatccatctaaaaatggaaggaattagagaagaagatgacagaatgagaggtttcgcaaatatttatatgaagagagcagaaagaaagagtaaagagagatcgacctacccaagatcattatcaacctctaaatctccttcctccccgtcgcctccttctgccccttcggaatcatctcttgcgctttgcatcttcctcctaaatccacccaacaaagccaggatatcctcctcctcctcacctcctttcctctttccattccttcccccaccggcagcactagtgttcccacgtctaccacgttcgtaccccgcgagttctctctcaagcatcgaaggccccttcgatcgaacaggagatggggaccgggcgcgtttgttcgagagattacgaagggaagcttccattgcttcaatttcgcgcgctcgtttcacacttgtgacaaagaaggcgaacaaatgataaagtaagagaatcggtcacatgatctatagagaaaagatcataagagtagtaaacatactcagcattatcttcatcagcctttcttcgaatatcttcgaagtcttccaatttagcctgtgatgcatttggtcttgttgaagatgccgatacctgctgagtccattgaaataaaccgaccattggaatgtcaatgaacacgtggttacttatgaaaagacgtggtgtaaagagaaacgtgatgaacggtcacctgttcgctgggaggtcgtatagcaggtgcatcagctaatatcttgtcgaaagaaggcacatcgttcgccgttgttgacacagcaactatcgtaatgttatggacgaagagaccagaaggatgtgtcagatttatacgtgtcataggatgaaggaatccaatgaaataaactgacgatccggtctggcaaggtttttcttcgaatgagcggcttcgagttcttcctcaccagcttcttctccaaacgacaaaagcttcgtgtttctgcattccagcaacgagtgatttgttttgtcaaagacccaaacttacaagcgttttcagactcttctctctacgcgtctttctcagtactcactttttctttttccctatcccagcttctctcctctctttttcttctttttctctttccctccttctggcctcctgtttcctacgttcctcggcagttattcgaatgacaatatcgtcaaacgggttatctaggataacgattgatttgatttttggtgggtacttgggtctctcggtttgcttgtcagtctcgagttgaccaattttcagaacgttgaagatagtgtttccatccgccgctacctgattatgaaagagaaagaatcggcagaagacgttaaggaaagtaaaatccagagaaaagaacgaaaaagaaggagcgcacttttccaaaaatcgtctaaagtatacgaaaagcaagctaaagtgagctctcttgtcttcagtaagagaaacaaggaacttacgtgcttgccctgcaactcatccgttcgatctatgcaacaatcatttccctcagccttcagacctttatctataggatttcaaacttaaaacttaccaagggtgactgtagtacatacgccatcatacaattattgagaggtcaaaatgattgcgcgcgctacagtagacagacttgaggatgatgttcactaactgaaaaattgactctgattggtatctgttccgatagataacaaacataaagagacatggaaatgtcggtaagagctctcaaatacatgtatatgaaataactcgaagaggacttacttcgcgcgttgttgttggccatagcaacgagccctcgtctggagaacttgagtctctgatgaggttcatcctcgaacggttctgtgcaaatcccagagtcagtgagctcaatcggcatatgttaagcggaagaaagaggaacgtaccaccgtagaatgattcgcctccgtaaccggtgccggttggatctcctgtttggatcatgaagttctcgacgattcggtggactatttgcagcagagaaattggtgatgtgatcagtaactcatgcactttccaacagatgtacagatgctgctgcgtgagccgtaatggatcctgggagatgttgataactcacaaatacaattgtcgtagtatccctccctacgttaaatagaccgtccagcaaattatggacgacgtcagcatgcccatcaattaatgcgcttgaaagaactcagtaggagaggaaagcaaaagcatggagttacatgattaaactgtctcggatgaaaaccaagatgaagagactgcttcagcacggtctattctggatagcctcaagcgtacgcaattatgaagaaagatcaagtgttaaacgaacgcgataaagttccgacatgcctttggagcctctttcggccaaagctcgatctggtgagcgaaggaaaacacgtcacgaaaagaaaagaaaagatcagagaataaagtatcgagtagaaaattgattcaagctgctataacagatgttggtgtagggctgatgacgaacctctatgtcgcccatagtcgtttgaagaacgactgttgaacatgacgtgacgtgcgtagaagcagaacagagtcagaagatgagtcagacaagcgaaacaagacacagagttaaaaaatgttgaccttttccactggtagctggctcatagatgtataggttggacatcttctctgccggctctgtcctcgttgatgatggccgttgacgatgatggcatggctggtagagccatgagggaagaggaggaggggtttatatgtggctgtgtgaacacgtgactgaattctcttgtggctgtgccggctaattgaccatacccgggtgatgttcttctcgtcttcctcctactttcctatcctcgccatcatcttgatattcatcaccatatacttccttctcaccatcattattcacgatggaaggtatatccacttcgctagatacaaaaacgatatcacctcagagtcatcaagttctcgatcccgacattttaccttcccttcacccagtagatcctcccagagctgcgtctgctcctactcccgttctggctacaggttacacaaagtttcttatcgagaatgcagcctcgattaatagtgtagaaggcgcaattcggagtggaagttatctccttccaggaagattcgagggagctgagatcgttagtgagggaggtaagttctgcttcctgatctttattgtctctgcctacctgtgtcgcgtctacaagttgatcacttcggtcgtttaactcaaatgttcatccgcctggcatctttcttttttttttgtatttttttttgtaaacaagtctctgccttcctccatatacttacacatctacactccactataatctccaactatgtgggccgacttcctttgactttcaggccacctgtttcacctccaacgatgcaggagcgatatactcgatcatgggctaaatcttctggcctgtacagatggtcagccagactactccaattgttgagtcaggttgagctgttggtcgagatgtgtgctcatcgaatggatttgaaggacaagaagcaaggaaaggagaacagaggatcgagaagagcgaatgtgcttgtgggtatcgagggaattaagtacgtcttgacctacttgcccaatgagtagagccgagatcttcgagactgactatcctctttctttcttcttcttctttttctttttgacagaacgatccttcgactcattcttcttgccgtcacttctcgtccattgatcaaccctcctcttcctcaacctgcgtccgatctaacatcagtcccactcagcacctccccttctcctctatccgagcccgaacgtgacctgacgcagatcaaaaacccgattcaagagatacttcttccaaaaactctctacaccagctcacttgtcaaaggaagggaccttgtgactcctcttgccggttggaaagatacgttaggagaagtcttttgggcgggaagaggagcgttttatgtgttgctttgggtctggggacgaaagttcggtggcagagggaaggctgtttggggcgcacttttggttagtcattccccgaaatcgttgtcttctaggttaatctgtattaaatcaaactgcttcccttcctttgtccatcagctttcgatcctgtccagaaatctttctagagcggcctcatcgccgtcgtcggcattgacgccgtcaaaaccgacgtatccatcttcgactaccagccccgaatcttctcgcaaagtgagctcgcttgagagggcagagagggctaacagagataaggcattcttcggttatctattcaggggtgccgtctgggagactctgactcggtccgttgtcaatttcacttttgatctcatattcttccatgagattctgttttcaacactcgtgttgacgcttctgcccctcctttgttgttattttcttcaatggcttggtttcattttctcaaattcaataaaataaatatcagaccgatgttagaatcagtggcaagaaaatcgtcaaagattcccatcgtaggattagtaggtggtgtgctggaggactatattccgttgatcgagaattactattgttcgtctctcttcttctcttcttgctctctcacttttgtgaacatacgctgaacacatgtaacaaatggttgtttcttccggttggtttggctgtgctcgtccgaaatctggatggtttcttagattatacggccgactagtctgtgttgtgtatcatgataatctgtacactgtctcacatgtctgtgaatcattacatcgggggtttcctcattctttctcgttcttcatgctttgtgtaaagtcgactcaggatatcagatacaatgtaaatgcatgcgagacagaaaagtcaagatggaatgcttgatcggggatgatgcaaacatcatatgatgtgacaatacctatggtaattgaatgatggaagataattatcgaattcgatcatcaggatccaaacacctgacccaacttccctctctttcccagtttataggaatcgatttctcttcctgtaaatccgtttacattcgggtgtcgaatccattagaaatatcaagagtagaaagagagaagagatgaggttagtgaagctatcccaggacgcatatccgcacaagacaaacaaacaaaagagaagaccgggattcacaaatgatcgtgttagccttgagaaaactcctcttgccagtcgttgatgagctagtaacgaaggatggaagcagtctcttatgtttttcccacaaaattccgtaatggggatcaatgcccgacatgcaaagagataggaaagaattatggctcacgctgacgacaaagcttcaatgggaacttctgacatgttgagcgccgatcctggttgaaaaactgtgccactttgatccatgatgtaaagagagagcaaggccaagaacacaataatcggggcggtgagaatgacaaacgtgataggcgacttgttaggaggagagcagagagcgtacaacataggatcttgaagcccttgataatattcaacgatccgaacgagcctttcatctgttcattcattacagaattgagcatgaattcagttaaagcagagagattcacccagagcgcaaaggtgtgtatcgatataagagaatggtgcaaacatactatatcgttcttgcagaaatttcatcctcgacctcgtcaactctcctatcttcccttgtcttaatgcgcatgaacacttgaattcattcaactcaatcgcttctgcgctaattgatcgatatcgggattaatcattggtttgagagggaagtaagaagcgttacgagaaacatgcttagcgacattttgagggtcagggagagactcaccaatatgggtcttgaccattgtccgaaagttcatgaattttggagacgtctaacacaccgactgaggtttttcgagtaatattgatgttgttgagaattaagcgtcgatcttctctagattgacttgtgatgaagataaaaaccaagaaattctgacctatgttgatcatcactccggctgtcaagtacaaatgcaagcccatgttgataggatcgatatcgtgagaagggcatccaatcttttatctgttttccaaagataaagaacagaagtagactaacgaatgaactttcgcacaatctccagtgtctgtcgaacattcagttcaaagagatctggggatccaggagtgatagcaattccagcttttgggtcaggtgtcgatttgaccagttagtgatgcgtccaattcatcttgtaaatgacatgtacatgtcgtgaagaatccacgcacgagaagaacaaagtgcacactacggtacataaaaatcagaaccaacccaggcgaccggttgaactactcatgctagtaccgtcgaaggagaagaaggaagcttactaaatcgttcgatccaatctgtaaattgagatatgtccatttcataggacgtcccgatttattaaatccccattggtgtttttcgaatacatagtgagccataggaacaaggtagtctgtcgcagaacatcagccgtgttttgagggggtgtacaagtttttagctatcagttttcgtgattgagtcgagatgttcagtagggaacgacacaaatatattaacctcgagcctgatgaggtaggttctcagccagactaccagaaagtgctgcattcaaccgatcctgacgtggtgtccatccgacaggacccagagggcataaatgacctaaacaaaccagatgatggaggagatatgaaaaattcaattgaatgagcctcaagagaaattgttaataaagaaagagaaataaacagaccgtaacatatttccgctggatgatcccctctagagaagccagttatactcgaagagtagtatctaagtagcttctcagattcataccccggaactcgatcgatcagtcttacaagattggtcgcccacagtgcaaggatgctgatcgaaaagacagacgaaagaacagaacagaagacatacgttaggaagagtaatttctttatggtctcctccggccgcccaactagcgcctctgaactcatgcgatgttgtttcaggtgtggattgtattcctcggaggaaccatccggcggtgatcgagtcccctaaagccatcgtatacgagaactcatccggccgacttgtcgatgtcaaacgggaaacaccaactggtcaatgaatgatccaagaccagcattacaaccggtgatcagaaagtacgagtaggaacttacaggtcccatactgactctgatggacgatctctggctggaagatgagggcaatgcttgatatttttaacccaggttccgttgaaaggctgggccgaagaagtacttcccaatgttttttgcgtttgtgatcgaggcaccgggacaggatagaaaagagagctgagaagcgtcaatatggaaaaagatcggtccatcggttcatcaagacaaacggcttgtcgggaagtttgattgaaggtctttgagagaatggatggtgatcagcaacgaactacatggtcagaaggtaaaaaggctgagaacaacatcgagagagataacaacgtacaggacttatctaatctgcggccaaggaagatgcgtcataacatgtgattcagaaagctgtgctctacgcgttcctgttcctttgttttgtttttgttccttctgtgattttcgtggtattttattttattttattttattacccgccttctttttctttgttgcgcccgttctttctttcctcttctctctccaaccatcatcaacgaccgagctaagcaagagcaagccatcaagaaaacaagaccaggagtgcacataggcaaggttaaggagtttctgtttcttctcttctttctcttcaagaagtaccctccaccatcatctttttctcggaacccatcctactagctatctcttcttgacaccaaatcaagcctcagattgccatctgcctttccttcattacctacaacgccacctctacaagtaacctcttctttacttcgaaacatggctccttcaactcctgccaggtccaacattaattccaggccctcattccaaaactcaacaccgaaccagtccaaatcagggcatgctcagggctcaaacccgtctgtcaatgtcaagactcctgcgtcgaacgctgcaaactggaggactcgagttcggtcgaccacttcgacatcttatgctacccctgctgctcagagcaggaggaggactgtgagcgaccaacagattcaaggtgtacgtatacctctttctgctggctagtttgatcttttggtgttcccctactctccttcctctttccacgtctgcaggagccggacatggcttgatgcatgtagcctctaaactatttgctgccgaaactttgtttcgatgtcttgcgatagatgtcagtatgcatgtcgacggtgcacgactctctgttgccatctacactgtccttacgtagttcattccccctgactccaactcgcggctcgagctgtccctggctgcagcgcttcagcacaccacctctttgttcctctctttctatcaaggttatcattcttactagcacactaagctttcttgctttgcctccttgactcgatgcatatagacccaagatctttccgagaccccaggtttgagttacggcgacactccttcaaccgttggctcctccgttggttcctctctacctgctactccggcctccccgacgtaccgtcagcctcgaaactcgaagaacgttccgtatgttccgtccaaccttcattccaggcaccactcttcaccccttcaccgatccttaggtctgcctgcagacgactcgttcgatgagtcctatgagcaggacatatcgtttgatgaaggcgttgggatccacagcatgatgccccagtctgctgcggccagaaagcttcggcttggaatccttccagaggagaacaccgaaccatttactatctctgctagcaagcttgatcaagactggtctgctcctagccagaccggcgccagccccctgcgatggaggcaggtgagcgaagcatcatcctacgccagtcagaccgatggtgaagatgccacttcaggtctgttttttccttgcgcatatactcgcatgttttcttgtgcacctttctcataacaagaagttcatactgactcaaacttctcgtttccattacagtcaaaactgtcactccggccacgactcctcctagaagcaaaacgcgagccctaagctctggagccgttccccactttcttactccgcctcccgtcaacacacgaggtcgagtgatcgttcccattgcgcctgccaccgtcgctccctcccttcgagggaccagtcgacggtcactctcacctttctacgagaacgatgagccgctgttgcccatcgacaagagcatctctaagccccggttcgccggtctttctcccgctcagagagggactcttgtctcagtcgtcaatcgagccatcgccatcagaaagccccagtcccctacacccaaatcagccacgccaaccgctatattgggttctcaaacaatcgaggcgccaagtcaagcagagccgcagcaatcatctgctatttgtggatgttgcgaagatgagatcaagaaggacggggtaaagattggaccttgtgcctgtgtggtctgtaaacaatggtcagttggatttgcgcttcgtccccagctggatctcaactaaacggttccaagcgtttgcttctctctcaactcaaatagtttcactagtggaatgaagtatgtataagatcagatcaggccgccttctcctcagtgctaatcttgcctctttgtcattcttccgatagcgttgtatgtgatgtagccggaggcatcatgaggtaagcatttacagatcagtattccatctcatatctactgatcacatcgtctggttacatc

SEQ ID NO: 1269 - DNA, 59428 bp, Xanthophyllomyces dendrorhous
gttgcaagatgggtgccaaacctcagacatgtacctgtttatagctaacgacctgtctgtaggtgcatcctcaaaatacttgttcaatcagctgtattttgacaacagagagggaacaattcgcaaaattcgattgatgcgcttatcaacaaagccctctgatttggaacactttactgatccacttatcctcattgtacagtgtgcgcagctaatttattcgtcagaatgatcttattcaagaacgactcaagatgaacaggcctactgtgtaccttcgtgtcggtttgtgaacgaaaggagttatgtatgttagttttattcttgcgaagcggacttttcatcaaaggatcgtctcttctttgtcaaaggcgtccactctcgaggaaagtgtagaagtatagcatagagaaagcaacaatgtgaccaaacgagagtactaggaagaaaatgcccggaaagttgataatgatgacaatatactgtacagcatggagtatacggaaacacaatgaggaagaagataagcaaagacagtcagagacaaagttaaacagagtagagaaagcttacagaaaacaaacaaggagaggcagagcaaagagagtgggagagacgggaaatccttagtaggaaagcaggatgagcaaacaaatggaagaagactgtctacaacagaagaaagagaagaaatagagaaataacggaaaggagaacggaaacgcgaaaaaattgctgctctcgtctggattcctcgagggtgttgagattaatttcagtcgcttctgcagacactttatgaacgatcggtggtgaaacctcaagttgctcgtccgaggatatcagagggagttgagtcggactgagaaaggaagaaatggaggattccgtacagagtataaactggtgtagaggagatcgagatcgcaggatcgatcctccccacggataaggagccacttgttcctgatgttcgttccttcgggcctcaatccaacttgggatatttactgattggggccgttgcgcgggaacagagggtgagccttctaaatccaacgagttctcagcccattgcttcggcttcttgtttgaccgagccggctcatcacaaagtttgatggaaggatcggccgaatgatgtcgaattctttttccgagagaagacttggtagtaggcgaggcccaggcagcacgtgatgaagagcgaaaaagcttgacagaaggcaaaacaaagacgggcttcgatgtcattctgtgaggacgatatcacaaggcgttagctagaaagaaccgatgctcggtaaatgaaaagaggcatttacctgtaagattctacctttttgatgtttttgattttcttagtcttgtcagttttgttgatcttgttaattttgttgattttcttgatgtggtttatttggtttatcatattaactaattgcgtctgtctgacacgtttggcgagtttgatccgtttcgcccgggaaaacatgatagtggacacagttcgattgacagggctgggggacgatggaacattcaactgagtgttgtgagtcagaggaagggaaaggtcagatcgagaggtgatagaaacagtgctcatgatgaatgtgctgatcgaaggaaagaagatggcgccgagtggaagaaaagtggaaagcgtgagataagtcaagaaacaagaacaactgttcctgacgaccagccatatatacctggccaaggatttccttcccttcgtaaaactgatccagggcgcgtcgaagctgcataaaggataagaaaaataaattgatgaacgcgattatattctatttccaggcgacgtgtccgtttgttgtttttcttttcggacgtgttgtgcctggatgtcgcgctgcaagtgttgctgtaagaacgaaccaccactgtgagcaggatgtcatcaagtcggaaggtcatttgcgaccggtcgatgtacaaagacgcatcatttgtatcagtcacagcagttgcatcagctaaagctatcacgacctccgctgggctatccggaacttcacatgcagtgttcctaagaagtgtgagtgatctgagcatgtcagttcggaagctgcctggagagcacatctaaattaatatcacagagagcgaagagcgaagggtaaggaaccgtagatctaagggctgagctctctttacaatgcgacgcatactgacttccaatctaaggacgctgacatccgcttatttagacagtccgtccttcgttctcagcactcggattgtatcctggaagatctgaaagaagaatttgaggaacagttaacgtcgacacctgtgctctgtaccaaatgagcggacatacgtctttatgaaagaagagtcagagttatgcaattgcccacaccctcggccacaacatcatcatgttcagtaggcctcctccctccgcttctactccatacagcctccttcaggttatctcacaatgaagaagagctctcgttccgccaataaatcactctaacagtctgctgatatgacaatatatgtattacacattggaatgatccacggctgtttcattcagtccttggtagaatgtaccgatcgaaaacctgatcgatcgacaggccactcaagagcactaaacgacatttcccagccagtccatcagagatcctccacctgatgcggctttagaggcagattctgcttcctttgccttattggaagctagcatcttttgtaaagcggatggctgtttcttcttcttcctcgatgaagtggtcggattgatggggccactgacactagcgccagaggtagtggagatagcagagggaggggctggtgataatgatgctggcgagctaagcggtgtctttgatgcagatccaacaagaggtaacgcagatgagatagagagaggattaggagtgatggatgatgagaatgctggtgtcttgatcggctgtttgatagaaacacgcgcactggctggagagtgaggtgcaggcccctgcaatattgacgtcgtgagtaggggagaggaaggaagagattccacaggttgttgttgctgctgctgcttctgtaaactcctcgtcttccttgtgctaggaaacgattcaaccacattccgatcacttcccggtctgatattaacatccccacaagccaaacaggtcactctgaccctgttaaatttcttctttcgctctttttctttcccttgatcaattccttttcctttcttagatctccgtagctgtatggtcgaagtatgaccgggaacaagtaaggtgctgcatcgaacgcagctgatgtgttcggtggctgatgcgggaagttcagatagaagacgaagtcgactcaaatggagagcggatagattaggtgaaactgggtagaggtgagcgggtaaatgggagagatgggatagcgtgggtaggctgggttgaaaggtggacatcgtggtttggatgaggaatcagttctcggtcaaattaaaggagttggatgttgaggaggatgaatgcaaaaaaagaaagaaaaaaactagagaaattttgtaataagaaattggacagccgtctagtttaaacttacagtcaagagctcaaacgtcggtggcacttccggttgatctccatctctcttattccatccatcttacctgtatatttaatcacaaacaaccaaaaaacacaggcagatacacattctatggcatcaccagatataataggtgctccagattggcctggaagatacgagcatgtggagtaagctacaaaatgatctgacttcgttcgaaattgtctgtcatatgcccctcagtcctgataatcacatcttgaatcccctgatggatctccgggcttgaatgaaccgatagcatgctacttgataggcctggacccagcacagatatagactccttcgttcctggcgatgctgtaagcaagtttctggctctgatgcgatcgtctgttgggtgagatggatgagggcgctgatgcgcgtatatcctctcgttgttccagatcaagagctttctcagagatacctgcaaaatcttggtcatcggagcaggaggactgggttgtgaaatcctgtcgaatctggcaatgtgtacgtttctcaagatcactctgatgaacgcagcgaatcggtgctgataaacccatacataaagtgggctttaaggacatcaccgttatcgatatggatacaatcgatgtgggttcttgagtataatctctgtccatagcagggcctaagcttaacttcatttcttcacgatcatgataggtatccaacttgaatcgacagtttctcttccggttcgttcacattgctatgcccttaattgtcccgatcaccgcgctcacttctgattcctgtgataaaccttgtagagaatctgatgtaggtaaaccgaaagcgactgtagcggccgacttcatcatggcgcgtgttccgggatgcaaagttacgtcgtacgtacctttctgcttggattctgtgatggagagattgtccattgacgacaatattaatcgtcctctgtctcaacagatattttggaaaaattcaggaccatcctgagtcgttttataagcagtttaacttagtgatcaccgggcttgattcggtggaagctcgaagatggatgaacgccacattggtcggcatggtggatgaagatgaaggtccagagagtatgaagccgatgattgatggtggaacagaaggttcgtatcatctcggaataagatgcatcaagttatgaatcaatagctgatgtttggctgctcaatgtgaccttctctgtcacaggctttaaaggtcaagccacggtgattttgcccacaatctcgcattgttatgagtgcactgtgcgtctacggctcgcctgttttcgatatgttcccaaacctcaatgataactgatagtcaatttcaattcgacactcaactgcgagtgcagctccacatgcacacaccgcctacagctttcccgatatgtacgatcgcaaatacacctcgactaccggaacactgtattgaatgggcttctgtacttgaatggcctaaagtattcaaaggtgagtctttcttgcttgtgattgacaagagaggcaagctgacgtgatagatattgctgctgccatgacaaaaacaaaaaaaaagacaagaagctggacaccgatgatcccgcagacatcgaatggctatacacccaggcattggctcgagcaaagaagcaccacatcgaaggtgttacttggtcgctgacacaaggtgtcgtcaagaacattatccccgccatcgccagtacaaatgcaatcatcgctggtgagttcattgttcaattctcgcgagtcttttcggaacatgacgtgaagaggaaactaactggttaattttcatcgatattcagcgagttgttgcactgaagctttcaaacttgtcaccaacagcgctccttacttggatagctacatgatggtaagaatgttcccttgatgtttctcccgctctgctttcgcctatctttatcttgatctgtgctgacatttcttaaatgtttgacactatacaaacagtatgttggtaacgattcgatatacacatacaccttcaaacctgaacaacggccggactgtccggtctgtgggggagaagtgatagacgtcactatcaaaaaggagtggaagatagaagatctatacgagtggttgaaagctaggcaggatctgtcagttacatttccttcttcctctcttctcgcccatcttctagcttctgtcatcgatgctgaaataaatctgaacctggcatgaaacaatttagtcaactcaagaaaccatccctttcaagtccgaacggcccactgtacttttcatccccaccccaacttgaacttgcaactcgaccaaatcttgaacgactagtcagtgaccttttgaaggacggggatgaaattacagtgacggatgtcgcgttgcccttccaaatgagtcttaaggtcaagttcgaataagaaaagcgggtaagatgtagactaggagcgagacagttgtttacagaatttgtttcgtcgatagttctcttccctcatgattaatcagatttttgatcggtagtgtgaattgagggattgaagattgatatgagaatcagtgaatgccggaggaaaaagagtttgtacataaggcaagaaaagaacaaaggggaagatgtcaaacactataaacgattaacatgatgactagggttcactctactaacaatgaacgagtaaatgaccaaaaaataaaaaagaagaaactatagaaggagtggaaggaagagggaaaagactccaaagaaaggccgaaaaaacggagagaaatcaagatcacggattgaagagagatcaggtcaatgaattgagatctgtgcccctgacaagggcatggatacaggataaagttgtgacgattgaaactatttgattaaggagagcaccggagagacttagatcgaggctccctcttcgcgctcaacagcttcaagtcgagagatttgtctgtgaggaagggccaaattggtacaaaaagaggatccaaaatactccagtcgggtcagaatcaagtaggttagaccttcagaatggaagaatgcagataggactgacctatctctaacagcttcctgccacctttgaagccttccgacctcattcactccgaacccgaagatttttggtcggtacctttcaactttactagcagctgccaccatgctcacactccccactcctgatgggcctgccaatcctccaccgtgtaatccttgacctccttgaccggctgtttgtccgccggtgttggcactaccggacgtgaaagcgccatcgctttggtgtgcggggtgagaaccaggcaaaggtgtcccggagttgttaccagcgcctgctgacgaggcttgttgaggagagagtagtaaaggaagcgaaaggtggggcaatgtcggaggggggactttggaaggaatcatgtgagggtaaaccatgaaaagcatgtgaggaaaggctgatagggcgtgcgttgcagaggcaaggttagaatcaattcgaaaagtaaggaaactgaatagacgaaaacggaaggacctactagttccaaaataggccccatcaatggttccgtgtcggttgcttttcggactgtagatgtcttcacatcgaggacagtacagctttacggctttttgataaggtagatcggacaatccaaccggaagaagcggttgagacaagcaatacaccctagggcaccttccgaagtcggcttttttatatttttccatctgagagcaaaagagaaagagcgtaggttacggcttgatcaacaagtttgattctagaaaagcatttagatgtggatagacgaaccatcttggctaaacctcgggatgtaaggatataacgggcgtggattagaccatataggaatcgggctgaattttcaatcgtttctctgacttcatcttccaggtcttcctcaactgtagatatgaaaacaagtttttgaataagctagatgctatctggcagaaagatagatgtccagaggaaagggacttacagacgcctagagaatcagtaatcaggtcgagtgctcttgagtactcattcaacacctcagcactcaatccagtaaggttaaatctgtcaagaatatattcctcatcaacctccgcatagtattcgttccctttagtcagaaggaaccagttgatccatcttgggtttgagcatattcagttgtgaatgagtcaggtgaagacaagaagaaaaagaagaaaatcaggaagggaaacgatttgacatgaataggtacaaagaaacaagtaaaagaaaaaaacacgaacgagctgttgtactctgagtcacttcctgttgagaggtcgtccattttgagatcaaatggaagagaaggagaagaaagaggtgaacgaataagtcgagcgagctgatggaaggaaacgaggacgatggaacgatgggcacgggaaagatcaagtcctacaaaaagcggcaccttttttctccgtttcgcaactcaaacattttctaatcggtcattacgacactttgtaatgtttcatatcagtcgacacaaatagcgagtctcctcatcaattgaggttctctcagaagatgcaataccaggttctaccgcaacaagtgtagttgcgaatgaacatcctgtgatctcatcatatagatgaaatataggcaatcagttcagtacacgatccgttttgagcactcgactttctgcagtacgaggtttccttcgtaatctactcctcaagcgtacacgcatgattgctttgttaaggccttcaatatttatctctctagtcagttgagtatacagagcgcagatatttcgtatctgggcaatctatacgagagagttcaatctttgtatgttctctgcataaacactctaagatccttttcggggtctctcgtagccagctgcacaacgcaccgaaatccaggcataaccctacgctgggtgcgcccagcacagtttggcagcaatggtgaactagacaacgatattatttttgaagtgatgtggaggacactatcatcagaagaactttatctgggtcgactgactggttttgtgtcctcttgcttcccaatgtgattacatatatattaatttcgtcctgatacagtgctcctgtagcgatggttggaagaggtcgggtcattgagtagcatgatcagagaatacggtttcatagtttacgtatcgacttgtcttctcccttgcgctgatttcattttttcttgcgttttttgtgatcacacgagtttgatgaggaaaaaatctcacttcaagctctcacagtctgttctgacgaaacattgtatatgagggttctattagaccgtgatgaaaacattagctgccatgggaatcaagtcttgaaagtttgtctacgtaatttgagacttcaaatcagttaattcttcagatcatgaacaacgactctgccgagtcatccgctactcgagaatgtcgggcatgaggttatgttgagtttgctgacttctgacgatgggcaggcggtcatcgacatgatcaagactgaaagcgacaacaaaatcatcccttcaaactcctccgactctggtccaagcgggttcttttcatgcctggtcaagtatataacaacaatacttgagatatgatcatgtacgggatgacgtactgaggataataagggttacatacaatgtgtgacgacagtacaacaactcgtagagtctcaagacgaactcattaagtcctttcaacgcgtcgcgtgccgcgtgcggaggaacgcggtcagcttgacgcgtgctgttgtcacaagaagtttcatccaaccgaaccgatcgatattgtcattccctgcttccatcatccttctatcttttctttttggttgcttccttcatcggcactctcttcttcctctttttctctttttttttgttctcactttcgtctttgctctatttttctgcttacgcaggtcatcaggacatcccttgtaaaatccgtttgaaagggaacagagcaaaaccttccagcatatacccataacatataccctccatttttctgatccttcggttctgatcatcaacagcccatcttcagccttcaactagagcatggcacgaggtggaaacccaatttttggactaacctctggcagaggtaccggtggacgaggcagaggtcgcggaggtagatccaacactcagttcactgggagtcgtcgagggggtcatggtgccgctaacggcaaaggttcaggtccagctccagttagagcagacgatggttctgcacaagtggagaagttcgaggatatcagagtcaaagatgagatcgacgagaaacttggtttctggaggtgggaagggggaggaggaggcgcaacaggcgaagaggattctaagattggctggctggtcaatatgcatcaggtacgtcgtcctcaaacctaactatcaagtctcctaccgtcttagtcggggcagaaacactaaacaccttcaccttgcttttttcgtcgtcgtacaaattctgttgacagaccctaacgcaggacgaacacattgcaggaggtcgtcaagcgatcgacctgtacttcattcaagacgacggaggcatgttcaagagcacgatgccatttgagccatatttttttgtcggatgcaaggttggtcaatcatctcaatggtttctagacaacatgctaactagtttctgttttttaaagcttggaacggagacgatagttgaagagtggcttatgaagaaatacgaaggtcttctcatcaaagtcagccgaacacggaaggaggatctcaaactcgtttgtcgcttcccttcgttataattcctactcttgtttatctcaactgaatcatcgtcattcgttgttttcactagccaaaccatctgaagggctatcgaccaacgtttcttcaacttttcttctataacaccgccgacctttacgctgtgcgccgcgaaatcgttccactcgcgctctcgaaccggtcaaaacttgatgctgttgatgcctatgccgaggttgttcaagccactatgggcgttgagattgagcaagggttcggcgaggacagcataggtcagagttgggcgggagaaggaatgaagagaggaagagacttggatccaagtgaatgtttgaatgacgtgagggaatacgacgtgaattattacttacgagtagctattgatctaggtccgtcagtttaatctttggggcgggttattggacactcctctaacgcctgtttttgttcccaccttcataaatgatgaccctatagacatccgagtgggactttggtacaccgtcaagtccatgtttggttcaatatctctgaaaacgatcacagaacgagtgaagagagccgaaccggtcgtcatggcattcgatatcgagacctcaaaatcgccccttaaattccctgaccagcaggtcgatcagatcatgatgatctcctacatggttgacggaatgggctatctcatcacaaacagagagatcgtgagtgaggacattgaggatttcgaatacaccccgaaaccagagtacgaaggcccattcacaatcttcaacgagcccgatgaggtgcgctttctatatttattcttctgactttttactctttgttaagcctcagataaggtacttggatctgaccgagaatccttcaatttgatgacattaggcagcgctcatcagaagatggtttgagcatgtccgagatgttcgaccgaccgtcatcgctaccttcaacggagatgctttcgattttcccttcgtcgatgctcgagccaactttcatggtatcagcatgtttaacgagattggcttcatgaaagatcaggaggatgagtacaagtcgaggagttgtgttcatatggactgtttcaggcatgtctccaaaattcctgcttctttctctcaagtgacacaagctatcctcttatggctgactgatcctgataccgtgcttgctgtcgttcacagatgggtcaagcgtgactcatatttgcctcaaggaagtcaaggtctaaaggcagtcacgacttataagcttggttatcagcctatcgaactcgatccagagcttatgactccgtgcgtttccagttcgattgctctctatttccgtcttttatctgtgcagatgattgaccgctgttttgctctccttgacgcatgcctttttgatgaattgttaggtatgcaattgaacaacctcaaattctagcccagtactctgtgtcagatgcagtagcaacgtattacctttacatgacttatgtccatccgttcgtcttctctttgtgtaacattattccattgaatccggatgaagtgttgaggaaggggacaggtacactttgcgagacgctgctaatggtaagactcctaaactatcttggctcaacttatccccttttgtccaatcatttgacctgcttttccccttttatttttatttttatgattaggtggaagccttcaaaggagaaatcatcatgccgaatcgatatgaagaaccttacgggaacatgtacgagggccatctcttatcttcggagacgtatgtcggtggtcacgtcgaagctctggaggccggtgttttcagaagtgatataccaacaaatttcaaagtagtaccgaccgctatgcaacaggtgtgtcatatctctagttcttgtacaccctgaagcttgccacgatgaaactgaaggaggtctcggcggtctctctcttcagctcatcgatgatctagactccgcgctcagatttagtctggtaacagagggaaatgtcaatctagccgacgttgagaattacgacgaagtcaaaggccaaatccagtctgcgctcgaagaactccgtgacaatccatctcgaatggataaacctctgatctaccatctggatgtggcggctatgtatccgaatatcatgttgtccaatcggttacaacccgattcaattgtggatgaatcgatgtgcgcgacgtgcgattacaaccgtccggacaaaacgtgtgatcgtcgtatgcaatgggcctggcgtggagaatatttccccgcgaagagggacgaattcaacatggtcaagaacgcgttggaacaagaatcgtttccgccgaaatggccatcaggaccgagtcgccggttcgtcgacttgactcaagtggaacaatcgacacttttacataaacgattgggtgattactctcgaaaagtataccgaaagactcacgagaccaagatcattaacaaggaggcaatcgtatgtcagcgagagaatccattctatatcgacactgtacgggctttccgagatcgtcgatacgagtacaaaggtctacacaaaacctggaagaagaatctcgacaaggccgccaccggaggaggttcccttgctgaaatcactgaggctaaaggaatgattgtcatttacgattcgctccagcttgctcacaagtgcattctcaactctttctacggatatgtcatgcggaagggagcgaggtggtactcgatggagatggcaggtatcacctgtctcactggagctaccatcattcagatggctcgagaattggtcgaacagattgggcggccgcttgagctcgataccgatggaatttggtgcatgcttcctggaacgttccctgaagacttcaactttcaacttaaaggaggtaagaagtttggtgtatcgtatccttgcacgatgcttaaccatcttgtgcacgccaaattcacgaacgatcagtaccatgaaatcgtcgataaagaacgtggcacatacgccgtgagaagtgagaattcgatcttcttcgagttagatggaccctacaaggcgatgatcctaccatcttccaaggaggaagacaaattgctcaagaagcgatatgctgtgttcaatccagataattcgcttgcggagttaaaaggtttcgagatcaaacgtcgtggagagcttcagttgatcaagattttccaagctcagatcttcgagaaatttctactagggaccaccacagaggagtgttacgcggctgttgcgcaggtcgctaatcaatggcttgacgttcttcaaagtaaagcggctagcttagaggacaatgagttggttgaattaatctctgaaaatcgaagtatgtccaagacgttagcagaatatggatcacaaaagtcgacttcgatcagcacggccaggcgactggctgagtttttaggagaccaaatggtcaaggacaagggacttgcctgcaagttcatcatctctgccaaacctcacggagcaccagtgacagaacgggcggtaccgattgcaattttcgatgcagagccgacagtcatgaagcactttctacgcaaatggctcaaggacaacaggtaaaaaaattccctcttcaatttgtatcgatcacgaaaagaaaaactaatctaatatttctacgacgtatacgttcagtatcgtcgacttcgatcttcgctcaatcttggattgggagtattacactgaacgtctaggatcagtcattcagaagctcatcacgatccctgccgctctacagaaagtctcaaacgtaggttaaaaatctcaccttgtcgtgtacatgatctagaatcgactgaccaacatactattttctttgttaacactgcaatcagccggtaccccgagttcgtcatccagattggctgcataaacgggtggccacgaaggaggacaaattccaacagcacaaacttacggatatgtttgctcgacaaaacgctgccaactcttctgttctgctgtcagctgacatggaagattttggaaaaccttcggcatcgagcaacggcgcgctcgcagtcgcacgaaccacgcatcgacaatcaaaagttcaacaagaagaggctgttgttcaaaagatcgaacttccgttgagagatgtaaatctaaactatccaggttgggtttccgggatgaaaaagaaatggaagaaacagagagatgttagggcgcgtggcatggtgtccgggggaaacggtggagccagatccggatacgacaacagttcaatctcctctttgttccgacagaggacttttgggttgagctcattgacgtgggaagtcattcaggtcacgccgacttcccgaccggggttgttcaatttatggcttctgattgataacagtcttcaaaaagtcaaacttcgtattcctcgacagttctatctaaatcttcgatctcccccggaaaaagacacgttcttgcccatatatcaggccgagcctctcgtgagaacacttccaagaaaccatccatgtctaaacttattccggatcaaagtcgacgaacagctttatcttgaaggagaatctcacttctcgacgttaattaataacccaaaagtcgatggtgtatatgaactccaagtaagtaccagctcatttgtttagcaggtcatgaaatgattgctcatatgatatcttgcaatttgtgaccagattcctttggttgtaagagctcttcttcaatttggaaacacatgcgcacttgacaagactgtgaagggaggccttaataaaggacttgatgaaggtttcgaccttgatcaactggaacggattggaccttctctctcaaagcggccgtatctcaacggtggacaaggtataagattcatcttcgtctaccattccactcaagacagccgtcatcttcttggtctcttcgctcctggtcaaaccgcgcgagtgatgtcaatcgatagtgcccgagctcgtcaacaaatcaaccatcttcccaagttctatgccgaacggcattcaaaatcacctgatacctttctgaagagtaatctgttcgactaccctgaagaacatgacttcgaggtctcgtatcatttgactgatcaggcaggtttctccgccttcaataaagagctcctcaatctctcttcccgaagtcaacctacagtccttgttgcctttacatctcaaccgcaacaattctttgagcaacgtgtgtctgcatttggaaattacccagtcgtcatgatgcacagtagcaaagaaagcgggtcatcactcatgtggctcaatcatacgacccgtcgaatggttgttgcttatctcagcatggaagctcgactcagggatctaatcgaggttgctcgtcatcatgatgtaccggtcggtaaccttgaggcagatgcccctctcttcctcgcagatattgactttgcccgccggctgcagtctcaggatgctgttctctggtggtcggcaggcccaagacccgatttaggtggactcgaagatgatgcaaatactccacaagctattgatgaactcgctagtccagagttctcaaacgctggttgttacaccaacgttactttccgtatcgcagtccaagatctcgctatcgacgccattcttcaatcagctttggtcaacgagctcgaaggtagtggatcggggtccatggcatttgattcagcctcgcacactttagacgattattcgagaggaagcgcccacgcgtcccttacattgggggatgctgtcttatcaacccaaacgtttggaatactcaagtcgatggtcaagtcatggtatctcaataaagctcgactgtctggtgacgttcctgtggccgatatgctggtggataacttctggagatggatcagttccagctcgtctgcaatgtttgatcccggcgtgcatcgattccttcatgggttgatgaagaagacatttattcaactcttggccgaatttaaacgactggggtcctctgttgtatatgctgattttaacgagatcatcctgttgacgtcgaaaccatcgacaatcaacaccgttgcatacgcaaagtatcttcttaccgccgccaactctaatgaacttttccgtcatctctccttcgagattgtcaacttttgggagctcttgctctggatggacgtccagaatcatggtggaatacctgttatgcctgaagaatgtttgtcccatacatttgttcattgtggaattttgtctgctgttcgttaatcgtcgttactctcattgtcaaatctatacagctgcacaagagattgaagttggctctcatgtcatcgatctcgattggaacatacgttctttccttcctcccgctctccaacacgatttcgaaatcatagtgagcacgttcatcgatcagatgtatcgagccaaacgacaagcgagcgacaacgaacgtgagcccctgcgagcgattcaaaaccttactcaggctactggacctatcctcgatcctattaaaaccaaggaggttggttatgggaaaaagatcatcagcaagaacttgacacgaaaaatgctaggtctagttcagaacattttgattactcaacgtcaggctgccacccatccagaaattgtcgagaccttaacgtttcctaaacttcccggtgcccatcttaaggtttctaatccggcactggaatttgtcaagaccgtctgccacgtcctcggtttggcgcgcgatctttcgatcgaggtgcaagttcttaagcggaatttgcttgaccttgttggggttcgagagtttgcggatcaagcgatcttcaagaacccatgtgaagttctcaaactaccctcagttatctgcacacactgtcagatatctaaagatctagatctttgtcgagatccagaacgcctacctcagcttgtagagcagagtttggatggtagaatcagctgggggttaatccctccccggaacgcaacatggacttgtccacagggccacgctttagaatctttaacaatcgaagttcgtctggtagactatgttcaacgtctagtcctccaatatcaacttcaggatgtgagtcaatttatcctaccgctctcttccctttcttgttccatggtcacttaattacatccattacacgtctgtccttagctcgtctgcagtaaatgcaagcagatccgagactctaatctgacaacaacatgtcagtgtggatcagcgttcatatcgactgttagtcatgtagagttaggcaagcggctggcgttaattgtttccatcgcggagtatcatcatttaaacatgttaaaggaatacgcgtgagtattcaatgcttcatggactttggatacgcgtcatttgaaacgagtagatacgctaacagccttctcgtcgtatctattttctgaatgcagatcgaatattatagggttttggtagagcatccattcatcatttctagattcgcccactttgtattcatcttcatctccaatctctctttctttcttttgtccgttctataccatcatgttgtaatatgtcattcattctgatcagctggcattgttgagcaaaactacggccggcggaccgaatgccgccagatatatatcagtcaaggcttatcgatgattatatttgacatcaaagtaggcatcatcggcatatacaatgagttcgtgctacatatctcaagtaaagcaggcacattctattcatctacatctatcgtatcattcaagatgtcccttatcaaaggacgggacttgacaagcgcctgtctcccaatcttcattttcttgctagccaaactcttcgaagaactctcttcggccgaagatcccactagacacccttgttcgccttctacatcttcagttcgaattggatgatctgaagacacttctgatgaccactttctcactttctcgatagaagccgcttcctcgcttgcttcatcttccgtttgcagagttgaagtgacaattgaaggttctatcatgatcgaatccgaggaagatgacaagtcgatagtgtcgggattaagagaagcaatccgaccgttgttcttcatgagctgaaggaagcgtgcgagaagagtatcgcacgatagagttgaactagagccgatgatgatcagtttcgacttggcgcgagtgaaggccacattgatacgacgccagtctcggaggagttcaccgacctattcatcaacaatcccatgtttcgaagttatcagcgatgataattatgagatacacatgcacgacagaacaaggagcagaacctaccgagccctgttcattacttcgcaccatgctaacaatcacgcaatctttgtccctgccctgacttttatcagctgtgagaatttcaactccttggtttatattggcttcgagtttctgctgaagcaatttaatttgttgacgatataaagttatcacagctacctgacaaggcatcagcccggcgactacagccccttgaactatctggagcagaaaaaaagttggtgaggtcgtttttgtgcaatagatcgaatcaagataatccatacatactctttgaactagcgtggcttctcctgtattctggactaaatctcctattcttgattctctacatggtatgttgtctgtgtcgataaagacgacttttcgtcttgttcgagatttgaagaagaaagcaaacttaaccttgacaactacgaagggcgcatataagagaccttctcagaacttactctggcttcagtatattcttcaaccaatgctccccctccgttcttgcgcacatgtcctccaatttatcccatgtagggtagttcagtgcctgcttctcgaccatatctgagccacacctgagttttccctcataaatgagttcattcgagagcgacatgatttccttgttcattctgtactgataggacaggtccacagatgctgttggatgcgcttcatgcagtcttcggaagagagatgtttctaaacctccgagacgtgccgatgggtttttgacctacacaatattgacgagactttcatcaaacttcaagaactgtttcaacacctgttgatagagaacagaagaccaaacgtaccaagggaggcagttggaagtgatcgcctactagaataaatgtacgagcgaatcgtagggggcctaggcaaacgggcaacgtgatttgagaggcttcgtcaacgatacagtagtcaaatgtccgctgagcaaacaaaggactgaggagcgtttcgaacaaaaagagaaggtacactataagttcgcgatatggtgcttgttgaaaaggagccaggaagagaaaactgactggtctattgtcaatgctgtggttgctatcacttgaggactcatcagtcgccgttcaaactcttccagattatctgctgggcgctgtgctccgagcgtcagatgagagatgtctgggtgaacctgatgattttagaagtgaaatatgtcaagttatccgtccgggtatatccaaaagtgtagaatcagcgtactttatcaggatttcccaatctcagaatttttacatctgtcttaatcaatttggtcagaattgtatctaccgctgaatgggtatagctagtcaaaaggactgatttccctctcttggataaagccttaatgatctctacaattgtcgtcgtcttgcccgttccaggcatacccaatacgagcgcgtagtctctagcggtgagaaccttggtaagagcctccgtttgatctgtgttcaagatagaaggaatttcctgtgggagaggagcctggctttgatcgaataagggtgatcggagatccacaacaagcgaccgaagttgagctggtgcatcggagtaaaatagctgagccaagttatctcgaattcgacccatccctgtagccaattcgtctttgtcaattcggaaagtcggcttggagatctcggttgtcattgaattgactgttttaacccgacgagtccgagcgagtagcacattcacgtcaagtgtatgatccaatccaactacgatcgagctagagctaagctcaagaataaatcctctcgatagggaaagaagattaggctcaatcgagactgtcaccggatcgccaacagaaagatggccagtcagaagggagctttcaggattatttgtgccgaagagactaggagtagtaggagagagatgtcggatgaaagtatagttgtgtcgatgaaccttggttcggtttgttccaatctccagggtatatgattcaatgcgcattccagcgaaacatctgaaatattggtcagagtgaatatttagagatagttgagctgtcagccaacatcaaagtgaaagagacgatgaagacgaaacgtaccttccctttttttccctctcgacagctgtcatcgtccataactctgcctggaaacgagtcacgtcctgttcctccaagctaatcaattgttcccacgtcttgaaaaactcggtatggttatctgtcaggtgggatgtcttatcaatatagatttcggctactggtgaatcaacgtcgaggacattttcgaccgcctaaatataccatgaccaagcatacagaagagaattaatataagtctgaaacggaacatcaaaggcgcgcaagaaaaaaaatatgagggacggaatactcactcgtcgatacaacatgcatgagtccacctgatagcacttcttgcaactataagagtcctcgatatgaggcggcagaaatctctctgctgcttcaaactttcccgctgcacttatgaccgccgcgtcgtgcttgttcaaatctgttccgacattctcaatctcaactttctcctcggatgccaacgaggtcaattccattggtaattttttaacgatccgagaccgttttttggagaaatatgaagcgatgatattcctcgccatgatgagagagcgaagttcaaatcgagcggcaggaaccttcatgatagtgtccgactgggtgtagtagaggagaccggcaggtatgggggttgctattccaatcaagaagaaaagatgacgaaggtattaattcaaaacggtgcgaaaaagaataggaaattaaagacatgaagaagaagatactgcacaccatatcggtcttccatcaacaacgtatacagcatagtttgcgctcgatgctccatcacgccaaccgctcttcctgtcttgatctcgaaaggcatagtccaactttgactggtcctttccttcttacctgctgagccagatcctaaccctgtatccaataaagttgcctggatggatacgtcaatcttcccctgcaacccccacataggagatctgatatcttcttctatatcatgcagtccagtcaaagccaacctttccttcgaattgtgcaaataagcttcgtcttttggttcgcaccctgcgtctattccaaccatgaatttctcagccagacgactgatactgacggccgccttctccttaacttcataccaaacttcatcccagctcaaaccagcccggtagatctctcctttcatagtttcatctgaaagggtggcttcaacagcttgacgtatattatttgggctgaaagtttcccgagtcggataaggtcttgttgagaagagagactgaaggcttgtgtgctgtatattgccgtacagaagagatttagttgtctttgaactgtgcacgaattgaagaatgagaggtcattgcgttagacgatatgcaagaaccctcaatttatatccgtagagaacatacgatgtttttgtgagtcgttgcaaaacagactttctcgaacaactcaaaccggacgatattgtggtattgggtatcagaagatccggatgatagatcaagaagttttctggaaagtcactcgcaaagatgattttcttaagctcagcagttgaaagcccaggtttgacttcaacggagtcgtcctcgacgaagtccaaagaagaagagatgacgttcacatgttcacctaggttaagacaacaaagggaaataggtcattggtggaagtatttgtcgatagaagataaggacatacgagcgcatattggtaagtctgcaaaatcctctctcagtatcaacaaaagtctttcttcagactgatgaattgaaacgtctacctcctatataccagcaaaaggcagaacaggtcaaagtccatcggaagtcattgagaatatgtcatcaagtttcgtactgactttaatcgaaaaacctctagcatctttcccttcacattttctgacttcaatcacattgcatctgacccatcttttgggtttccaatctggaggaggctctgtcggaggagggtttaaatttattaaagccggtttgtctttcgttcgtcttgtaggggaattatccggactggagctccaatcgtcacttcccaaatcaaactgaatcccatctaagagcgacgaatagtcacctcctgatgtttcaagttgagatcctatcgacggatcttctgctttcgaagaaacacgcaaacctctatgcggcggtcgaactgaagtatcagtgagcgtagaaagagtacgaggggtcgttccagggagagttcgagatactactggttttgaaagtggatggttctgcaatatattcgaggtactttgggtcggacgagtggatgccggagtgtttttgacaggagttgggacattcgatccttcagaatgagtcttccgaagtccagtcgaagccttccggatggaaggactcgattttggtacagcctgtttgacaggttgacgagtccggatagacgcatttgaaggagatgagaatgattcactgaacaaatcgtcctctgtcaaaccagagaggagggtctgcatgaattcagcttcttcctgggcagtctttggcatttggtttataaaatcttgtagaagttgatggtgatgtttgaaagggcggagtcgaacggtctcattcatcaagactaatgacgctcatttaattgcccttgacgcgacgagacgcgtcgaaacgcgtacataaataaattgcttcacgtctcatcttgcatatgatcttgaagctgatctgagccaaaaggatatgttccacgttggtcatggtaatcaaaaaaatcactatatattcactctgtttcgaactacgctcagccatgattcccatcctctttcttctaagcctagatgagtgacgaaaggtagggtgaagaatagtgaatatcaaggcatcggggtagagggatatgagtatcaaggtgcggtaggcaacatcggtcgaagccacttgtcggccgcctcaaattgatcaacgacgtgcttctgaatgtcgacattattaggagtctttcgactttggctcgccgccagcgatcggacagcagcgagaaccttaaataaccagccatgaacataacatgttagacatgtctattcatcatgacaaaagctgagcacaactgattgacagaggttaagaagtaactcacggcatcccagaacctaaatcctctctcgacctctgccctcgcattcttaatgcccacaaagttgtcctcgacaacctccaaggcctctttctttgcctccttagcctcatccgacccttcctctcccgcttgcacggcgttaccgtagattgcaattgtcgcatccaagtataccttaacgaggataccaaaaccagtgttgacatctgtctgaaacggaagagagagcgaaatatcgaggaaatcctctctgactcgtcgagcttcgttcctcagaagcatgtgcaacgacacagcttcgagtaaatgccgaagagagcgagaaagagatttgaggaaggagttgaacacaagtagttctcgggacagcgggccagaccattgttggttctgagcaggcatatagaaaagcgagggttgagtaaagtgataaagccaaatagacgaagccgagtgcaacaactcaccttgaaggtcaacggtacaatgctcaacactcgcatcactagtaacatcgacgccttctccgagtctactccattcaggtcaaccccaatcaatcagaattggcgcaaaagatgagaaatagaagcaaaagatttctagcagctagctcacctgtaccgaaactgggacctccactccacgccttgccactccaaagatctccatgaagaactcccgctcggatgagctccagtgccaagtagagcggctcttgaaatttgtcgttcacccgtgatgctttaattccagtgtgaagtgcctgggctagtgttccatgagtatggttctgattgaagaatctgcgaaacaaatcaagaagtagagtttgaggaaaacagattggcatctagcgagaagtggatgccaaagtaacataccctctgatatccaagaacctccagattacgttggtcacaatctcatcctttttctcgagaggcttgagatgcgcggatccgtctttgctctccttctcgcgatctttatcgtttgaggaaacggcggatgaaggaaccttaggtcttctagttcgagcggcgtattgttcttccgaggttgctcccaagcacaaagcaaaatcaattgtggacgactgtgacacgacgagataaaggtcaagagaggctgttaagtatcaaagtgatagctggacaacataattgaggcagacgggcaaaaaaagatgacccttacattctgtcttcttaactcttcttcgacaatcaaacaaggcacatgccatccaacacatcggtcgataagggctaatgtctgcttatcgttgtgtggcactggtcgaccgactattctagcgttgggaggagagttagaagtcggtgtgttgaaatagtaataggccagctatgaagagaaacagaatatgaggtcaaatgttttattctgatatagaggctgaatcaaatcaaacgtctatctgactcaccactggcttctttccccagaatgttggattcaatacagatgaaacaagtgccagtgccgtacatcttggactagtgtttccctcggtgatgacctcttgaatgaatcttctaaactctgtgctctctccgttatctaacggaggctgttcgacaatcatcccactcgtaagccagccgatcagctgcggcgaaacaaggccacgactgatctggaagtagatttcgtcaggcaatcgattggaaaagacctcgtgtagatcgttcgggatctcgctcgcggaaactatagactggtgtggttgatgttgtgagtgtgaatgatgctgagagtgttgctgaggaagagagagtgggagcggagtgcaccgtccttcttcagccgtgagaacaaagctgaatttgatggcgcaccgggcacggacgaataggtcgggataaccgagttctttgacggccgggtcgttcaaaaaaggagagatcgccgtcactccagatttaaatcctttgacggcatcgaataccgctctccacccaccaggcacaaatggagggaaagatggagtgagttctgaaccagagagaagtgcgatgtcgaggaattgatcttccgataggttaccaaggtctttaaggacttgggctttgttgacaaacttcagcgtcgaagcagacaggtcgagactgagaatgagccggtcgacagtagagttggtatagagaagcgcttcatgggatccatagatagaatgaatatacccgtgttggtgtttctgaaggtagacgagctgttcaagtgaagcaccataatcgacggtttatacatcggacgaaaggtacatcaagagtatcgatctagataaaattaagcggtacgtacttgggcagaggtcagataaggagcaacaatgaattcgaccgagcggtgtctgaagatccgaagcacaagcctaaatagatctctttgctccgtccagacggttccctctagtagcttgaccgtctcgtccaccttgccctcctcatagttctcccaagcttctcgcttgataccattctccctcggagtatctacgccattcttcccaggtggtcgtttggcaagcggcaaacctggacaaacaaagactggtttgattcttaatttttcgagggatctaagatcagcttcaatgagcgaggtaatggcgagaggttgaccaccggtggtagcaacaagaggctctcgcgttgcaggggaagagaggagatggcgaagatagtgaggaagatcaattcccaaccgagtatcagccagggcggagagtggacaagtttggatgagctttcgctcagtgaggtaggctatttaaagaaacaacaaaaaatgagttagctgctgaaacaacagaagacaaggatagagagaaagatgttcaggatggacctgtcgaaagaaagagaagggacaaataagaaaacgatggatggaaaagacaagtaagaaacagcttgagaatttggacatcatgatggcacagatcaagtcatttcgtagatgataagaaggcatatcagctcaactggaacgacagacataccttcaaagttgcgtatcatcgagaaagccaaacgagggaagggaggggcaggtgaggggatggaaggggtgtagagaaagagaacgagagatgggttcgtgtgggtagatggcaagcaaggatgagcgtgatacaggcggtgtaaccataaagtatctgattttcaaaattatcatatacacttaatcataccgtcgcgtcgcgtcatgcgtcttcttacgcgtccggcctaatgagccaactgcaatcaattgattttccactcctttgaaacttggtcttcaccacacttctgtttcatccttcatcctcatctgatcgatcttgagtttagtacatactatgagtgatctcgagctcacagacgacaaggaagaggctcctttcaacgtagagtaagttctctttatcccgtttcgttcgatcgatcgattgaaatatataacctctgacatattatctctacatgttcatcgttaatcttcatccccccacaatcctccagagacccgatctccaccttgcccttgtccaagaaacgtaagattgaacaggatccagaggttgccgccgctccgcctgggcttgcaaaggcgagattagtcaaccgaaagattgccgctcaaacacaggagacgttcacggatgttctacaacgcttggctgatcaaggaggtggacagggagggggtcagtataatccctcgcactccctgattctgtcgtaggcatggcatcgcacaaaacacggttatctaagctggcataccttatcatcatgtttctcgttgttgtacaggtcctgtcgaaacatctcagtcctgggcccgtccacctgtaccgcctgtagatcctcgcggaaactcaataagtcagctttttcgttcctgttcttcagagcactcgaaacatgttgttgatttcattggtcttcattcatgtcctccttcttcctttctgaccaaaaagtttttcagcagattgatattgaggagcacaacgagcctaatgtgggacccagtctacgaatctttggagtcaacgaggtaagacaattgctttcttgagctttgctgactaaagttggagactgagcgtaaaatattttgtttcatctcgcaactactctagaatggaaactccattctcctccatgtcaaagaatttttgccttatctctatattgctgctcctcgaggatttgagaactcagattgtgcagcattcaccaatgcgatcaacgtcagtccgccttatattgcagctagtctattggcccactgactatcatgactttgttttacgtcgattagaacgtcttgagcggtggatcaggtcaggtagctctgtcgacgaaagtggagatgaaaaagtccctctggggttacaaaggagacgatcgatcaccatttttgaaaatcaccttgagcgatcccaaatttgtctccagacttcgtggtatctttgaaagaggagagtttgcttttcgagaacttctggatggacctttgacatcgtatgagagcaatatttcgtacgaacttcgatttatgattgacaccaaggtaagctagatcatcaatcgtatcggggttcacgagtgtttgctaagatatctggcgctgtttgtcaatggctccttgggaaatagatcacaggaatgaactggttagagattccagcaggcaagtacatcatccgaccagcaggcaggaaagtttcgaaatgtcagattgagatggactgcaagttagtgattcctctgtgtttcgaagcgataccatttttctttctcatctaattctactcttcccttgctacaatcaagatccgatgatctaatctctcatgcgccagagaatgattggtccaaggttgcgcccctccgaattctcagttttgatatcgagtgtgctggtcggaaaggaattttccctgaggccaacattgatcctgttattcaaattgcgaatatggttactcgtcatggtaggtctgatttctgtattttcttcgttcttttatcaatgtttgtttgctttgtactgattgacttatgttcctgttttaccgcatacaggtgaatccaagccttttatacgtaacgtattcacgctgaacacatgcgcccatatcgtcggctctcaggttttagagtttcagaaagaagaagccctccttcaggcctggtcggatttcgttcaggaagtcgacccagatatgattattggatataacacgacgaacttcgattttccgtatctgttggaccgagccaaggcgctcaaagtcggaaaattccctttcctaggaagactgctcagtacgtagtgttcattcttctagataaataagaaataggaaataatagtccaatgcttatatgatcttcgatggctttatgcaacactgatagatatccagacggaagccaaagacacccattttagttccaaagcatacggctcccgagattccaaaatgatcaacttagacggtcgactgcagctcgatttgctggttgtcatgcagcgagactacaaactgaggtcttatacactcaatgcggtctgcgcgcaatttttgggagagcaaaaagaggaagttcattactcaattattactgagttgcagaatgggacagccgaatcgagaagacgtttggcagtttattgtttgaaggttcgtctgagaagattgtctttttttctcctgagtgcgatcacgtttagactctagtacatgcggttgagagttttcgtgcttttcataatatcacatccacaggacgcttatcttcctcagcggctcatggacaagctcatgtgtttcatcaactacactgagatggctcgagtgacaggagtacccttcaactacctcctcgccagaggtcaacaaatcaaagttgtttcgcagctcttcagaaaagcaaacgaagatggatacttggttcctgcgatggccagtcaaggttagtgaatcatcctggcgttatgtctctactccaactgttctatcagcacgttgactaactgagactatcctttctcaaattcgcaggcacggacgagcaatacgaaggtgcgacagtcatcgagcctgaaagaggttattatggtgtcccaatcgcgacgctcgatttcgcttcgctgtatccatcaatcatgatggctcataatctgtgttataccacgcttgtcgatcgaggcacggtagagagactcaaactagtcaaagatgaagactatatcttgacaccgaacaaaggtctgtacgataatcaaggttaggcggcatgcgaagggatctcatcatgacaatgttgacctatttgctcttcatgatctgttcttgtagatctgtttgtgacaacaaagagaagaaagggactcttggcaattgttttggaggatctcctttcagctcgaaagaaggccaaggcggaactgaaggtagagacagatcctttcaaaagagccgtgttggatggtcggcagctagctttgaaggtatgtatcttttcttgtattttttatcttctctgtaagctttcatgttaatgattggatgggtcttcgcatcaactgttgaatttaccaatggctcaatagatcagtgccaattcggtgtatggtttcacgggagcgactgttgggaaattgccatgtttggctatatcatccagtgtgacggcttatggtcgtgacatgattgaaactactaaacaggtgagtcttcactccaactcttgtggttatcacctcacatgttctctcaggtcgggcacggaactgaattgtgtcttacatatgatgactacgtaggttgtcgagcaagagtatagtatggcaaatggacacgaacacgacgcgaaagtgatctatggagatactgattctgtcatggtcaagtttggatgttctgatttggtaactgccatggctttaggtatggctcccttgtttatctcgacatctgccttgtatgaatactgatcaagctgataattcttggcttggaatcgaacaggtgccgaagctgcagaccttgtatctgcaagatttgtcaaaccaatcaagctcgagttcgaaaaagtctactttccgtacttgctcatcaacaaaaagcgatacgcagggctttactggaccaggccagacaagtacgataagatggataccaagggaattgaggtacgcctgcatttctgatcctgcttccaatgataccgccctatactgatgatggtgtcggttcgatctatcttctctctgttcaaacagactgtcagacgagacaattgtcgactggtacaaacagtgatagagacgtgtttgcacaaacttctaatcgaccgggacgtcaaaggtgctgaagagtaagagatctgtcttttgtaaattaacagaagaaagaagcactttctaagtatatgcttgattttcgatacagatacacgaaacaggtcatctcggatttactacaaaacaaggtcgatatgtcgcagctggtgatcactaaagcattggctaaagcaggtatgtctctgtgtcatcttatcagtttgaatatgaagcaagcttatcttttgatgtctgtttcgaccatgatagactacgctgctaaacaagcccacgtcgagcttgccaatagaatgagagctcgagatgctggttcggctccctccttaggagaccgagtagcctatgttatcattaagggtgtcaaaggtgtgtctatatttttctacaaagatccttattttcttccttttgctttttctttctttgattattgatatgtatctctgatgtcctttgttcaaacaacttcatacgggtaggcgcggccgcttatgaaaagtctgaggatccaatatatgttctggaaaacaacatcccgatcgataccaaatattaccttgataaccagctttccaaacctttgatgagaattttcgaacctattctgggcgccaaatccaacactctatgtaagacttcttctcatctttttattctcttcccttttgaccttcagagctgactagaatcgacgattcatggtgaacaataaatttatctttagtggttggagaacataccagaaccatcagtattacgaccccaacaattggaggtttgatgaaatttgcagttcgaacggtaacttgtttaggatgtaaaacacctttgaaaacatcaaataaaggtacagtcattatctctttctctttctcttcatcttccgtttgtatttttttcctctttttttcccctatgaatttgggtcttaactctctggtttacttgaccttgtctctgggtcatttgtagatggagccgtttgcaacaattgccggccgaggattggagaactgtatcaaaaacaagtatgttgatagcgcctctgcttcaatcacatgaattagagaactcttgctaacgacaattcaaacttcctgctgttctccaattgacaatagcttgtgctcacatcggctcaccaagtaaacttcgcgagactctggactcaatgccaacgatgtcaaggttcgctccaccaagacgtcctttgttcgagcaaagattgtccgattttctacatgagaaagaaggcgcagaaggacgtaagtgatgcgatgaatgtgatggataggttcgataaagagacagtttggtagagtgtggcaatgttctggtttcttgattcatagtttgttttttctttacattttgtgtttttccttgtttctctcgtggttattgtttcatatcgtgatatcttctcttgacaattgttgtatcaatacgaccatatccatcgtctgaatctttgcttcttatttcctcgtaatcatgcgccctctaatctctttttcattcactttcaaagaagtcatgttgatatatttccgatctttcaccacttagtgactgtcaaagttcctgttttgaactcggacaaaagcttatcgagcaggagacatatataaacgatttcgcaatttactgagaaaccctatcaatgaagagacaagcaaagaacacagcgatggagaatgaaggaggcaagagagtttcaagagagggactagagaggcaggtcgtacgacaggagatagaatgatcgagggttttatctggagcgcgcccccacctggttcgagctcgatacgaccaaaagacacacgagaagacaagaagcacaattaattcatactaaggatttctccatgttcgttatgatcggcttaacccttgagtttaccccaaacaacgatgatgatcaggaagacttttgaaaggaaggaaacaagggtcagccttcgaatgattggatagatagttgacctcagaacgcggagaaaaggtagagtaaagataacgtaccgaggatagcgatgatgccgtatgttaaaaaatgttgttgatacatcctatcgtagtgtttaacaggagtcgttattaacgtcattgtggccaggaagtatcatgtcggatggtatatgtgtatagacagataacgttggatcgaagcagaaagaggacgagagaaaaggatagtaaaattcaagagaagggaagccattttcgtcttaaaacagttcagtttagagtccaaagatcagattatatggagaaaaatgaatgcgaagaaaaagagctgacctgaagatcattttcttcaacgtgccactcgctcgatcgattgatgtatctgcgctggccaactatgggacccatcacctgtgtcaaacaagagatctcgcgtagaagattcagaaacaaatgaagttgatcactcaccacatccctggaatgttcaatctgctccctctgacctctcaagttcctcaagatatccgctccaacgctctccgtctccaaagccagtcgatgagattcttctaatcgtcttgaacctgcaatacatcccaaattgacccaatccaatggttcctgttagggtaatgatacccaggcacatacagaaagatgagaaagacaaaccgtcagccaatctttcggttccttgtaacaatcgcgtccgctgtgagtagtctgtcggtgaatcggaatacggatcatctcgtaacgaagcatcggtgttgcccagcaggtcggatctgagaacagcctgtttcgcgtctctctagacccatccatagccgatgttgaaatgaaacttagagaggtaagaaatcaagagtaagaaaggtaagacggatgtgagcgagatgacgaacgaattgttttctgagcttctctagctgcgctttgtaggacttgaaattgagagtgtatttagaccggatggattgaggaatagatggcagctcgacttccatttgagatatctatcaatatagaaggccacgaaagcgttagccagccagaaagatacattctggatcttcgatataagtttccattcgacgcgtttctctctcctacttggtcttgtaaagaaaacgatggtctgggaagagtcgacaaagtgaacgaacaatttcttctccttcttctaactcggcctcagaccttctgattaaagctttcaaaggttcgcctgtcaatcctttcgactccgtctcgagctggaaggtcagcttgttgacgagttgttgaaaatcgtgcgagtaggactcgaagagggacgctggtgattggctatgtgtaatccatagaggtttataatcactctggtaagttagatagtcatactcaatgcagagatcgaattttggaagtaacagactgactccatagtatgagcagacaccggtaaaggttggtggttagagaatgtcctcatcaggataccagcgagatgggagacgaacggatggctgtccaggacgtacagtcgagtggcaactttcaatcacgtgactatactgtctggaacttgccgttttgtctgccgtacccatgaatgttgtctacttgtatcagcgtatcatcagaataaggtaagaaaagagacattgtcttttggtagatcacgagatagaggaagaactcctcctcccttcctttttgcgttcaagaacgaagaaataaagtaggaaaaaaaggatgccgatgaagaaagcaagaagaagaaaccaaatcaaaagaaggaaggacaagatgtgcagtggggaagaacggattgaatggaatcgatgggagaatggagaatggaaggctgaaagacgaaagtagaagagaagaaggggaacagaattttcgtttagtaaccacctcggctggagaatccaccccttccaccgctgccacctcgagaagagaatccgcctcgacctccccggtcgcctccaccaaatcctccacgaccccttggtgctcctccgcctcgagatgagaatcctcctcgggcgcctcctcgaggcgctccgaagcctcctcggccaccagctcctcctcgaccaccaggggctcctcgacctcctcgagctcctcctcggcctcctctcttctcaactgtggttcattgagatcaaattgccaaaagcgagcagaaatgcaagcatatcagacatatgtactatcaacaaaagcggctctaccatccatgtttccaaacactaacctttaccgccagcagccttgggttttggcaagaatctttcgataggcaacagcttatctccaccgatgtaaaccttgtcatccttcttgaaactcgaagcaaccataccctcgttcatcttgatcgtgaagaagatctcgttgatcggtccgagaatctcgtcgaccttaccaatctgagtcttgttctcgaggtagataggggcgttgaagtacgggactttggtgggcaagaggtttgagcaaagcatctcagactcgacagagtgcatgaaaagtccaacctctgtatcgtgaacaaagtaaacaattggatgtagcagttgggtagacagtaggcgatgaagagattatgcaaaaacaaattcgggcaatcaagagacacagttcagtaaagctcatttctgaaacagaatcgaggaaacataccctggacgacatcaggagggccgtaggactgctggaaaccacctcgtcctccacctcgacctgtgaattttggcagatacaaattgggacagaatacatggaaaaaatcgcgtcatcagtttaaaggtcctagcagccgatgcaactatctattgcacatatgagagcgactcgataggcaagaagggaatatcctcggaagccaagtgagagcctgaaggctgagaagaagaacaagcctacttaccacctcgtcccccaaacccaccacctcgtcctccgcgatctcctccacctcgtcctccaaatccgccgcgtccgctcattttattttggggtttgtagaaaggaaaggggagtagaacaggccaattttcggagctagtttttgaagaaggggtcgctaataaaaggaaaagggtatagaaatccgaagcaaggaatgattagaaggcggtaaaagcgacaaaagaaggtaaattgagcagcaatttcagttaaatcggaccctaagaagagataacacagtcaagaaaatctcgtcttacgtttgaaagggtgaagaccgacgaccaagagtgatggatgaagagggaagaggaagagaaagaataaactgtgagaaagaggcgaaaggagaaaacgactgaaagaatttttgggcgactgcgcgaaatttccgcttttttctttcctgcctggcttggtcgactctttgcactcacaccttctcttgaaatccatcggccatcactacaatacatacactggccagcatcatagtcttacaggcacaccatgctctctcttctctcttctctcagatctctctcgctccgaggttcaccttccagcctttctgtcgccgctccagcaccaataggtccttccatccgatcggtctcggttggatcgttaaagccttctcgaggatctcgcaagagggtacgtgtcttgtcattatgctttttctcgttctgtaagctatgtgtttcaaatacatataacctccattctgtttatgtttatttcgcacttagaaaatccgatacggacgaggagaaggtcaagggacaggagaaggaaaaggacgaggtaacaacggtacaggtgcccgagttggaaagaagtattcaaggggcttcgagggtggacagacacctttgacaaaattatacccgaaatggggtttcttcaacgtgttcgtgatactgtctctgttttttgcatatcctgtttttcgtgaatctcttttcttgtatcattgttactcacatagacttgcacaccttatatcggatcgacgtcttttcattcttttgtcaacagtggccgaaagttctaccagcccgtctcgctaggaacacttcaggagtacattgaccttcgaagattagatccgacagagacaattacggttgagcatatctacaagagcaacctctgtcacgggttcaagcaggccaacggtttcaagcttttggcatcaggggtttgtaccttctctctttcgcctgtgtttctcgtgcggttacttgagccactaaactttctcgctccttctctcacctcgcatctcttctactgatccgcctaagtttgaacaactcaagcaacctatccacatcagacctcatcgagcttctatcgctgctatcaaagcaatcgaagccaccggtggatctgtcaccaccgtctaccacaaccgactttccttcaggcaggccatccaccctgaaaagttcagaggccacagaaggattcaagaggctttaccgatgaagaagcgagatatcttgtactacacgaactggttcgtcttttgatcgttttgaaccgcctctttgtcaaattcgcgccgaaaggctaatctatcttatcatcaaatcatgaaacccatattttaaaaacagggagaagcgaggttacctcgcaaagaaaccggaagaagcggaaaaagagtcggacgcacccaaggagtttgtctcacctgctcctaagcagtattaaagttagagagcaggagggactttctccttgcaaaatacatgatatatttttaagcaacggctgggagtaaaacgtattcgaggcgtcgaagcgcgaaacaataagagcccatctcaagacgagaaacacctagtttggctgtccattaggtcgaacaaaatctatcatatgaggagagaaacagaagctgaaatgaaatagatgatgaatgatgaagagtcatgagccacgtgatgtatgacacagctttctcttgagattttctaaagtccatccctcaaacaccatccttcgcatccttccggccagccatccaaccatcccgaccgcctcaaacgcttcaaccaacaagtgcttttctcactctttaatatagattgcgcaagctagaatggcacgaacaaaaactcagaaaagagcagacgcccgaccggcagctgccacaacaactatcccctcaacttccaccgctgccgttccgataccggttgctggacagcagctcgatcagaacgttgattcgttactccgtttgtccttcaatagcagtctctgagtgaccatccaaatttcactaaatcccaaacaatatctcttcttcactgaacttagttaaatcacacacattactcgctcagcaaaactatgaactcgctcagcgattcttgacccgattgctcgcgttggagccttcaaacgcagaggctagagagttaataggtgtatgtgagcttgaactaggaaatgcggaagcagctcgagatgttagttctcttttccttctgtttcgttaccttgacaagtcccccggtgttaggagaaaatgttgaaacaatattcatttcttctgctgaatttcgacgctgtagcactttctcgtatcacttcaagcacctcttcaaacttcatctgcgccatatttatacctcgctcagctagcttcctctcctcaggaagcactcaatcactatgaagctgcggtcaagattctagatcaacagcttaccgagctcgttcagtcgaaacagactggagtggaggacacgaaagagttagaggtagctgaaggaacgatgaggaagcagatcagtacggccttagttggaatgaccgagatttaccttacagatctttggtgaggtcctacttatcatcatcctcatctttataaccaacaagtgaagagtgctgaacctcgtcacgttatacttcaaagctttgagcctctggcagaggagaaatgtaacttgctcctgcagaaggcgctctctgttctcccaacggatcccgaagcatggatttgcttggcaagtgtgcgcacgtctcaacaacgacctgaggaggccattgaatgtattgagaagggctgggcggaatggagagatcgagaactaggttcgtcaggctttcctcgctcgatctctcacctctctacagttctacgtatctaaacttgattttgcttcaggtgaccctctcataccttctattcagacccgactttctcttgctcggttgttgctagaatatcatcgattcagtgaagcaactactctacttcgaggggttctagacgaagatgatgaggatgttgaagcggcttaccttgaaggttgggcctggttcttaaggggagaacagatcgaagatacagaagaggaggtcgtaggaaaaggtaaaggaaaggaggttggtagtgaaggggacgaggacgagttaagtaaggtcgactgttgggaggaggctagggagatcttgagcgtttgccaagttgtttgtgtcatccttctcttcttggacttttgcttcgtccttcttgtggcatgaaggattacacgctgataccttcggtcttttcttaccctctctcccgtcatacgaaaaacagcttcatcaatcccaaaattatcctcagattgaaattcttgcgcacgtgaatgaaatgctcgctgcccttgacaaggcaggtattcgacccgcccaaggcgttgtcgatgaaggagacatggaagccatcgatggagagggtcaagattgggaggatgatgacgatgacgaggatgaggatatggcatgaatcgttgctttccttgtttccttgtgtcatttctagttcacgttcgaagaatagataagcagaatgatatacagttgaaacggcggaacagcggagtgaaagggtgggacatgagattgcctaagaacctcaagagagcgataggttcaaagcaagtcggaagtgtacaagtaagtgcagtcagatgttggtccaatatagaggatgtctttttcatgatgagcctaacaatcttcgatgcatagattgagatgcaatcgagttcaacaggaacgcttgactgccaaaacgtaatagccaggtcgagacggactaacctgtacatccttaagacttcctcttcatatccatttgatttgtcactcaattcttcagcctcgcttagggcgctagttcaagattgagaagatgacttgcaagtttttacactcatatcttctatgaagctctgcttcacttaatcaggagcgttttttctgactttaaaccccaagataggaacggaaccaaaggtctcccgaatatggacctcagttgtggtatacaagggttgggcttcgataaatcagatcaaatctgccagtgaccaaagaccaaatgataaccagacttttcatatgcagcaagcctcaactgagcgaatatccgactctctctacacctagctgagcttgcttacttccatcgagcgtccaacctaagggacctaaatcgcagtcggcacagatcaaatatttgagcttctttgcccctgagccaagagccttttgaacggcttctgaacgagcaatcgaatcaggaatattccttgagaacccggcgttctcgaatccgaaaggagagttatcgatctcccaatatgctgtctgagaggtatgggacgatgaggaaagaagcggaggcggtaagaacggtccagactcatcgtactaagagcgattgagtatatggcacccgaaagatcaagattcagcgtagtcacacatagtccgaaacatgacaatggacgttgttgatgacttaccagaccagcctgtccaatcacccacttcgcgtccccttttcttaataacatacacccacaaccatctctcggacagtagatggcgaatagattggtcctggtcgaggggtcaactagactctcttctgaagaaccagcctgattgaatgaacggacacccggacgagcttttgaagaagatgcggcaagaagagcagaaatagcttccggagggatagaatcggtcattctagctgatgtacagctgggtcctgctaatcctgatatctgcgttgatggtacacttctctatatccttaagcagctgtctagggttcgagcttcaaggaaacatgaatttcaagggtttcaaaaaatgacatgattacgtcatatcatcattcacgtgaaacttacgtaatcatcttcaagccatcatctcgatacgcccgtccatcacattcatccactttgttgatgctctctcttttatagctatccagacatctcagaataaaaacatattttcgacaagaagatgggagttttcactcatctctttgcctttattctcggtggattgacgttgatcccattgctcatttgtacgctttaacttctctttctggtgccagttgttgtcagttggctgaaataaacctgtccctcttggtcttaaagtcgggatattcgtatggacctcagttcccgtcggagatcctcatccttccaaaatcataaagaacgctattgagaaagaagccttgttatctggtcataccaccaaaccaggagcgatatcaacatccaaggacattcctgcctctggggtattcgtcaaatcatcctctcggctctcaaactggctgactgtccgaagatctttctctccctatccctctggcgcttcagagaaccccaaaccggcgaaagaaacgtcgtcggacaactcatactccgctctccttctcagaactgtaaggtctagcgcatctcaggcttcaaatacagcgcccgtaacgggctcgacatcatcgacaccctccaattcctcatccacaggtggctctacctctgccagtgtctcgcaatacaagcctccttccgactttaaattctgctgtctgaaaggcactacgctttttctttacgaggaccaagatcaaagcgagtgctatgctgttttaaatctccagcacctcaaggtgacgatatttcctgatgatctgaaggacgcagagatgtttgcaaaacggaattgtatcaagctatcatcattaaatgaggaggagaaattggacagagcaggagcgggcgagaagaagggtagcagctccagtctgccatatatatctccttggtacatatttgtcaaagaaagcagtctgatggaagagtaggtacctcttatgttgactttacaacagtgctgcgagagataatcaaactaaacagaaatggtcttgtatctctgcagttggtatctagccttgaaacacgcgtcatcaagaaatcctcaggtatcggtactcgaccaattatcaccggtattctctcaaaaggtatccctataaattccttcggatacgccttgcgctcgactcgaggttgacctttttccttgcacttgtggtggatgatgccttatcaggatatggcttatttgatcgaaaaacttgacacagatccggatcctatccctatgcgttggctaaacggaatgtttggacggttcttcctgggcattcatagaactgctctcttagaggatgtaaggttttctgattaggccttcgaccatgggatccattctcacgaactctttctattctgctatgcttggttctatcgaggacgcataggtaataatatctaaaatacataagaagttgggtagacttcaattaccctcatttttgtctccactcaaggtcagctccgtcgaaatcaagtcaccgcctccgacgttctcaaagccaatgctgcgagacctcaccaaagagggagaagctagtatggaagtagccgtgtgttggatgggagaggtcagaatcaaggttggtacagaggtcagcctgacattggtcggcagggtacttcgagtgagcgtcgttttagacctcgtgatcaaggagatagtaagcactattcatgcttgtggtttagttttgagttcaagttatgtgagaaggctgtattgagcatctgaaacctccgcggaatgccttcaaaattaccaggagggaaacctgttacttatgattaaaagtccacccagttcaagagtttggtatgggtttaccaaagaaccaaagatggttatcgtatgtattcatcactattgaatctatctcttgagtttgctgtgtctgattatccttctgctttctctcctctggatgatgtctaaccagaatgttgagccggttgttagctcgactcatgtatgtcctcggatccaaatacaacttcatgctagtcatcctcggaaatagatgatcaaacactgacgagattgttaatgataacccgctggtgatcatagatcaaatggagcatgattctcaaacctatcgagaagcagatccgggaaggtgtaagcgagcgcctaaacgtgcacaggtcgtaacgtatgaaactacgactgaccgggccgtcttctttgctctgttctggaacggtctacagattattgagtctgtcgtattgcccaacatgtgagtttgttaaaaagttacatattttcatgtatatcaggtgctgactatgtttatctttgaaaacagggacgatatcaactggttggttccacttctaacgcccgtgtgttcaatacatatgcttactaaatggacatcactgttctattcaggtttgactcgtccgcataccccaacaaccgaggagctgtatttgctgaagccgctcgcaatgttgaagatccggctctgccagcccctagccctatcgagaccactactgatgaagctaccctgatcgacaccaagaacactgatgcaatgcctggagggcttagaaaacgacctgcatctgtgatttccggagaattccccgttgaggaggaagctgacagtggaggctcaacacctgtcaccccctccgatggaagcttgcacagaagtgcgtcaacttctatcaaacggaattggtttggaaacaagacgaacggatctggagattcgaataaaaagccagtggctgttctagatgaaggtactgtaaaagctgttccgatatcttcgtcgtctagtatcatcttggatgagttctaccaaccttcctccgagacttcaacgatccctctcaaagctagctctgcttcaacagggagactgagcaccgagtccttacccgctcaggtaggttccactcgggctcccatcttcaatcctgctttacctcaatctgaacctgtaagaccaaggacagcgaccctacccatggaagatcgaacgctaaagcaaccacatgccagtaaaccagttaccgtgccagaatcaaccagtccggctcgctcaaccacctccttggtctcgaactggaaagcccgagccaacaatgtcgacaagcaggcgatttcaacatcattgaatcaagcaaaggacgtagccaagagatggggcgctaattgggcggccaaacggaaggtggttgcttcgactgggtcaaatgaagcggagggattgagaggggctcaaccggtagcgggaagaggccatcagtcatccctttcgttaggacaaatgcctacggatttgttcaataggttttcaagtagtaaagaggataagttggagagcgcgagtagtagccggacggatctatcccgaagttatcctcctataaatccggctcctagaaatttcgatgaagattcagacaaatcagttcctcccacggccagacatgttgcaccttcctcggcggatagtatcgtgtccaacagcctgcctgtcccaccccaactaccgaaacgagatcgatcaccttctttgagatcaaaacccacctctccacacgctcaggacccgaagaagaaaagtttgatggcccttccgagcggcgctcaggctaccgtcaagcttcaaactgattctgctcctgctggggcccacacgactgtttacgaggagggagttaatcgacgagctgctcccgttcgaacacagatgtcggctagcccgatgatgaccattccgaggatcccgctcagtcgaaaagcagatgtcatggcattcggatcgacagatgaaaataaagaaccgattggccagaaggataagctcagttcgatttacaagctctttcctaacgggaacgttgggtcaggagtatcccctctatcgactgacgaaaccgcggatcgatcctcgatagaggaatcgtcgaatatcctaacggatgcttctgcccaagcaatgacagatgatagacctcctttggtcgcatctgaagttgaatccacgaattctgcgattctcgccagtctcgaagcttcacctcttgcagcaaacactgtgatatcccctgcggttcaattacctatcccaactcgttctcgcacattctcatccgattcaattacatcttcactttccagtagcctgaaagcatcactaccaccttcagcaggtcctgtcgcttctgctggtcgaagaagagcgccttccgtgtctagcatcagtagttctacgccttcctctcctattgctctctctggaacaccgtccttctcattttcaacaaggacggcggcgacaataacagatgatctccagacgagagcacaatccgtttcgtcgggctctagtctggaatctggatctcagctcagtggatcgttgtcgaaagcagaagagacattatgggggatagctagacgagatcgagaaagaggcgttgctcaagtgatggaccccatcagtaatgaaacgacatctggtaaagtaatctacagcagaagcaccagtattcttgcagagatatcggatgattcaacacatacatccactcgtatctcagccgcttctgcttcacctagtcaattggatcgatctcttcttcctctgcgtgatcagagtgatcgaatgcctactccagatctatcatcacgacaacaatcgcagttttctaccgtttcatctactatgccttcagaccagctgtcgattgtgcaggatggggagagggaatctctcgaactgcgaccaggtttaggaaccagatctagatcagtctcggagacaaatagtcttggtgggatgtttaggtttgacgagcactgagagattggatacaatgtgtgagggagagaaagaaggccggacctttatctgaatcatgggatctcttctcttttctctatataactaaacttcatcgatatacaccatgattctgatccctttttccttttcttttgtcggttgaagtttttgtttgtttatttaatattgggcttgagtccttcgcgtcaaaggaggccattctgaaaccatcttcctagcttataaaacacgttgtattgtagcttgctttctctcctggtacagacatttggtcgcatcatcaactgcatgcatgactgatgcgccgtactcacttaagaaaaaaaaaacatagaatttgcgtattgaatacagtagaggtaaaatttcgactctcgctcaaacatcatcagtgatggtaaggaggagcctcgggtttgacaatctcccatgctttgtcgactctgtatgtgtaatgagatgggggacgtttccaaccagtccagagagttctctatcagaactaaattcgaaaaaggagaaagatgcgaaggaaaaataagagaagaggatacgaacgcatcaacgacatcctgaggtaaaggtcctttctcaaagtccttcaagttctggtctatatgtctggtcgagctagcgccaatgatgatagcatcttgatacttcggatcgagcgccgaatgatggttactccatctgatagcgatttctgctgtcgttaaattattcttctttgcggtctatcatgtagatttgttccaaggtatgagagtgaatgtgcaatatcagcgagaggaaacgtcaaacatgatcaaagataagtttattgaaacaattcgtacggagttgatcacgtccatggcctggaagtaaacgtccttccagtacctagctcgatacattgatccttgtctgtgaaaaattcaaacaaaagattataggggcgcagattgaataaattggatgaccttgggtggaaacaacgcagagaaggcaaccgtggacatacgatcggttaggatcgaaccgggatccttcctcgactttagattctttgttgaacccaccggcaaagaaccctcctccgaggctgagaaaaatcaaggaagagtgacggatcgttaagttttcgacggtcaagcaaaaagaacgatggacaagacatagtgacgaacgggttgtaggcctagagaaagatccagagcccacggagaagaccatcgtttgagtaagagaagataagtctagtgtctagttggataagctagatcgacaaatttatatgtaatccacttacatagaaggagataccgttctctcgaagcacagggaaaaggtctttttcggcggatcgtgtgatagcattgaagattccttggtacacagtaggctgaacatagttgttctttttacagatttcaacgatctgcttgacctcatcggctgtaaaattgctctgtattgatggagagatatgttcacttcatctcagcgaacaaagtctttgtgcaggtcttgtcgagaaagctgataaatgcagacgaaacaagacgtacaaggccaaaccgggcaaacttgccagctttgtactcttcatcaattcctgccagagtcttcaagcccaaacaaacgcgtcaagatatggttgcgtatactcccaaatcgactggctaacgtacattctcaaagggggtctcccgatcaggcgcatggaggtaatagatgtctactttggaggtctccaaagactctagagaatcatttagtgctcgatggctgataccacgtattcatcaagctgattatcagtctctttcatgctaacatgatagatatcgattaaatgaatggacgaacatgtcagcagctgaatgagtatattgaccttggctcaaaaacccttttcctcgcgcggaagggtaaactttggtcgagataacgaagccctgactactcgaagttagttgttgagatgagccgatattacgtctgattagccttctgcaagacttactcctctgccttcatctgcgcaagcttcttttcagatcctccaaatccgtacactattcatatacatcaaccgaggccggtttgaatctggtggtcagttagatcttgaaaagatgactgtctggatgcgcatctccataggcgactcactcctagcggtgtcaagctcgacatgtccgtatgacttgaagatatctagaatctcttgagccccttctttagtaaatacacgagcttgctccgcgccttcttctccgaaggtcatgcactatggaaatatgcatgttgagccggtcaataacagtgttggaagggtaaggaggaaggacgcagtactcacgccgaatacgactttgacgttagatttggacatgataatatctccagaatagatatgtaatgtgtttgaaggtaaagaggaacagagacacttgaattggcaccaaaagtcatcggcatatatatagtgatgaagctaaggtggaggtcgacgtcgatgtggaatgtgatgacataaaatggagggaaattgtggaggcttactctcctggatccattgtacccgttctatgtctacagttgaaccagccggttaatttgtaagacttgcgagatcatacataccggtagatcatatacagaagaacgctctaaggggctgctacattcaatggttgttcttgaagatacatgtcgtgatccgattatttaggttcttctacagagtgaaggattaaagactattctacagatgaaacgtatctataccaccatcttcttgcttttctcaatcggtcttctatactctttctatatactatctctccctcagactatcaccatgtctcctttgacgttccaaaccctggctcctaccgctaaacatacagcgaccataatcttttctcatggactaggtgatcaaggagcgtcctggttacctatggctcggatgctcgccccggcgttaccgtacgtcaaatgggtctttcccaacgctccagagattccgatcactttgaataatggacaccgaatgccaggctggtttgacctttcctctttggagaaactgggtgacccgagggaggaggacgagaaaggcttggtagatagtgcggatgcgattcaggcgatcatcagtagagaaggattagccgttggagataacaggatcgttgtcggtgggttcagtcagggatgcgttgtcagtatcctcgctggtctgacaaagggtactcaaggaaaggaaaaggaggtccagagagctctcgctggtgtcgtaggtaggtcttttgtaccatgtttctctccttcctcaagggaatgaaactgatcaaagtatcggtcggatcttctggcttttcttcaatcaaggactctctggatggttgccactcagggatacactgaaagaaagattccatgctgaagcaaagaacctcccaatcttttggggacatggaacggctgaccaagttgtcggctacaaatgtaagatccaagatctcttttctgaacgctttgccagccatctaatgtacacttgaacgaaaccctaccgaaacgaaacgtggtcaatatagacggtcagcaatccgtggaaattctcatctcacagtacggcctcgagaaatcctcaggccaagctggaaaaggtattcagttcgagagttacccaggattaggacacggaagttctcctcaggagcttaaagacctttcggcttggtgagtactatcccctttccactacgtgagatttcttttctttcctctcatttcctgatgcctctcctctctgtttcgcacataggctccagagagtgatccctacgatttagacaggccattagacatcacacaatatatacattattctaccggtccttcttgtgtattctctatgaagacaacaagaatgatgacgatagatatttcgagccaaagaaatcatggatgaaagcccctagtcttgatcgctatgaaaaggatatcgagacatagcaagtagacctgagagtatatcaaccttctggttcgacacctcatcccatcaatctctagtctggagagtttgagcgcccatctttcgagataattgatcgacctcttcaacagcagatatatttggcttggtagagtcgaggttccactcttttcgaagttgggaattgcgtaaattcaacagttcgtctaattccgtctgttcgtgagacaccgaaggtcgaaaagaaataacaagggagggcgccttaagtttgtttctttgcctttatagccaagagcagagaaggaggggaaggaaaggttccgagagagagaaaatgagaacgaacctcccatccgagttctttagccaatgatctacaacccgaatcacaatctcctttaaccaaaacgtccctccctcctttttctacaggccttttaaatccaaacccttcgtctcctgggaatcgagcttggcatacgatctcattgttgatgagcattcggggtgttgtcggatgaactctgtcgacaagtgaggcaaatggctgaagttcgtgtacgtgcgtgtgtgtatataaaaaaggtagaaatgatacgtcagttattgttcctttctagatgaggaggaaaggagagtcaaacgaacgtgtactttgagagaagttcccatgacgatcaatagatcacattcagacatatcctgcttacgaaccaaacccaacaaatttcagatgttcagaaagatcacatttagtcgatcaacatagaaaacacgatagatgaatacatactctgatgcagtcaaagaaccgatcgggtaaactctatactcgagaaaaatgagtaaagatgagaagatcagcacagtccgtcgttcatggttaaacatcagattgaaactcaatgttagaagagacactcctgaaaacaagacgaacttctccgtagaatgtgatgtccggtttgataaggccgccgcatgatttacagtatggtattcgactggaccgaacgtgttgctcgatcgtcatgctatctactggtttatgacaactgagatcatcaaagagcgtgtatgagatttttaatgagtcggctcgtccgaaaggtcgattaaacctgaagaataaaaggcagggcaatctaggaaagaaagaggctcactcaatacaacttgaagtggcaaacgatccatgagcttcgacaatgaatgaagaatctatcccactaattctttcgagcgtgtcgatattctgtgtaaacactcgacggaggtgaccatgctaaatgatacccgaacgaacaggagagagaaaagaatacatagacggtcaaatcagaagcgctttctctctacataattcgaaagggatggtcacagaccttttgaaggagtcgtatgaaaaagtgcgtcaacgtaggtaggaattttcctgttaactcaagcccgcagcccattcaagaaattagaagaatcagatcccaagagtcgtattcgatagaaatttgcgcgcaaagaggtcttacctgggtagagttctttggccagttcgtagaatggagccggattggatctaaagaactatttcacagaaaaatacaaagcgatcccaaaaaggccagtgatttcatcaatatgccgaaagatactagcccaaaaaaccgagttgaggatgaagaacaagagtgaagataggctcacattgagttcgaatattgactccggttcaggtagtttatacttttcaaggttatgaaagagcccggtatcgggcgatctgaagtcaggtatcccagcgttcgtcgagcatccagctcctgtcatgaccaccacgttttttgctgttgatggatagaacaagaaccaagataaagatcaatgcttgaatgggagaacagaatcataggaaataaaacaaaactaacctttggcgatgagtcgagcaaaccctttcaacgaccgttgatcatctgaaagaaatacgacaggcgaccgctcttcgagctaggtttgaaaatcgagaggtagagagacaggagggatgcgttcttgatcaaatctgatgtatcgggcaaggatgattttcgtggtcttctttctcgtgactagaagtccgggtgggaggcgagaaaggaaggaaagaagaaaactcttacctcggaaagacagccattcgtctcattaatttctctgtcaccattatcatcttcttcgtcgtcgtcgtcgtcgtcgtcttcttcatcgcttctatctttacctacttcctcgcaactctcactggccttatccttctctttgatccgctcctcctttatggtcgcaatctgatcggccgcggtcgtatgatatgtatccgggacagacggacttgtcgaatctatccggttaacatcatttcgaattcatagaaagcagaagagaaaatggagaactaggatcaacatttggcccgcaagaaagtttcgtcttggagcaaagaaagagatagcaaaagaaaatttggccgaccaaaaaaccccgtaggctcatccttattcaaagaaggcgaaggggcaggactgataaatgctcctaactgctgattcaagaagctttcgatccggtcgacatatgtcgccggtagttcgtgttgcttgacaaaccgagaagctgccattcgtgcaggctctaaatgtcagaggaacaggacagaggagaagtgtgctgaattagctcggttcttgagttgaaccggatgatcaaaagagataagaattgaaaagaccgaccactgggtgtgaactcaagttccaagtttggttgatcatcagccacatcgaccttcaagctgaattttgtagctaatctccaagcgaaatcgagcggcccccaaacggtcaaaatcaatcagtctagattcttgaaatatctcaccgccgggtagatgattcttatttctttggttggcacagaagaagagaaaatgaaccccacgatttagtttcgaactagtctctctcatgggactcttcacggcatctatcacggcctcctcatacgcctatcacaagaaagttgcaaacacccggtgacacatcgtcaatccactatcacttgatttacgtacattccacgcgaaaatgagacgtatacttcactcacagctaagagttcaggatcggcttgtctggctggatctctagaaaaaatccgagcggcataatctgacgcgccggtgaggatgtctccattaggtagactggcgacggaccaaacggagatggccgggtgcaggatggtttgaattggttttccttctgttgaagaaaaagggtaggatggggatgttaaaacagaagagtcagataggctgagtgagactcgtttcaaagacatagtcaaccgggaaggaaatacagaggaaactccaggaacgaacctctccaaatccggacacagtgatcttctccgcttgaggcaagatctccgttagggagcaagcagaccgagtagacaaacgagatatgacctgtgaggatggctactagttcaccggagaacgcccagatgtggatatttccatcgttactgcagctcgcaaactcgttatcaggaaggattgttaaacctcgcacgcaatcggtgctgccttagacatggagaggaaaaagaagaaaagaacatcagaatcacgcttcctcattcagaacattgagtgcgcacaggtcacctttaaaagttcgaatgggccggcccgatgagtcccaatggatgattagcttgtctgctccagcagttaggaaggatctctcgttttcttttctcccacaatgtttcccttctacgactagacctgcccagacggcctccttgtgtccctcgagacagaggatctctttccaggttgatgtactccagacccgggctgtgcaatcccaactggtcgagatcaacagttgatcttcttccggaacctggccggttgtgcagttcaaccctcgttcctggtctgtttgctcttcgtatgatgacggtgatggtttggtcaaatctccaggtccgcgcgttttgtcatcctgaccgggtcggtaattccacaaagggaagccactaagcgtcgatttggaagaagatttctctgagatgagctctttggaggttgggcgggaacgattaggagaagaggtagtggctgtggtagaattcggcgccttagatctttcgattggatcacatgccaccgacacggctgtctttgcccacgatggagccgaaattgacagactgcatacattatgggaatggcctaaaggagaacaaacgcaagcgagtaggaaaagagagaggagagcgggaaagacagataaaggcagtgtagtggtttgcgagttagcggcagatgcatgcccaaattagcaaagactttgaacctgggctcaccgacaagtgtgtgaagaggttgttcgcttggtctaatggcatctcttcctggggtgaaaccctcttcgccgtcgacgctagatgcccaacttcctttggtcggtgcctcatgaatcaagattagcgatgagagcgatccggaagcgaccaggccttgagtgtattacaagccaaatgaagcacgatcatgggatgagcaagcgcggatatcaacaggaagagtatgagagtgtgaggacggaacgacctaccgttaggatgatttgatgtgggatgtatatatgcgaccgaattcacgtaagacccgtgaccgagtccaactccactgagtttatactagagatggccagagagggtcgatgccgacgacaacggcgttcagtgaacaaggcttagctaaaagactgcttgaccaagagactaacctccctatctgtagttgaagatttaccccagaagcagacggcttcgtctctacttgctgtaaggagaagatcatctctaggcgctgctactgctttgacatcgctctcgtgagcctgattcgttgtgaaatttcattcaaaggcgatgaagacttgagtatgatcaatcgtgactgccaccatccgagcgaggagatcttgggagatggacctacctcgagcgtggtagaaaacttgaaggatgcagtcactgaagaaactaaattcacttgcgggctcatcaggatgagtgtgagtatacgtaggggtagaagtggaaaagaaagtgagagttaaaatcaagatattggaccaaacgtaaggccaagtgtaggtaaacgcgatagatatttttgggtgatagaacacgcatcatttccggctcaaccaccggcgtttcccttctctagtcagggttacaatggttagggttaatataaaacataaactaaatatgtgacattgctggttacaatatatgccacgttgtcaggcaaaaaacaaggctctagttacactctcgcttacgtcaatcggctgtcgatcgaaaggctgactaacgatcggagggatcagtagaaggcccatcgatagaccaggcctctggaggtaaaagaccgatggtaggccgatcgagaggttccatggaaatgagattcgcgtgtatacggaaccagagcatacatgttctcttaatcatctttgtcagttaagagtgtgtgtgtgtgtgtgtgtgtgtgtgtgtgtgttctatctcatcaagtggataccctatgaaggtctctttgttggactgtatggacaagttgtcatcgtcccaaggcagagattgaacagagacaacagaggatcgaagagggttatcgatgaggcttcggatacacgcagacgcggacacacacagccgcacatgcttctctatctatccaataccatactccatcattcaagccacacatgctatcacacacactttagacacgcgatgcaaaaccatcgagagagggagattgaacctcagggtaatcagggacaagcatattgatagaaatacgactctgtttacgtcggcacagaatagggcgttgtggttacattcatcgcgttacacttccaccgaggaagcgaacagccgtgtgtgcgtgtttgcgtccgtacgtgtgaaacctctcagctttctttctcttcgttctcttcgacctctttctatcctctctcacctcatactctcttcctttcgttcatccttgttcattcgttggagagcatcctttctgtctcccttagtctttcctctcttgtagccatcaccgaagttcaggccttccgttctttcacacactcacacccacatatactctggctctcggaaggttttctctttgaacgagatccatattcagacccaacgcactaccccacccccgtttttgtcagtcaacctttttcattcatcactcattcgccccagagggttatccataactgaacatctaaaatcaacaatgaacctttcctctctctttgttccctccacagatcaagcttttatcagatgtccgctcagtttgtcaagctgtccatctttggaaccgtgcgtcttgcttctttctccacctttctgttactacgaaaacactcagtcgtcccgccttcaagctttctctctttgagcctgtcgatctctcaacaatatggcttgctgaccgggttttatcgtccattctcctttctattcttcttatcgtccattctcctttctattcttcttatcgtccatgctctttctctcgccatctcatcgtgttttcggccttatcaattctgaatctctcaacgttgatcaacccatcctcatcttacgcctctttctatcaaactcttttttccatctacaaaaaatcgcaaaacatgccaatgctttaatcgccattcctcctctatgccactcaccgattcatcgtatttttcccttcatctttactcactcgtcatatgttccaccggttctatcggacggatactctccacccacatctcaggttttcgaggtcacttcgagatatgttgacctgtatgtgcccaacggctgtcccccattcatctcgtagatcgtactgaacgtcccgggtgttctttatgtgttctcttccttatcctctgttttcctcgactcacagtaatcccgttggtcagtcatggtcttcttctactccgcaccgctcagtcctatgctcattctcttttcatatacctacaggtatgggagctttcggtcttgtctggtaagcttatccttcgccatcccaagcatcggcctgctttttcttcttttcacttacgttctctttttcacttccttttctctcccagttccgccaaggatcagctcaccaacacctcggtggctataaagaaaattatgaagcccttttcaacgcctgtcctcagcaaaaggacgtaccgagagctcaagcttctcaaacacattcgtcacgagaacgtcggtccctctctcctcttgatgacccattccctatagactgatcgtttgctcgttcctggtgactatttctccttctagatcatctctctcagcgatatcttcatctctcctctagaggatatgtaagtttttatgtttcccttaatcatcgcgattgagccaagaaggaaaacagtttgtgctgcctggggactagaagatcgattctctatgcctcgctatctgatttttatcctataaaggggaaactcctatttatataattgcttatcttgcaactttccttttcttctacgcaaaccagttactttgtgaccgagctcttaggaaccgatctccaccggctcctcacatcccgacctctagacgatcagttcatacaatacttcctctaccaaatgcttgtcagtctttccttcacagctgtctgttgtgatcacttaaactaaacaagctttcgctactcgaaatcaacagcgagggttgaaatacgttcactccgccggagttatccaccgagacttgaagccttcgaatgtgttggttaacgagaattgtgacttgaaggtgtgtctctgctctatcaactctcacagaacttggtccgagtagttttactcacctacttctgcttccgtctcacttcagatttgtgatttcggactggcgcgaattcaagatgcccagatgactggttacgtctcgacccgatactaccgagcaccagagatcatgttgacctggcagcagtacgatcacgctgtggatatctggtcggtcggttgcattctggctgagatgttgctcggaaagccgatcttccccggaaaggaccacgtcaaccagttctcgatcatcaccgagctcatcggtactccgcccgacgaggttatcaagacgatctgcagtgagaacacgctccggttcgttcagtccttaccgaagcgtgaacgaattccgctctccaaaaagttccccaaagcttctccgcttgccgtcgatcttttggagaagatgctcgtgtttgatccccgtacgagaatcaacgccacggaggctctctcacacggcttcctcgagccctaccacgacccgaccgacgaaccagaggcttctgagcctttcgactggagtttcaacgatgctgatcttcccgtggatacttggaaggttatgatgtacaggtcagtactgggcctattttgcattatagtgaaaggtgaagactgacaaacgcgtttacttgttgttttcgtagtgaaatcttggattttcacaagctgtgagttatttggcttttgtttccgattgtctgtttacgagcgcgctccgatgttgattggcttcatcttctttcatttcatttctttcagtggagacgaaacctctggagagggtctggaagagcttagccaacacactgacgggcagggcgcatgaaaagatccattttatcaatttagcatcccagattactgtatctctcttgtttcccctatctgtgtgtgttgtgtgtacgtgagagattcattggctatattatctgttctacctacttctcacccttccccacgtccctcggtttcattccgttctatctcatttggatttggatgtttccc

SEQ ID NO: 1270 - DNA, 384 bp, Xanthophyllomyces dendrorhous
ctttatattctctccctatttttattccaattctattcccttgtcttgtgtctgtctgtctgcctggttatggctctcgatccggtcgacttttttttttctttcttttttctttcctctgctcaatcatcttctctgccctcttcactattcttatcgacaatcgataagaggaggagagctcgacaggacagatcttttcctttcttcccctttcttggatcatcctcatgcttatcttctttgtgagagagatcttccaggaagaagggaagaaggcagtactccagaacgtgggatagagacttggccagtgatgaatagacgatagataaatcatcttgagccgagaaccaagaatacacacacacacacacacacaca

SEQ ID NO: 1271 - DNA, 2688 bp, Xanthophyllomyces dendrorhous
cacacacacacacacacacatatatatatatacacagaggggccagagaaaataaggaagaggagaacgaaggaggcaacgttcgtactgtgcctgatgtttgacccaggatcctggatctccttcccggcgccgcggggaagggaggaaactgatgctcgggagggttttagactgtcataatctcgagcggacagctaggggacagttcggtctgtatcttttcactatctgtgcgcaagcctgttgtttcgtcgatgatgatgacgatgatgtcaaatctaaagataagaataagaatccccttcttctttatcggtcggccgtttgttacggacatcatcactttacacatctgggtatacatctcatcgtacattacaatacatactatctgactcccgtccgacctgatccggcctggtctaggcagagaatttttttagtcttttaaaaataattattattgaaaaaaactactttaccgcagctacctctctttctaggggagcgcgaaagagggtgcccaccaaggtagggcttcatagttggtctctgtacatatccgcaaacctgttcgtcgggaacgtcgtgtcaatcgacggggtggcaaagtcaacggcaagggaaggaaaaagaaaacaaaagaaaggaacaaactgttggctcgacgtagcgttctctatggttttgtcctctctgatcttgataaatctgttttgtgtgtgtatgagcgagcgcgcgcgagagagaaagagaaggagaaagagggaacgatacattcagcgtgtgaattacgaaagacagaaaaaccgcatgcccgatttaaagttgtcatcgttagtcccgccgaccgaccaagagaaggaaaggaaaggaaaggaaagagaagacgaaccgaggaaaccggatggaaagaccccgttcacccccgagaaatgtctgagcggccgggtaattcggagagagcgttatactgtttcagaatgtcccatcgagtgaaaaagaaaacgaacacaggccgtgtgtatcaggcgtttcgttcgtttttgatatacagtttagaagagacgaggaaaaggacgagaaaaggaagaaaggaagaaaaaaaaaatagaaagaagaacggactctgcgcctttgatctcccaaaccctgatcgttcgataagttccgggtgaaagcagaaggtagagtcaactggtgtctctttcggaacacaggtacatcgtccagagtttcttcgaaccgagaaagactgatggatcgatcagacagacaggaggaacttactctttgggcgcgaaccaataatccggtatcaaacctggtttaccccgaaagagccatcgaagagggaatcaacatctacaatcacatccggaacacaaaggaaaagggcaaaggacgcgagagagcacaaagaggctcaccgttcgtgtcgacgttcccggggacgtctcttcctgatttatcagctttccaacaatcggccgaaccttcctccggatacctggctttcatagctttatagaatgtatcggaaaatccgctgatgacgatgtcgttcgttcggattcccaaacaggttgattcaagggatatcagagagagcgcgcgtgcgaaattgaggctcatacgagttgagagagagaaaacacacacctcatacatttacaaacggcctctaacattcctgagtctgggttatactaagacatccaatgacgggtgaccaaatttgtgacggagagaaaagacaagggaaggcacaacctcgagaacagataagattgacggatcgagccgagaaggagaagaaaagaaacatatgcatagagagagagagaaaggtgaaagacgaacacatgccaagaggactggactccaccactttactttcctaccgatcccatgccaagcgcctataggtactaggtctagtgagtcaccgattccaccgtctatgtagtctttctttactttcaaccagcccagcgatctgacgtctggctccacgatcctcacatatcaagtgtgtgtagagggggggggaagaaaggaggaaagttcagtcatggaggagcttatcggagaacgagtagggaggaaactgacctggctgataagtcgctgggaggtctttcttctttccacctttcttgacgatcgccaacaagctaggaacgacttcctgtgattccgccttttcgacttcctttttgagttcttcttcctgctcctgctcctgctcctcttcttcagattccacgtcttcctcctcttgttccggctcgacatcgcccctggcggctttgcccgccgacctggggtcctcttcgtcgaacccgtcgtcgccctgtacgcccacgccatccaacaacttgatcatgatgccctccgcctttttcgcgacggcctcggcgaagaacgcctggatgtcggccgggtctgtcgagtcgatggattcgacatggccgaacgaggccgtcaacgtcgatgacgacagggagggggtgtatgtggggagaagcgttcgaaggaggtgtcgtcttattcgaagcggttggttcagtaggatctgtatgtgtgtgagagaaagagatagagagagaaagagattatacgaaacgcgcgacagaacagatcagatcaagtagggaaagagaaagagaaagagagaaagaa

SEQ ID NO: 1272 - DNA, 2552 bp, Xanthophyllomyces dendrorhous
aaagagaaagagagaaagaagcacaactacaacgcacttctttgttgagatacatcagatcgaaagcaaacacaccgacgaggactttgatgtccttcatcttgacgtccttttttggtctgtttgtcagttcttggaacgtcctgaacgcgccttttgttggtgtgacggaaaaattggtgtttcgttggatgatcaacttgtgttctgacttgggtataaaccacagaaagaaactgcgacggaaagagcagcaggaagaagaaggggcttaagaagaaaacgtgggacaaaccggtctctttatcgacagcaacgatctctgcatccaacacgatcgaccttacgctctccggatagaagctctcttgatcgattctgtctgactgttgttgacctggaggttcgggtaattccgatcgaggtccgaccggtctggtgagaaggatctggacgagggtgatgatatctgggtatttctctgtcatgtcttccagatgtctggagaacagtctgacgaacagcctgtcgggtgtgtgaaggtggggatggggatggcggtgtgtttgaggaggagaggtctgatcgtcgggaggttgtaggtcgccccaccagccgcctgggccgacctcggctctgaccgcggtctgttcgtccggcctacagaccctggcgtggatctgtactctctggccgtcgagttttgcctcgctagtgaaatctagaccggtgagcctggtacaagcctcgcctagggatctcgtgatggaacccagcatgggcgagagcgggatgcctactgtgagcggaaccgaggtcgatagattctcgagtccggtaggggatgataagagggagggaatgatgtgtgagtagttgggatgtcggacgtatactctgcggacgagtctgagtgagtgagtgtgtgtgtgtgtgtgaaggagagggcgcaagaaaaggctatgagaaagaagagcagagcgcagaagaagaaaaaggaaaaaaaaaagaaaaaaaaagaaaagacgagtgaaagagcaaagagaccaaatacatacctttctgcctgctcgcatttctttctccaaacttctctgacggtctctccatcagagggaatcgatgatggcagctgctctgtttcgttcaaccgggcccgttttcttgaacctcctttcgatttgctcgcggcggccgagggaacgggtgcgaggttcaacagtcgatggggaggaaggaagtagtctgtctcttcaaggtctttccagtcgagatcggggaaagaaggtctggtgagggtgaatgctctcgctagggatgtcgtcagtgtcaccctgactgctccgatctgggagggaagaggggaggagaggagaggagtagtaaggaaagaagacttggtgagaatgcaggaaggagagaccagggaaggcgagaaaaaagaatgaatgaaagaaggaccgactgactctgaggttctgaacaagcgttctgacgagaaacctggcttcctctcccttggcggctacgagtaatctctggacgatctgtatggaagatgatgatggatgagagaaagagatcccggatcaaaggtcagttgtgagaacgagttacatacgatatacgataaggaatgtgaatgtgtgtgtgtgtgtgtgtgtgtgagagagagagagagagaaagcgcgcgcgcgcgcgcgagagggagagaacgctcgacggacaacgaaggaaatcacttacgtccgcctttgttttgacgacaccggtgcctttgagggaggaaagggtgaggatatcggcgtataccttgtgtacgacgagcggctttggctcgaccaacgtgcggacgttgacttttgcttcgaacgcgacgtcacctgcgtcaccgagcttgtcgctcatccttctcaacgtgggctggctcaggccggtggctgatttgagagcggcggtgaggatctgggtgccgatgcctagctcgtttggctcgtaggacggtccgatgtggttcgacatgaggtacaccgtgtggaggagtgagcgggggtcatggagtgtgatcacccggagcaggtttgtcaacatccggacgatcgccagtcgtttggtggtggaagcgatgggaacaaaggcggtctggacgatgaaacagtaggtgagccttccgtccggccaggatgatgtgtcgaccgctgtggctgggtcgaagaggagtggatcgacgtcaaggtccgggtatgcgtttgagcccgggatggtcttgatgggggaggaggttgggccgggggaggtaggttcatcgagctttcgttttgacgggaggcttgaagtgagagggtgagccttgttgtctttgtcgttctcttcatcggaagagacgaggtcgatgacggacggaacggactgggtagggttggagggttgaccgaagaacgaagcgacggtaggttgattgcttggtttctttgccttttgtttcggcatggtgttaggtgtgtgtttgggtgagccagggttagtgggatggtgtgtgtgtgtgtatgtgt

SEQ ID NO: 1273 - DNA, 708 bp, Xanthophyllomyces dendrorhous
tgtgtgtgtgtgtgtgtgtgtgagagacggatggacggatggacggatggatggatgaaatgaatgaacgaaatgaatgaacgacgagtgacgtcatcgcgcgtcgatctgacacggttggttcggatgcgtgtcccagagccacgtggagtcagagagagagagagagagagggaagagcatgcactggagtgggtgagcgcgtgtgcatgtatgtgagtgtgtacacgtgagtgtgcaagtggttagaatgagtgagagatgcatgtatacacagagcagcaggcgttgtatacagggatggacatacatgagagggagtgagagagtgtgtgtatagagagtgtatagagagagtgtatagagagagtgtatagagagagccaacacacacacatatatatatacacacactcacacacacatatacactcactcactcacgacgagcgagagatccgtttgggcgaggtgtgttctagcggggtgtccgttggccagtgcttggggtgtctgtagtcttttttgtagtcttctttgtagtgcccgtggtgtgtgtagtgtggtcgcttctctctctgcgctctctctgcgctctctctgctcgctggtgtgatctgtattctgtcctagtgtgctgtctagtgtcttgtctagtgtcttgtctagtgtcttgcctagtgtcttcttcagtgccccctctccccc

SEQ ID NO: 1274 - DNA, 2282 bp, Xanthophyllomyces dendrorhous
gtagatctcaaccaacttgacgttcattcccatcgttcacacagagctgaccttttcttttctttgcccatctctttcaccgctctctcctccccgctctccgccctcgactcccggtctcttttcgaaatcatcaccatcatcctcacccgctctgctctgcccaaccccacttttgtctgactctttcccccgcccgccagccagccatgggccaaccgtccctccttggttcgcctctcgagttggccgctccgaaatcggtgtcgtcctcgttattgtccccgtcgccatcaccatcatcattatccccatcagtatacccgtcgtcgttgatcccatcaaccacctctccctcctcgctctctcctatcccccgatcgacatcctccacagggtcttccccctcgagctcacacaccgtcatgccctccgcccgttctccagacgggctcgccgcttcctcagtcccctcccccacagactccgcccagcctacagcagcctcagccctggcttccgcctccgccccagctccaggcgtcccccctgggaggttcccgtcgttcaccgtcagccgacatagccgtaactcgctctccgtatcctcaatggcatacccgttcccacagacatcgtccaacccgtcctcctcccgatcgagtccggtctcttcaccgtgtcaaaccccagacgtatccgcaccatcctcctcgtcctcttcccccttgcctcgatcaccgccggcgaccttcaaccatcactctcaaccccaccttcagcttcacccccagcctttgcctctcctcagtccacactccccatcgacctctccccctcgaccgagcagaccgaaactggccatagcaaccagcaccagcagcagcctcaccatcacaacaacaacaacaacaacaacaacaatagcagcacgctcctcctcttcagatccccctccgaacattcgttcgttcgccgtcgccaagccaccgagctccccatcgggtgatccttctttttcttcgtctggttcatccaccagtcgggaccccctccgctcacccagcccatcgaccgattcgacagagtcatctcccaaagcaccttccctcattctcggatcccaggtggtaggtctcaagctggccgtccatccttcccacgccctcccctccatccgacacgccccgtccgatcggaccagattcctaccctccaccgcccacaaaagagatcactccgctggccaggcatccctcctctcctccacctcgtcctcgtcctcctcgtactttgaatcaatcagtccgactaccagccaaccagaccaccaccacgccatcatcggttagcgcccgtttctcttgttccttctctttccttctcaaccgtgttctgatctgtccttgttttgttttgttttattttattctattttattttattttattttatttcatttcgttgaactttctatcttttctcttcaattcttctctcaaatcaatcttttctctccccgccctctagatactccgaccgacgactcgagtccagtctccctccgatctcccacccaacaacaccgtcggacgtcgtcccttcccctccatcccgatcaaaaccgatcaccagacgacctttccatgggttccgctcggccagatgatctccccgtcgaccggaaccgaccgacacagaccctcggaacggagcccagatctttgaccgatcctgcctctgcctctgcctccgcctttgcatctgcctcctcctcatcctgttcgtccagctcgacacatacctcccagacagacgacaccaatagcacaaccctgtccagcgtacacgaatcctccccagcctggaccccagagatcggatcccagtcgaccaaagaaccatcatcatcgtcgacgaccaccatctcccccacttcttccaccggcaggcataccatcaaaacaggcaaccaactaaccgaacaggccgacgaacaacccgaccagacccacaaccccaccaactctctcaacgttgatcttggaaagaatccggaccaaaccgaccgtccggcaaaggccgcggaggaggaggaggagagcgaagaagaccgaaagaagagagaggcgagtgtggcagaagaaaagaggagaaagtcgttgctcgttcataaactatgggacctcgtagagggcgaggtcagctatactgaggacctcatcacactcgttcatgtcagtccgagtttccttccttttttttctttctttttttttttt

SEQ ID NO: 1275 - DNA, 4077 bp, Xanthophyllomyces dendrorhous
atctctttcgacttaacctttccaacaaaggccgagcactttacgacctacgaagacttctgcacaggccacgagaccgccttagccatcatccgtctgtttgagaaccgaccggaatgggcagaatacgaaagacgttgtacggacatcgcccacagacgacctcggcccgacctcggttccatcctgttagcctcctacccgtctccatccgaaggcccggtcgggtcgagaccggatcgaccgccgatgaacccttcgttctcttcctcaaactccaccaccggtacgctcaccccatcgagcgcccccgtctcgccaggcctcttccctcccccggcgatcaacctcgacagaccgtactcgaaactgatgctcagagatctcctcatcaaacccatccaacggatctgtcggtactccctcctcctagccggcctccgaatcaagcgcggcgcgctcgaaggcgatcagagtgatgtcgccggcgcccagacagacaccgggatctcggcggatgggatccatttcggtggagacgtactcgacagagcggtcgacgtgatgaaaatcgccgcaggtggggttgatgaagcgacgaggaagaaagtcgcgatggaacggacgaggatgattaaaaacaggatagaacctcatatcgttcgtacagtgtttcctcttctttccttcctctgtctctctctctttctctctccttgtctacatcacctcatgcttggtctccatgccaatcttcgtcactcactctccttctctcctccccatcagcatctgacaaggacgatcatcgaggctctaggcgactgtctcttcgttggttccctcgaaatgatctaccagccgttacccataatggtctcgaaccgtcagaccccctcgcccctcaaggtcagatatctggccgccttcctctacgccggttatctcatccttgccaaagtcaggaaaggaagggactatcaggcgttccattacatgccattaagaggcttgagaatcgtcgaggaggatattcctggtacttgttagtgttttttttttctttcttgttgcgcctgttccgtcttcccttttttttttcttcctttttttttccccttccttcgttccgctcatctcgatgtcacattctccccggacaacagtcttcttgccgtactcgtttcggttgatcggcgaaggattttactttgagctggccgccggacattccaaagaacggacgctctggctcgacaagatccggttcgcacatgcactcggaccaccgaacgccacccaattaccatgctccattcccgaaatgctgttttcttccagactccccctccggagggcttcccaaggcgccggcctgtcctctctcgaccgcgcctttatcagcacgctcggtctgggtgggatcaactcgaaacggctctcgctcaacattacagaaggcttcgacctcgcgacgtcgatcgaatccgacgtgtttgacgagtctgcctcgaactctgtctcggcttcaccggcgacgacgacggtgcccctcccggcgtccccccaggtgtccaccacgccttcgtcctcgtcgtcttcctcaccgaaagcgctcatctccagagcgctcacctcgtcctccctctccttggccggtcactcggccttccaacacggcccgcagacgaatcagccggtctatctctcccaccatcaccaccacctacagcaactttcgttcgtccaagcccaatcgttactccgccggaacgcttcctatagagcaggggtcgacaaagcgttgggcgacgtgttttcggatagctgtgctgccgctcgtcaactcgcccagctggatggttacgtgctcttccctgggacgaacccacctacgaacgtccgctctcgcggtgcagccgccggcggtagtgacatcggtggtagcggtggtggcaatggtggtggggttggttccgccggtgccggtgccggcgatggaacctttggtggcatctctggcatcggtccgaacggatcgtcgtccggtggtcaggaaaaagaacggtcgagctcgatagggtcgaacgtgagaagaaagatgagggacggaagctcgatgagaaggcggagtacgtatgtggagacccagtcgtccgttctgaaccattccttcgggaacactacctttctcgatccactcaatcctttcggaccggtaggtttaccccccaccaccgttatcaccaacaacaccaacggtatcacggccagcacctcgatgaacccgtccgtcatcggccaaaccggctcgtcaactttcagaacgtccggcagcacagcggcctcgatcttgcacagagcaaagtcagacatcgcgctcaacaaaccaaagtttctcagacggtcgaccgtgtttgaggtcgaggagggctcgaccgaaggcgttctccccaacgtgccccccgtgccggcgatcgaacctctgtctgccggcggtagatcgagaggcaggacgaggacgaccgggtcgatatccaggtcgggctccgtcaataaaccagagttcgacggggtggcctccacgtccacgtccacaaccacctccacgcctgtgccttctgtgccccccagtcgtcaaaactcgaccgggaatgaggctctgtcctctcccgctccctcccaaacgtccgggacgaataccggctcgtctttcaaacacatgaggtccaccctcaagcggagttcttcaatcttcgaaggctggtactcgaacgccgggttcaactcggatgccatccctcccgggcctagttcgagttcacatcccacaggcaccgcccacaaaggctcgccccaggatggttctttaatctcttcgctctcgaccttgactcttaattcgccctcgagtcctagtaagtccgccggtggcttttccgtcaaggacagggacagggacaaggacaaggacaaggacaaggacaaggacaaggacaaggacaaggacaaggacaaggacaaggacaaggaaagagaacgcgagggtaaagatagcttccttcgacgatcgctctctacgatctctggcaagagacgatcgaagagctataccagcgtggcctcactctcgccctctagtcttgcgcctttcagtgtatctactagtccgccaaaagtcgaaccgatcccgatcccgaccccgaccccggcgccggacccgactacgaattccatgctcggcgtgaacggaaacgcccccggggatgggacgttactctctctgacaccggtgtcgccttttcagatcgagatccctgcagaattcggtgggcccggtcgacagagctcgcctgaagactcgacgatcacgctgccgatgatggcctcggcctcggccgaccagaccgtcactcgaccggcccattccaggacatcctcttccggtctgtcctctgggagaaactcgatcgtctccgtcggctccggcagaggttccctctcgggcgcgagtagcgacgagggagccgatgcgttggtcatcccgaccagacgacggctcaacggcgttaggttcttcccaaagtcgttgcagatcacgccgatgcctccttgatcggtcttgctttctgtttgtttcttttgtttgtttccgtctgtttctgttttcgttttcgttttcgttttcgttttcgtcttttattttttattttactttattttttttgaatcatccctttcccttcttttccgctcgttttctttctctcttttcgtctcgttctgatagatagtataatctgctcgacactgtatcccgtccccctttttttgtttcttttcagtttcttctctttctttcctactccctcgcttttcttcttccttggaaatcctgtctgatacgctcttaaactgtctcttgaattgtagccactcttcctctctttttcttcaactggatcaaccatatatgcttaccctgcctaatcttatcctttctgcctttttctctccttgtcctcttattcctgtcactaaatctgctcagcacgcgaattctcttcgtctcttctc

SEQ ID NO: 1276 - DNA, 34397 bp, Xanthophyllomyces dendrorhous
ctttcgttttctacctgcgttcatcctctggtcaaatcaaaaaaaagatcacactcacctatacactcacacatgcacacaccctcatacacctatacattcatacaactatatacattcatacgttctcatgacctctacctacgcatgtattgtttctttctttctttctttctttctggccgtttcctttcctttccttctgttttattctattctatccctttacaacttgattcgatatgtgttctagcagctctcttctttatacgagggtatacaaccggtgctgaagaaaagaaaagaacgagaacgagaaagagaaagagaaagagaaagagaaagagaaagagaaagagaaagagaaagagaaagagcgggaagacgggaaacgacgaacgcaacagaacgaggaaaggaaaagaagtaagaataaagaggatgagttgagaagtccaagaggaaaaaaaaagaagtcgttgatggtgatctcatcggtttccccctctctccttttttttttcctattccttctcctttttacattttacgttgattccttcgacttttcccttggattcttcacttgacatctctttacacgttcaagacacctactccgacgtgaaactctcgacacctggaacgtccagaccgagactaaccagaagaaactagcgagaccaaaacaaacggagataaaaacagattagacatgacgaaatcaaaatcaaccccggtcaccgtcctcaccggatttctaggcgcaggcaagacgacgatgatcctctcgatcttgaagcagctcaagccggattacaaggtgtgcttgttgaagaacgagtttggcgatgtcgagggttcgtctctgtctttttttttctttttgtttgtctttcttgagcttttgatgtattgtagaaagcccctggctgatcaggtttcccggtatttcgtttcgttgggggatactttacccgccgccgacgccgacgacgacacatcacaatcagtcgactcactcttgacggattctccttcaatttccggggtcgaagaggttcgtccgaccgtttcgccgcttgttccgcccaactgcctctcgccgtccttcgtcggcttgggatgaatgaatcgagagtcgccaaaatgctcatcatgggttctgctatccacacaaccccctctctcccccccttttaatctccttttcatttgttggacggatcgactcgaacggacaaaagatcctgaacgggtgcttgtgctgtgtcatggtcggtcagatgaagaatgctctgctcgagatcaaagagaaattcaaccctgttcgtcttctcgtctctttactaaactctccctgttattttctccaaagaagaaaagaccagcgttcatcttgagctgaccgtctctttcgtttcgcgtcgatgcggctctctcggaatccgtatatatacatatatacatatcaaaacaaaaaggaccggatcatcgtggagagctcgggttctgcgttccctgctacgttggcgtggcagattcgggagttagaaagagagactgccggtggcttaacgctcgatgctgttctcaccgtgatcgattgcagtcagtctcgttcttttcttctcttacttttttccctctcatgttgtttcgtcgagtctgttggtttgcgctttgagaaaccagctttgttgacgagatatcgagatttgtttcgcggttgatcgtttgggaatttttttatttatttcatcctcaaagtcaacttcacgggctacgaggatacgtcgcctacggccaaaatgcaaggtccgtctgtccatctggggttgaccctctgtattctctcgcgcgcacaaatctgacggtctcttttgtttgcttcctttccttgcttgcttgcttgcttgcttccttccttgcttccttccttccttcctttcgaaccgtcaaaaagcgaaatacacggacatcatcattcttaacaagtgggatcttgtcaacgataggcagctcgacaatgttctggatcatctttataccctcgtacgtttgtcctgtttcattcgtgtcgaacccgactaggaactctttctttatttctcacctaattcttttttttgtgaaacccccccgacaactcccctttcggcgcggcatccatcatcaaaacagaacgacgagacgcctaaacttcgacactctgaagccgacccacttacaccttccgtcctgtttggactagactcaaaactgttcctcgaacgagagaccgaagaagccgaattcaaagctgccggctggcaagaaggaaacagcagccataacgccgaggtcgagacgtttggagttttcagaggaggtgatcgatcggcttggcctaagcccaagtcgacgactggaaaagcgcacgttcattcggcagattcagggtgttgtgtcaagagcgagtcgtcagaggtaaaccaacctgagggggaagaagaagaagaagaagataaagctgatttgatcgattgggcaaccgtcaaggctttcttggataccctgccatcatcgatctacagagtcaaaggtctactgaacgtggtggctcccactgccgaaggggcttcctcggctaacatcactccgttctccgcccagccgttaccgccatcaaccgaatcctcaccggcagatcccacagagaccaccgcacaacgacaaccaacgacgacaacggggcgagggatttacatcctgaactgggctttcggccgttacaccctcacggcccttcctgcggcttccaagggcacatacaaaggcgtccaagccagattgacgttgatgggtgagcgaggggaggtgagaaagtgggcgagccggatgggagaggttgtccatggggtcttcctctagatgtgtttcaaggcttgacgttttatttttatactgtgtttcttttgtttcaatttgtcttcgttagatagataatatagattttcttttgtccacgagggggtcggttattgatagatgtgttgttattgtgtatgtattaagctgggtttgtggagaaactaccaggtgatcgaggagacgacggcgaggcaaggcaaggcaagaaggaacacagtctagagctcggtccaagaagcttgagggtcatccggatttttttcattcgtcttgtgctgagagacgaaggagagtgaagacgcggttggcagttccagtcctgccaagacagacgctagttgtcttgatgtccgaaggagaaaccatggatgagaacaagcgaaagacagataggaaaccccacgaaggctcacctctgttctcccgctctggtctctagcatcttgatgatctcctcgacctgatcctctcctacgtctcctcccggcagcgttctcgcgtactcaagagcatgatccagctgagattttatcgagccaacgatactcgcgatttctacattccttgcgtccgaccgggacgcgtcggctggatctttatactgggaggctgagatcaggtcgagcagcctagaaatagatggaaggattgagcgaggggattccaattgagaagacattatgaatatccggctgttcgtgcttcaagaggatggacggatgaatgtgtatgtgcagtcagatgggtgtatgcggtcaaaagagaaaaagatgagaataatatgaaatgtccctaatagaagactacaaacgtcctctaatacgagacgctgcgagcaaaacactacaaaacgtctgtaatgcaagactacaactctcatctagtcttctcgtactttctctcgaccggctttgttccatctctgtttagcgttcattctatttctctctttaccaccactcacaccataccagcacccacactcggctggctggctttcctttcttggattgctttccgttcttgttcttttcattttcccatcattgttcccttctctctgtggatctcttttctcttttgctctctcgcggcctttcttttctctttttgcttctcgacagatccagacacgtccaacgcttgccctgacaaaccataaaatcaggctttacctctcttcgattcgtcccttctggtttctttattcggccatccctctctcacttcataccccgggcttgataggtccaactgtatcacttctttcatccattctttgtctagatctctctttaaaatagcaatcgtcgcgtcatggtcgcctcatcccatccgacccaggcgaccacgttaccggatcctatcgtcaatccacacagagggttcaacttgtcccatcaaaaagtctcggtcgatgtctctcttgctcttggtgtcctctccggtatcactgagctgaccatcgtgcccacgtcgggtgacctccgaacgttgttcctgaacttccgtcaaggtcgcgtcaaacaagtctcagtctactcgtccgtcagaccaccggatgaccctctcgacttttcgtcaccaaccactgctgccgctgccaccgtcgcagagtttacccacaacgatcctctcgcctctctttcactctccaagcccacagacatccacacctttccagaggcgaagcgaaaggcctttgctgccttcgccgaaggtgagcagggtgagctcgcgatcaggcttaaaccgagtttgctcgaacgacaccgaagggatcctagtctgatgaccgaggatgaaaaaagggcggacgcaagacgggaacttgagaatctgtcggagaagaacggcatcctcatcattcagcctgctgggactaaggtggagaccataacgctccttgacttcgttcctttgatcgtcagaatcgagtgggaagtcgcgtgtggaggtgaaggtcttgcctggtttggtcgaggaggtgataacgattgggtgagctcatcttatatatatatatatatatatgtatttgggaggagttcggtcactttgacaatcgggcaccaggtctgactcttttttctttcttcggttgggatgcttccagcacgtaccgcatatatacaccacgccaaccacacctgatgctgctcgttgctggctgccgtgtgtagataatatgtgggaacgatgtacgtgggaactcgacttcatcgtgcctcgaagatgggtagatgatccatcgtacggaaagaagaaacggcagaaaggcaaagatcgggcgagaggcattcttgctggagacgaagagaggggcgaaggagaaggaagagcggttgtagttgcttgtagcggggatctggtggaacatgtgagtcttctgatcttgttcataccccgatatgatcctttgactctatcctgtttttgtctatgctaacatatgtctactaatctatttggctcctgaaggtctcccacccctccgtttcaacaaaatccatctttcgattcgttcaatcgattcccacgaccgtccagcatatcaccttcgccgttggtccttttgaagtactcacattacctccaacgccgaaccctccgcccacaaatgcgtcggccgccaacccttctgccactagcgccgcgaatcctccgtccccgctagccaacctggcctccatggacaacccaatacctgccgaggaagaagatatagagccagaagcagcagacgtccaggaagacgacccttcatcttcatctcaacccccgatgcacatcttcacgctacctggcacatcacatctgcttcaacattcgaccgcgttccttagaaaggcgatgagcttttactcggccgagtatggatcatatccgtactcatcctacaaccttgtgttcgtagacgagccgctcgaggtgtgcacttccggagcaggcatggcgattgccaacgtcgacttgttgtttccggaagatgtgatcgaccaggcttacgagaccagacatcttctcgcccacgcgctcgccttccaatgggtcgggatcaacatcatcccgaaaatgtggtcggacacctggctcatcaacggtctgggactatacatcactgggcagtttatgagaaagctactgggaaacaacgagtatcggtttaggctaaagatggatagagaccgttgcgcccggatggataacgggtctcagctcccaatctgtatgcccggttcaaccaccccaccggacgcaacgattcttcctttcctcaacttgaaatccgcccttgtgctgttcattctcgatcgtcgattaggtaaaacgggaacgtccctcggtctctcaagagtgatcccaaaaatctttctatcggccctgaccggcgagttgacgaacaacgtgctttctactcaagccttcttcagaatgtgtagaaagatcagtggagtggataccagagcgtttgcggaacagtgggtttggggaagtgggtctcctaggttcgacgtcacagcggtgttcaacaagaaaaagatgttggtcgagatgacggtcaggcaaaaggtgccggcaaaagatttcgagaaggacgatcttgtcagagaaagcttttggaaacccaccagagcgttcgaggttggtcgactttttgtcacttttctctcaaaacaagaaacagaaatcatctgaagtgtgctctgagaggagatggagtgaaaaaagctgatcaagagcttgttccattcttttcaatcacaaaaagggtcaaatgacggttcggattcacgaagccgacggcacgccctatgaacacgttcttgatatcagagaaggtttcaaaacgtacgatgttccattcaacacaaagtacaagcgagttcgacgaaacaccaagcgatatctcgctcgaaaagcggcagcagcagctgctgccgccggagatgccgatgccgctgaggcgatgggcatgctcgatcttggatttgatcttgcaatctgggaagatgaaaaagagagagaacgatggagggtagcggattggacggaggaggaagaaaacacgatggtcggagcaccttacgagtggatcaggttggacgcggattttgaatggatagccgaggttgtctttgatcaacccagtttttactgggttaatcaattgcagagagatcgagacgtcgtagctcaggttgaagtgcgttcttttcatcttttttttcctctcgtgggtcctgaataatcatcatctaaatcgaaattgtccttcttgtccaactctcgcatcaaggctatccacgcgctgaggaacaatccgacgcccgtcgtgactagtacgttgggtaaaactgtgcttgtgacaaattacttctatcgagtccgaatggaagccgccgacgctctgcaagttgtacgtcttcctcttgccaatctttttcctacatgaaagagggttgtttctcaatttcgttttcaaatcttatgacatacgctgcagccctcacataaagcgcctaagaacgatcaagatcatctcggtctgttcctcttgttcaaaatctttcagagcagatactgttatccaccactggatggcgaggaaccaatggatcatacggcgttcaggtgcattcccaagcctaacgacttttcagattttgcagaatattttgttcgcaaggttcgttgattcctgtggcttcatgttccatcttcaacaaatatagcctcgttcttgtaaaacttacgcatcattcttctacattccttcctttttcctcaaatgaaatcaaaaaaacttcttgtcaggcggtcctcattgcactctcaagatatgtacaaacaaggggttcgtccagagaagcgattagttggccagttgttcgacagttcttggtagatctattgaagtacaatgataactctatcaacaaggtcagcatatttgcagagaattctctcatgtcgtatcctactgatagcagtctgatggttttccgtctctgtcttatatgatgcgcgctcagtactcggacagctcttatgttgccaccatcattgcttgtctgggctactgtcttgtccttacagcttctgtcgaattgggcggagcttcaccagcagctgctgatttatcgaaaccagatcatcgaacaagtatattattgctcgaacaggcggcggaccaagtagatagatacatggagatggatagactggtgccttcatttcataacgtcgtcacattggctgggctggaggtttgttcgatatcttcgtattgtcaacttttctgatgttcagtctaacagtgtacgacaattcttctggctatctcaattcctttttcgctctccgctagtggaagatcaaggcaacattagcaaatctaattcctaatgatgttcgactgtttttggtctacacccggtgagttttttgcttggtgcggtccgttataaactgatacaagaactcgttgctaatctaacatttttttgaatttgataacacagagagggaaactatatccccgtacggttaacggcttttgattgccttcttctctgcctgggtcctgcgtccaaagcggaagttgctagttatatcttccgagtaatcactaaggatttatcccgtcttgtccgtcggcatgttgcttctgccttatcggaagcctttattatcgctctctccgttggtagcgtcaagttgtctcatacgccagtgatcgtacagaactcggccgaagcggatggaggtggaagtggagcagtaagtggagacggaggcccaggaggtggaataaaatcaaaagttcaggtggacgaggttgagtcttcgttaaaggctctgaagaaggagatcggtcggtcggctgtcatgagggagggcatcatgggagtaattgcgttagttcggtgttcaacttgaaacttgttctctctcctgatgccactgagactgaattgtgaatcttgttttgggaacggtattcaaccagttctcctgaagtcgattttgatgtccggtggtctatgattcaattagccgatatgctcgtccgtccggcagaagaaactatgcccaagctagtaattcatcttcaacccactcctgcggtggagccgaccactccgatgttgacgccgaggatcaagctcttcgctggaaacggcaagtcactttatcattttatgtactcaacaaaatgttgcgctcgacctgctagttcatgcattgacaaatcagctcttttttatcatcttcacgatttctagccccacctacacctgtccaagagaatatcgaatttgcctcagcgatcccaacaaacccgctcaaggtcgtcatccctcgtcaaggttcccaggagacaattaaagtgaagaagaagaaggaaaagccgaagcctgtgatcaaagcctgcaggtctggcctatccgagatggatttggtggcctgtcggtcgatgttacggaaattggttcgtcccgtttgatatagaagcgattttgtatttattcctgctaaccggtaagcggttgtcaaatttatgataggaaacgcacaaatcatcagcttactttcgtattcctgtggatcctgtacgagattctgcactagagtaggtcatagtctccgtttgacaggcattccaatcaatgtcgtgtttgttatcatatgctaacaagcaaattcgatttcgctggcctctagctacttcgccgtggtcaagaatccaatggacctctctacagtcaaggctaaacttgaagatgggcaatatccaaatcggttcgcttttgccacggatgttcggctcatcccttcgaattccatgcattacaatcaaccagggtcccacttgtacaagcttagcgaaaagttcgacgcatatttcgagaagcaatgggaaattttgaacagtgagtctcgaccgcttccaacggcctagattcagaaaagtgatcacgatgtgatgttgattaaagtaaaagctcaccttggttcatcgtctatcgcttcttcagatgttttgtctgccaacggagatggcggacctgtcgtacccgctgtacccacaccagcacccacgcctacggtcacggctgcgcctgtcacttcaaaggtatcgataaagaaggcatcgacgatcaatggtcagcctgtagcttccatgcctccccctcccctaccagcttcagtaacccttccgaaaagcactatgaccgccatcaccccccttcctcggccaatcatcaagcttaaaacaaacacgaccccccttgccacatcaactgatctgcctgccggtccgagtcctgcaatcccttctgtgccacctctggctgccacagcgggctccaacaatgcaccagttcctgtcgagggcaaccctcaatttgtcaatccccttgcgaaggagaagaagagcacgaaacaaaaggtcaagatcatgacgccgtcatcgacgcctgggcctgtatccaaatcaacaccttctcttaaggtcaaggctgtggcgacgacaggagtagacgatttgctggatgaagagcttggtctcctaatgggtagttcgcctcctccggcgactcgcccatcgaacttgcctgtcacgatccaacggcctccttcgccaccttctgttacgactggaccacctttctcatcacaagccccgtcctctgtcaaaggcgtcaagttgacgtctgggaagatcaagctgaagagtgtggagagcccggcttcaattagtgtgaagccgaagttgaaggaacctgagatggcgaagatcaagttgaaggaacccgaggttgcaaagatcaagctaaaaacgcctgacgcgatagcatcgaacttgacctcgacatctgcacctacgccagaaacttccaaaaaactcaagatcaaggaagtgttgtcaacgacgagcatcccttcggccccggcatctagtttagaaccggccaagaaattcaagcttaaaagcaaaacttcagcaaatacttcgccggctcctgctccagatcccggtcttgttcatctcgcagaaagcttgtcaaaatcgcattcaagtcccgcgcctcggccctctttaccttcagcttcatccattccttctttctcgcagctcccgcctccgcctccgccacctccctcactgttactgccaccattgacaaattcacccggaatgttatcccctcttccacctccgccgctagctaaccaaccactgagtgggtcttttgattcgtcaagttcatacccacctgatcggccgatgggatcgatactcccaccagcaattccaaaggctaggccgagtccaacgttccacaaaaacaaggaccggattattgtaaagagagcaagaacgttgatccagtcggtcttgcgcgttccggctgctttcattttcgcccaaccagtcgatccagaaagagacggttgcccgacgtattatgatgagattaaacgtccgatggatttcgcaacgatggacaacaagctctcgaagggtaaatatgttacctggggtgattttggagctgatatcgagctgatcttcgcaaagtaaattacacacacccttctgaaaatgagtaggagggagaaaatgacgaacaattactgacttcgttcattcttttcattagttgtcgacaatttaatccgcctgggacgggccctaccgagtgggcggatttggtggaggaccatgtgcgaaaggtagaatggccccgagctacactgaaggagattttgccagaggagaaaaaagagttaagcgggatcatcagcaagctcattcgctggcatggaagtgaatggttcagagatcctgtaagcccttctgaattgactatacgactaatcaaataaagagatgaatgctgatcgtttcgtactcatcgttctcaattcttgggaactaggtggacgtggttgcgctcaacatcccagattatcccaatatcataacgcagcctcggtccttgtctgtgattaaacagaatgtccagtcgaatccgttatacaactacgacctattcgagacagacatgcatctggtgattgacaatgccaagaaatacaacggtccggattcagctgtgggtcaggcggcaacgaggttggagaattattggaggagtattgatagtgaaggaagtaagaagcgaaaggacgcgagtggaggatcctctgggggaggaggtcagatgaaaaaggtcaagcgctagtgcgttgtgttcttgtatgatgtatctttatacgatgaatgtactctgttaaatgagcagtgtatcatgtagaagttgcactgcactgtataaaccgagtcggattggctgctgcgcgttttgccggggccacctttcgcccatatgcgatctctcttttaccatctaacatccatcctggccatcttctatctctgtattctgtttttttttgtctcctctcccctctcctcttctcttccagatggcacccagattatcctcaggtgcgcattcaaatttgagtcgagtctggactagatctcggtcttccgatggggaaaagactatgaggaatttatcgtcgtgtgagttttgttttctcaactagtcagttgatttctcttctgtttgaaaaaattaagaaccattcgttgaagcctgtatccatggcaccattcctttccccaaactaggtctcacgatgaagtatccatcaagtgttttgtttggccaacgtcttctctccgaccattctaaaaggtcttcaacggccttcggttctaccaccatttcctataaaaccagcacccatttgccgatggtgagaacgactgctgcctccgactccctgcgcatacgttcttctcaaccatatcgaaccacttatcaaactagacaccaaggagtgctgatgaaaccgcgaacatacaagccagcttcatcatccacatctcatgttgcttttgtaacagcgacttctcaatcatcttcatctacatcttcgtcactgcaaaaagtccagatacaaagtcgacccggacgttcttccttttcctcttctaatcgattagatgcttcatcgaatacgcaatctctacccggtcaagtgtcaccctcttctaggtcttcaaaactaccgcttccccctccgcctcgaccatcgcctttaccttcaccttcacctcaatcaaaatctataaacacgactgtacctggtctattgggagtcgctcaattccaaccacttaattaccctagctcttctctttccacgctatcatcatcaatagattctcctaaatcttctactggccttcctgatggtatctcaccatcaacttcgtctcatcaagcatcatatgtggcctcctcggcaagtcaccccccaatagaatttcagcttttaaggcctctcccagtatcaagagaagcagaaaggaggaggaatggtccgaaacatctgcctactctgaaagcaagtcgaagaccatttgagagtacgcctctggagagagaaacgttgaaggataaggagaaggagaatcagacggatattggaaggcagtcggaagtggcaaagttaagaagtgaatggcaaaaatcacacctagacccaccatcgtcgctagatgacctaccctcggtcggttcgttcattttcttccatcatcagcttgaaacgcgcataacttgacgtcagatgagattcattgtgacctttcctcggcgggaattttccagatggatcgatcgagatggctcatgcaaaactatacattcaggccttgaaggatcaacaaactgatctttttaaaaggtttgttcatcatctttctttctctttgatcatctttcgtatgatactgaagcctattcgctacttgtgctggttttactggtttgattgaatctaaatggtcttccagatttaacgaaaaccgcgagttggtattgcgcgcgctgaacgggttaccagactcgtctatggatgacgccctaaacaagatttctggtcaaggtagataatttactcgaataattgagcaaccacatgcaagaacatcgtttctgccgtaagctgatagcatgttcggtcgcctaacatgatctaccgacttctcacgtctagacactcttcaagacccagtcaaactgctcgcacccgaaccaattcgcaagctatggttagcaaaaagcgaaaaggatgtaagagcagtgttaaagcaggtccagaatatatatcagtctggtcgggttcccgctttacctacattttatgaggacctatctggttcgtcaacaaaatgttcattcacactgaacagagttcagcaatactcatacttcatacggtgtttacgttcgtcttttaattctgtttaaaataaacagtcgcctgcaaacgtctcgaattatatcatctgttgggtgaagtcgttatgtcctcggataattacggtttagaacctgctccagcaaaatatctctcttctcttcgaggacttctaaagcatctaattgataaggaatcctcgatcctcgattcaacctcacctcccacgccgacggcatctggaatctcggaatccagggctttgccgttctctcgtccacgtgaccattcattagagccatcatccctccgattgaccattcctctgctcgaccaactatttgttcaactcccgttcgaccctgtcctctgcgcgctgtctcttaaagcgttgtctcttctatctcttacaacgtccaatgcttctcttcgatttgcttcccttcaagagtctctcctaacttcagatatcccctcttcatggacggtccggacgggtaaagatacatggtggagtggtctcagtccgggcgaaattaagttacattcccgttggttgttggaagcactagattcagtcaggtctttcgtacctccagagttggctttgttgtggaaagcggggataccaagccccggactcgattttcatcgtgctcggttgagagaagttttcctcttggtcgatcgagcaaaaccaaaaccttataccatcactttggagcgtttgaacaatgatgtcagcaatgacagtatcaccaacaacaaacacaaaggtcgacatcaacatcgatcatcatcccaagaggacaccatgtcggacctaggtctacccaaagctctcccacttgttcctcgactgattgaatctttcctcgattcacctctcgcatcacatcattctgatccgatcatcgttcttttttcactcgggatcaggatgaagatgattcctgacgaatcagcattgagagagatacactggacgatcagaaacttgcccaagttggcaaagtcttgggacaaggtaatcgcttcgaccagtcgtcagatagaaggggcagggtggatttcgaaacaagacagaattgtagctgaggcttgcttggggatggtcgaggaattgttgaatgaaaaggttgagctgtggcagaatgggctttcgctcaggaaaaatgaagtgggatagagaatacaatgagctcctttccagagatcaagacaacacattcgaaaagaaaaagagatagacaaacaaggaccactctttatcatcaacgttataatacatgtacatataataaagtaacataataatgacaacccttctttgacacctcgcctcttgtgacgatacaaagacaaaagggtcccagacaggccaataggaacaccagtcaaggagaatctaaagaaaggaacttcctgttggagggtctgctttcccccttctcctgtcttgtcatgatctctcatcctgagccgtcgaagctcttccccttcctgtttttccatttccttcccttcctccaccatgacgaacattttcttccctccatccaggactcgttgagcttcttgctctttctgatcttcttgcgtcggcctgtaacagctgttgctgttgttgatgttgtagctgttgatgataatgctgctgatgtatcgacgcacttcctccccctccatttcctccaaatccgcccgcaccagcacttacaggggcaactgaattatctttgatgaaactctcaccaatgactcttccgggtgaggaagagacgagcagataatgacctgcagaaagcccacgaagtgtagctgttgatgtttttctgcctcttgaagagggtctggtaagggtgatagcggccggtcctacagtctgattgtgaccaaatgtaggtgtgtgtgatcgtacatgggaggaaagaatggatggagaaggtgacgacggtctcgagtgaggaaagagagaagggtgataagatggagaaggtgatgaagggagggaaagaggtggatgcggagctgaagatgggaatgacggaggagaatacgatgatggagtgaggaggtagacacctaagaaagtgatcaaaagaccaaggatgaagatgattgaactgaaaaagaaccggaacacaattatgttttcaggtcccattcctcctagtttcgaacaacaggatcacaagagggagacaaaccggctcaatgaaacatcatcaaaatccctgaagagaatactagatccgacaatggccgaggttgagaacagacaaaactgtgttggcaccacaactttcgagtcaaacctctggagtgccttgttcaggtatctaaaaccgatgcaagaatcacatcaagtcgagagcaacaaccgatgagaaggacaagagcgcctctatccagtgaatgatttgaggaaaaaatataccttagttgaccgatgcatgtaacgatcaaaacagctaggattgggtagaaaatccatttcgaaaagacgtccagccagagagtactaagcagactcgaaacagctttggtcgataacactgtttgatcgatacgagatagtttgcctccttgatcagaagttgattcacagagaaatgttactgtcagaccagacatacctgtgaatcctccaaggagagcgcacaagccaacatctatcagaaggaaccgatcgtcccgccccatttctgaaaatacaatcaaacagcctacacctagggccctatagatcgaacttagttcagctcagtaggctgactccaaggtgactttagacgatgagataagagatcgtgaacgtacatgagccccgagtaggcaacgaagaacggttgtttgagtaatccgattaagacgtctggcgtcaataccgattgatcatctctcgaggccagcacaacgatggaggctccaatgatggccaagaagacaccttggatgtctgaactcctaaacgtctctcctacggtaccagaccgattcaaaaataaacagacaaagatagaagatcagcagcgcccaggatgaaagtcttgagaggttagaacgaacctaggataaaaggagcaaagacccaattggcgaccaaactaacagttcccaacggcgctaccacactcgctggtgcataagcatacgatagaaagttcccaaactcgcccaaggtcataagagacagtccggcccaccaaactttggatttaaagtaagacgggccatccttctcagaatatgttgatctcccctctaagatccaagggttgaaggtcgaatcatccccgttgtcttcttcctctacttcttgatcttcctcttcgttaaggtctaccagcgattcactgcaaacacctgttcttgtcgaggagagaagggaagtttgctcagtcggtacacagggatcaccaacgggtaaatccgaaggaaggggtaaaggggttgaggaggctgaagatatcttttcatgagctagtttctgaaggttgagagccagagagatcagaatatctgttatcgaacagaagagaaaatcaaatgaggtcgagaacagtctttataagtaacgacgattaaattcaaaagggaaggaggacactaactgcctgaaattgaaaagagtacaccgatgatagtcgcctgctgagtggcatccagagcaagcatccttcctcaaaagaatgtgcacaaaggaagataaactgaccaaaagaggtcgaacgagaaagaaggaaaagataaacaagcaggccggacggaggacgaaagatttatgacgatttaccctttccttacgcttattcactcgacccggaattcatgcagttacgatcaaacatcctcacatcttacagtcactttgccggtcatcgtgatgttggttacttggtttgactttgatggcaatctacattctgtattggttgctatgatggtatacaggaagtgaataccaattcaaaagaaaaaagatcccagagcagacaggaactagacaaagagtttttacaaagaagcaagaggaaaataggacaaaacagaagatatcatcgtacacgtcgtcaggaaatcgcatgcttttgggtggggtgagggaacagagaaaaacaaaaaaggaaatctattggaaagcgcctcgttctaggttcaacagagatgaaaacatgggaagatgaagattaagattcgaagttcgaaagatagtcaaaaatcgaaaggatggtgaagaattgataaaagagaaacagaaagagaacaagatgtctaaatgcaagatctagtagagggttgaacgaacgaagctaaggattaactttttaggaaaggcaatgcgtgcgaatattggggggaatggacgacacagacgaagagagaatagacaaatcagatggagagggacgcgaccgagaagaaacagtgagaagggcaaagatgaaaaattagaggcagccagggcgagatgattgttgaaaaagaatagtctacattcgattaccaccaagagtttcctcctccctgctgggggggaggtcctccgtaaccggaagcaggagctcgaggaggggcagcagcgaacccgctagaaggtgcccctccgaatccaccagatcgaggaggaggtcctccaaatcctccggaccgaggagcacccccgaaacctccaccggatcggacgtctcggttaccccctcggttgttccttcctcctccacttcggtatcctcctccaccgaaagaagactcgtgagcaatctcgttcaaccaggacgggatgtcctggttagcctcccgaagaagctcgataagctccctggcgattcccttatttcctcggttgaagaaagcggtggccactccggtgttaccggctcgaccagttcgaccgattcggtggacgtaatcatccacatccttaggcaaatcgtaagaaataacgtgagtgacgttgggaatatccaatcctcgggcggcaacagcagtggcaaccaagaaaggggttcgaccgctcttgaaggtgtgaagagcgtgctctcgctcccgctggcttcggtctccgtgaattgaggttgccatgagtcggtggtgacacaagaaatcgcaaagcatgtcggccatcttcttggtctcggtaaagatcaaggtcaatccaccagcgttggtggactcctcggcgtggaggatatcgagcaggaccgatcgcttgtcgggatcctcgacgtactcgacccgctgggtgatgttctccgaagtagatccaactcgtccgaccatgaggaagctagagtgaacaagtcaatgaggttcaacttatgtatcgtgaacacggccgcagatagaaagaaagatgactaacatgtactccttcaagaagtctttggcaaggaactggatctctcgagggaaggtagcactaaacataagagtctgtcggtcattgactccaggcatatcctcctgctggacgattcgcctgatttgggctgttaatagatgaaaacaataacacggccacagatacgttgagtcaaagatcgaaattaaggttcaacaaccccgaatagaaaaagaggaagacttacgttcgaaacccatatctaacattcgatcagcctcatcgagcacaaggtacttaacgttagccaacgagattcgtcccctctcaatcaggtcgaccaatcgaccgggagtagcgcttaacaagtcgcaacccctctcaatctgcctgagctgtcctccaatgtcggctcctccgtaaacgacggccggcttaacccaagatcggtagcagaacttcctagcctcctcatgaatctgagagactagctctcgagtgggagcaaggatgagggcagtagggtaagcctttcggcctcggtgtccattgaaggagtcaccagcgctgggaggagctcggggtccgttggtgaaggaagcggaaaggatagggaaaaggaaccctccagtctttccagaaccagtctgggcacaggccatcaaatctcgaccctgagccacgatgggaatggagtacttctggacgggggtaggagtagtgtagaaggcataaccgatgttctcgaggagaacagggtcaagaggggggttcgtaaactgggtgacggggtcggggacaccttgtccggtagcctccacagggattgactcgtacttgtcgaaattgattccggtgtgctgtttatcgtaaaaacagaaatatcgggaaaaatcaaacgaaaacgcgtaaacggatgtccatttcgactagttcgaacaattggtaaggagacgaccaacctggtgagtcttatcatcggcttctccgaaaagctccttctccaaccgagggtttcggggtccagggacatgcttgccatcccgccacgaaccatcgtttcggtttcctccgtatcctccacctcctccagagttactccatccacctccacctccacctcggctgtaggaaggtccgttgctgaatccgttcgatccagcgccagagaatgcggtggaagaactgatagagcaaagtgtgaaaggcacggcaggtgcgtaagcaaactcgccactagaaatgaaaaatgaagataagtgtaaacatgtctactaacggctggttgatttggggagggggaacggcagcaggtcgggaaggtgctccagaatttcgcatgtggggaggcacgtaggccggtctagtagggttgagtccgacagtgcctgatgtcaatgaagaaaaaatagcatgaacacgagttcagtacgatagtcaatcaagagaacaaactggttctcaaaagaaaaagaaaaagaaaaagaaaaatcctttttgcctcttctcaaaatggtcgccacacaaaaaaaaattccacccaacctcttgaggcaagaggtgaagggcagtacatgtatttgtgcgaacgaccagagaagagaggggcgtaaaggagacaggcaaaacactcttgaagacataccgaacttgttggtcagtccgttgacatcggcggaaccgttagaagttccgtttccgtttacatggttgttgctcattctatgtgtacgagaatgtgttctgggtatgtgcttaaagggtgagtgggtgagaagtggaaaaagagcagaaggaaaagaacatgaaaaaagaaaaaaaatgcgtggtggattgaatgagaaaatgcacgtggttacaaatcaagtaaccatcacgtgctagttctacacggataagagataacccatgttagaaaacgacgttttgagattgtcttcttgatgaacacaaggtctatgtatgcgttcatcagttggaagggttatgatgttattctcaatgcctatatgcgccaattattttgtcctgtgtctatcttctcccacaggactataatatcattaatagagctatcatcgtaaagctattgtgcaagaggaggtatgtgtctagctagcagccactttgatctgttttaaagacaacacaacttcacagaaaatcagacactgctaaaggaaagagttgaaatctcagaacaagatcaaacacgcaccgcttcaatgactaccgtcttgtcgccttctgaatcgagatagaacaaccaagtcgtttctgacttgtcctctagtctgaatgagtggaggacttgaatctcctcatacgcatctgagatatgaaggtgatctgccgaaggcagcgcaatagtattcaacggacgcgagacatcctagaatcgaacagaagccattgtatatgagctaataagcgttattgtctttcattcgcgaacagagtggagaaaagttgagggacaaacatttgaatctttaaagataagtagctggaaaggaagaatgtgaaaaaatcgacgacgaaagattagggtttctggagcttgaaccgtcagccacttttcgcgatcatgattaagattaccccaaaaggtacaggttcagaacaaagagagatatcagttcccagctagacgatacagacggaggaaatggagacaaaaagtactcacgccatcagccacgacacctccagatgatctggcgatcttgagctctttttggattctgttcaacgtttcgatctcctccgtttgtagcagagcatgttcattcctctttctctgttcttcgtctttcctgtgcctcctctcggcttcctcaattgcaagtgtacgctcccgagccgactttaatctattcgcagcttcttcttcccgacgagcctgtcataatccattccgaaacaccgttaaacaaggttgactacgaagcctcacacagctcagctcaggatatatgagacgtacgatttctatcctttgctgctcttgctccttgagccttcgtcgttctctgatctcatcctcctgtctagtccttctcgaactgggctcgacaagactctgggccctttcaatcaagtctcgatcaacttccctccgtcgttgttcttgatccatcaaccacccaccactcgtcccgcgtagcctaccaaaactatttcttctctccttctgtcgttcctcttccttcttcaccacctctcgatcctcatctaagtcagcctgagctcttaaccgatatttgtcaaacgtaacaaacgaatctctcagaataggtgactgagaggtgtagaatgttttttgggattgaccctcctggcgttcgctcgcttttttgggtgttgtcatcattgctgtcgcctccgccagcgaggatgatgcaggcgcagaggcactgcggttagatggggcctgaggaatagcggtagatgagaccgtcaacgatgtcggatatttgggtcgatcgtagtagcttatgggacgtatttcagtgggcgtattgtcaagaataatctcatgaacttgttgatcatgatcgtgatcatcgtggttttcaggagattgagtcataaaattcttcaacgaagaccagttttcgccttcgtcgtatgcatcttcataggtacacgagagcactgaatctgttgacgcgggatcctggttggaggaagtacgcattcctaggccaagacctgcgttttcagacggtcgattgagttgagtactcagtcttctgaggattgtctgatggaaagcgctctctatgggctgatcagaggtcgaggatgcggaagaggaaggaagaggaggaagagactggacggatgaaccaggcagaggacgatgtccgttggagaccgagcgtgttccattcttgtcagtaaccccgttagattgtgaggtctttgatccaactcgggtgtctgagaatatagggagatttaatgtttttgatacaccgtcctttggaggaacaggaggtggagttatggtgtcaaatacagagccactttgtccgtccaaactcggtgaacgttcgttggaagaggtactccttccttttcctttccgtcctaagattgatagatttgaaaacagtgggatggacggtcgagagaaccggactgatgatgaatgttctttgggagagctgggcggagattgaacagaagaatcggaagagtaacccttatgagaacttctcaacctggatactgggttatcgttttccttcgagacatcggcaggttgaactgctgatgatgatgatgatgttattgttggaggagaaagggctttgaccggaaggggaggtttggtttcgataggtttaggttgtgaggtatgactcggatcagataccttggtgctcagcagacttgtaacagggtcctggactcgttcctgtttctgagcttgaatggtattgactggtccggaggacgagccctgagaaactgggtgagcgttgtgtatattgatattagagaaattcgtcgatagcgggggcgcaaggtttgggtcccgagccagacgatcccgggtgatttctgaagaggaagaaaccatgaactctatatggtgaggctatcaagaacgaggttcaacccataccggttgaagccacgtcaataatcagtaccgaacgttttgctgggactcgcgaaaacaactcacatcaaatagatgacttccaactagtcgtccatggatggttgctcttgctcttttgacgccccttaggtgatacgaaatatcgttctgttcaaaaagagtcccgatgaacgtaaaacatgggaataaaagaacatacccgattgtctgtccgacataggtgatataggttatcatacgaccttctctgaacaacgcgtaagctacatcttgatcaactttgtctaagttagtttgaagatcaacgattcctcctgagcctgccttggtcaacacaagtttatctctttgagcagagtagctcagaataagcctattgtaaattgcttagaatatctaatcagctcagcggcattcgaggtgaatgacaggatcggaatgactcaccaactatgtagttttggtccataaaactcatccacagtttgaatgactaaaggatcagataggtctatcgacatcgtctttgttggtgttattcaatctatctgatgatattgaagatgaacgatcaatggggtatatgctctgagctctataattctcttgtctgttttgagaagatgttaatctgccaggaatgatcatcaaaggcttggggtatcatggggtgattatgatgtacatgggcagatttggggtggaagcttgtcagcctcaagcacagcttgaaaaaaataatacaatttggagttatgtccgaactttcaactttcctctttacgaaaactcactcttcaccttcgattatcactcaaataatggacgtctctcagcatttaaaagctcacaggttggtctattgggcgccttcaccgaccttaataagaacactaaactgaagttatgatccttcttcttcttttagccaggctgctatccgtgaagccgaggagagcactctccaggtggatgcaggtctcttggccgtatatgatccaacgcctatcaacgaggccgaatacaagtacgttgtatatctgaaccgaatcagatgaaaacacgaaaagagacttataacctactactctgtgtcaactcttctgctttcttctttcccctttccataaaaaagcatggacaaggaagcctatttgacttctcacgctttgccctccttgcaaacccttctgtccacactattctcccttcctacttctcgaacatcctccggtcctctcgccacacttcctccggttcagacaatgcttccacgagaaaagtctcttcccaagccgaagccgcctacgaagtgggagcgatttgccgccgagaagggaatttcccatcgaaacaaagacaagatggagtgggacgacgatcgacaagagtttgtcgcccgatggggacgaggaggtcttaacaagaaggtcgaggagcaatggatcaccgaggtcaaggtcgggcctgatggtaaggatatcgatccggcagtgacggccaaggccgaccgaaaggcccgaacggcaaagaacttgaggcaacaggagggaaatatccgagctgccgcaaagctggagaacaaaggaaagggaaagaagggtgtctctggtccagctcctatttcaatctcggagggccacgagttgggggccggaccggcgggacgagctggaaaagagcacaggaagcaggagttagaaaggagggtcatggtgaacaagctttctactgggagcatgggcaaggtatgtcgtcacgtcttgttgtgttggctcgtgtcacattgcgcccttccttttcaatcggttattcactcctgataccttgaatatgacaaccatcagtttgacaagaagcttgaaggagagcccaaagtcaaggggatcaagcgaaaggtgcgctctgctatcctctactctatatcacttcttgtgttattctttttcttgccgttgtttaatgcttgactgttgcttgctgaacatagtttgatccggtcacaatttccgccaaacatgagcacgattcttcgatgaacgttctttccaacactcttggtttaaacaccacctcaaaacgtgtccgagcggaggatgcgagcgagggtgttgtcaatgttaggaaggctattaggttcgagggaaagcgagaagctgcctccagaggtggtcgaggtggtcggggcggtcggggtggaggacgaggccgaggaagaaagtaaagactgttttgtttttggaaatgatacttatggatggactgtttgcttggtttgcttggcctcctgcatttccttgctgctgatgctctgtgatgtctataactctgtttcgttcgtatatctgtccgttacaccaagaagtaaccggagaggcaagacacaagaacgaagatcggcttgaatgtgcttacctaagcaggcttgtttgttgatctttctttcttcttggctttccgttttgaactttctcctctcgcaaggattgttggatcccgttctcctttctttactctagcctcgttttcgtctgtttctttcttctttgtccatcctttaggttttctctgattttaagcggagtagattggattttgtggtcctctgtttcaaacccgaagatgttctctctagtacccttcttggccgcactcgcgctgttccctacaaatgcattctccctccggatcccgctcgaacgagccgtccgaccatccgacctcggctcaccgttcgaaaatctaaaccaagctcataatgctcttgaagctcgctatgcccgtttcttggctcttgatggcgatgatacgcgacagtcgttggagcgtcgttggagagatcgagcacaagccaggagactcagacgaagacagattttgggagaggaggcgagcgatgatgaaagtctcgtcaaacgagcagatgcagagatttcgttgacgaacgtttattccgatgcgtgagtcttcttcttcagagttgacccgaaccgtactttccgaacaaatatctttcatctcctactcccgccctgccttctcatcaaaagtattttcagcctaatcgttaaatacctttacgtatgtttcaattgaaccagaacgtacattgcggccatccagattggaaccccttctcagacggtcaatgtcattgttgacactggatcgtccgatctgttcgttgcgagtacggaatgttcgggttgtacagactctgcctatgagtttgatgctgctaagagctcgtcccttcaaaagtaggttgttactcttgaaaacctcttaaactccgtctgggccaaatagatggtctgctctgagatgttccgtttattcagcgtgatcggattgaacattgatcggatattttgttttcgtcttcatttttattccgtccttcttcgtccgtgcgaaaactagatcgtctacgtctttctcgataagtaaggctctcacccccgacctttctttcctcgtcattcacgttccagaccatacgagcctgatcattgtactcttgactgaaaccaacgttgaatagcctacggctctggaagcgcgcagggtgttcttgcaacagattatgtctccatcgattcgttcaatgtctctcaaacatttggtatgttttacagattccatctcacttttcgcagttcattcgtctcgaagaaaatctgactctaaattttacataatctcatttctgtgcacgttggttttgtttgacaggcttggtgtcgaaaattggtaattctttgatcttcagtcctctctctggtatctggggattcggttttcagagtctatcccagtctggtgccatggtatgttctcctctattcttttttcttccatatagcaggatcttgccgcattttatctaaaccggatgtatgaataaatattcttcgcgatctgtgggtattgtaacaactcaaacagccttactggttaaatttggtcaactcgaaccgtctcacggacaccatcatgggatgctacctcaccagatcgagctccaatgccgtcacttctgacgggggagaatttactctaggatcgattgattcttcgcggtacacgggggacatcaattacatcaacatgccttctgttcgcctctcgcttatttgttgactcttctctccttttctatgactctgacgctttaactgaccatgtatctggggattttggttcaaatgtttaggggacgcaaagctactggatcgtagagatggactcaatcactgttggctcaaccaaggttgctctatccggcaagaaggttgcaatcgacactggtcagttccctcaacttattttctccttggcatgttgcacactaaacatccttgcctttatttcccgatttgtgatctcaacaaactcgataacatgttcataggaaccacgttgatcgtgggtccttcggccgacgtagctgccatctacgctcagatccccaactcccagtctggcactgggggtcaatatgcgttccgtacgtcgtactaagtttcttctacagccgttcttcttttgagctcagagctaatctgcttgataaattacaccttatctcgtcgtgtagcatgcaactcccaaacggtcgtctcgctcgtttttggagggatctcgtatggaatcgatactagagatcttaagagaggatcgtacggtggtagttcgacaatgtgtctagggtccatcgctgctacagatcttggatctagtgcgcctatgaattggatcgttggagatgtctttttgaagaacgtctatactgttttccgatattctcccgcctcagtcggttttgctgctctttctggatccagcaacgttgacttcgtttcgactgcgacagtcgccacatcttctgcccgtccgagctctacaacctcatcagctggaacagtatccgctccatcagcaacctcatcaaactctgcttcttcagttccaaaatctagcattggatcgtcaacatcttttatgcggacggttctgacaagctcatcgggcagctctttgggttcagccactgctacgcctctgagttcaacgacgatgaccactgaccagtctggatcgagcgccgctgtggtggtcgttactggtggaatcattaccgatcggctgcctgccgcttctgctatctcgtcaacgtcagcaacgagtgcatcggttggggtttcgacatcgagtggagagagatcaaagctggtggttgggttgaagatgtgggtgggggctgtagtaagtggagcattggtcaatttgtctgtcatctgagtcggtcagtcctctcttgaggtggaacttaacagccttgtgaagaacgacactttctcttgaccgtgatactcttgcttcttcttgctgtcttttctctcgccaaattctattctgttttcctgtcaatcgttcataacaattcttacaatctttactcgcaacgcatctatttcaacttatccatgtcgtcggcctctcctttcattcgtagaagtttttcttctcgcattagttgtcatattactgtctactgtccttttcttcttgtccatgttcctgtctagtctgtcattcttttcattatactatcaatcaacctgatcaatcaattccccttaccaactctcctcttcggccctaccggatgatatttcgttcgctctctgcaaagatggccatatctctctttctcttctttctgatcaggtcttctcgtcgagataggttgatgttctcccttcatatagatggactaaaccgattggcttttgtctaaacctctcttgtcaaatcttgtcaatctctgtcagacgatcaaacagacagtaaagaacaggtctaacttgagtttaggaaatgaagatgtctgccccaaaaggattgacagaggatacaaccgtcaaatgaaacacgcatgcatttctcgacatgtacatgacttcgtcttgcgtacttttcttcttatatacatatataatatcacacgactcgtcctgtatgaatagacaagtagagaacgggagaaagcaagatgaagcagattggaatgagacgatcaagctccgaaatccaacttgcgcgctacttttctctctcgttctccttgtcctaaactctgcccatccggtccacttggcggaacctttcgttttcgagctccagctccattatcattctcgctaccgtttccattaagctttcctcccttggggttttgtccttgtaattcaggatccattactctggccacttgaacggcaggtagtggtagctttgagggatgagtaggataaggttgagtctggaaatattgatgtgctagtgactagagaaggtccaagaatataagttcgcttttttccacccgatttagatgttcataagagaaagggaaaaaaaggaatcggagccgcacttgtctagcatccaatcgttgataaggatcataggccaacaaagattttattagatcgaccgcttcgggtgaggcggctgagaaatgaaggtgccagggttgcttaggtataaccggtaaaacaacataatctggcaaggtagtatggccctgtattacgaaacagcatgagaagaagaagaaaattgataataaacaatagttagtaatccggacttgagtcttcttgagattcttatgtgaactccgttagaagaggagatatgaaaatcgaacaaaccggccagtcagcttctgttgggcttcccatcgcttgccagatctttttgagctgttccaggtcggtctcgcctgcgaggaaagggacgcggagcatgagctcggcaaatatgcaaccgacagaccacatgtctaccgcgctagaatatgctcttgctccaaataatagttctggaggtcggtaccatctttcgatttggttgcatccaaatcaatatccaagaagaaataaagtgtgactgagtcagaggcaaagacggccacagaggtatacttggagaggaaattagaaaagtactaaccgagtgatgacctggcaggtcatttttccactgccatcagagaactctctagctagaccgaaatctgcaagcttgagcgtcccgtccgcgctgatcagcaagttatttggtttcaaatcctgtgcacataattcgattttgaggatgtcaatatcataccatcaccatcatcacctgggaagtgcgtaaaacaagcttatagacactcactcggtggagaaccccgttccgatggcagaactccaagcctcttagcatcatctgcatccagctcttgacatctcctggcataaagatcagggacttgttacggatgagatattcgaggtcggtcgtcaggaattctagcacgagatttaggtttttctttgatgggaacaccgagatcatctagtgtatgaattgagtgaaaacagcagttgaagacagctcgaagagagcaagagtaatgcgataagcatcatgggcaacaatcaaggacaaacctcgatcacattctcatgcttgagttctctgagaaacttgatttctctaatggccgacatatccagcccatctttaaactggccaatcttaatctttttgatagcgatctcccggcctgtcgctatttctttgcctgaatagttggatcacaagataaaagacaggcattcaaagtccggctctgatggtgatatgatgatggctggaataaagaagacatcatacgtacctcgaaaactagaggggagcggacggggatatatagaggtcagtttcgttgaggaacgagcggaacggtatatatagctcaaaccacactcacacactagcataggtaccctctcctacttttgccaacttgagaaagtccttagaagacatctgatgtgactgcgatgtgtgtgtgtgtatattcgagaggacctatatgggtatgaatgtatagtaacgactttcaaaagagccgtttatgcaagtcacgtgatagatattcattcaacccagatccgactggttagacatcgaaggaaaccaccgcgaagccggttctaatctcccttaaactcacacgatgtgctcttcttatcaaagtcgggtagagagatgacacatgcgaacctattggtgatctttcgtcagctctgtgctaagaaaaaaaaagaagaaaaaaaaaacagatctgatattctttcctcctgtcattcattctgttttgctcgaggtaaaaaggtcaggatttagtcatagtctttttacgttgctatttcgcatctcgcctccaacactgatgaatcttaagcagcagatgaccaagtattggttcttaattctcttgtcaaagtgtgtcgaccagtgggtcatcgggtattttatctgttgcgtctgtcttcgccgaccacaagtggttcgatgccgagacgcgtcgagtgtcgagcttctcctggacttgattcgagctagctatctttgtcttatccagtagttattatcgttatggcaaatggtgcatacaactgtcatacgtagaaaacagttgagtcattcgatagtggaaatcaggcaataagaatggagagcgcatattcggtgttcagtcgtcgttccgaaacttccctctggtgaccgagcttagtaggcaagaacggaaagactacgcgcgagcgtctcttgatcttaggaatgtttcaataactatggatttcataataaaatgctgaatcagatattttcatccgtacccgtggctcttgacatgtaatacagcctatgtagagacttttctcttgtgatacgtgtgggcattcattcaagacctaggtgaacacgcgacaaccaaattacctacaggcggtatgtgtggactaattatatgatgggctttatttatccgagttacataagccgcagaatactaaactcgacgcaaataattctctgaacaagcccgccaatcttcctcgacttctgctcgtccccctagatgacttctcacttgctcttgctttcgttcattcgtacttagaagtgaaattgcttttttgcagcactcttatgctacttctactaatcctgtagtggttgttgcaggccttggttttaactgtgggcccagcggtggtcgcatagagtaggaatctgcatagttttctgctgcagctgagttctgtgccgttgcattctatcggctctatttttaaatcttacgctcttcctgttcttatgatggatggtcgacttcattcatatctccgtgctttcgttcttttcgctttcttcttcgttccgaacaacaactctctccgtcgtgttttcactcctctcttggccaggctttaccgttggtctcgcgttcttcgtagattcttgaagaagtacaggttcgtggtttcactgcatttaaacatccgctctatctttatttttgacttgatcactcagaatttttcttgatcgatataccctggcctatcagatcacaagattctctatcgtttctcggtcagctcgacatgcgcttgcttggtttcaacgtcgcccccttcggtaacacttatgagctcgtaccgacatcacaggatgcttttccggtcccaaactcgtcaaagtcaacgacgcagctgaacttctcacgaacaccatggcttaccgctgcaagggttagatggacaatcggcgccatacccgccctttctctcttagcactcttagggtgtctagagaaccagtcgatcgccttgcccgcctcggctccgaatgagcagacacccattcagtttacagataactctgctgtgccagaagaccactggcacgcgaccgaataccttctcaatcatcctatcgttcaacttcctgcagataaggccgttcgatcatcaataccgattccttatcaggcacccagttcggcctgcctccttcatctctacactcttgcagatctcaccaaattcaaccctgcgctctgtccctgttcggaggttccttcaccgatagatgtggtagtcacattcgtcaatggttcggacccgttcttccgacgagcgtacgacaattcgatcactcatggagagaaagcccacgatgctcaaccggctatcaaacgatactcaaacatgggcgagatgaagtactccc

SEQ ID NO: 1277 - DNA, 1457 bp, Xanthophyllomyces dendrorhous
aaagaagccctgccaaattttaactcgtgagtggcctcccgtctgctccgaacagccctgatcggcaagcgtagggcagaaagctcattaacattatcttcttatcaattcagattcgccatcgaatcacaaatatcgaacattccttcactcaacccaaacttcatcagcatgaacgacgacttctttattctccgccctctttccgcttcagactttcacaccgacctgttcggtccagttctcaggttacaggacaatttgaaggtgaccggaaagcaaaatgccagggtgggtgatcctggagaatggggaggactagaatggggagcgtatatccttggtgagtcgttggttctctctttgtttgttaaagcaacttatcaatctttaaatcacctttgtggaaactcaggtcggagacatccgaacaatggactagagtatctcaatcacttgccaaaaacgctgtcccaacctcatctacatgagcttagtctgacatttcctcaagcaataagtgacgcctcgaaacgaaaatttcgaaggcagaaaactggaggacctgacgtatgttctttcctccttgaaataaggtgtctttgttaacccagtatcacttttttcttggatgatcataacgggatgaaccagattgagatggccttcctccaaacacattacattcgacaacgatttcgtgaagcccttctatacgcatacgttgttgctcgccctacacgttccgacggatcttctatttggggtcggatcgagcgggacgaattaatcaaactaggagtggatggatggagtggtgtaattggagatttccagggaaagggcgaattgaacaaggacgtgttcaaatcgatcttgagcactgcaaaagaggagaccgccttgagtactgacttgttcttcggttcgtctgttccgttttcttctcttttctgtacctatatggactaaacgacaacaacaacaacaacaaacatctactgttttctggtttgaatttggtctggtcatcatggctttttctgtattcgcagtctccgcctctggactcccacccaatagttttggtcccaaaaccaaacgatcaatcgatctctccagttgcctcggtacatggtggtctaacagtgaagaggaaatcgactcggttgagatgttcaagcggttggcatttgagagggtagattgtggagatatgtgttcgttcagctcctccgttctcttttttaccgaagttgtctgggaagttaattattggcttatggactgcgcttgataaacacagtgatctcttctatattgtctctgtcagccgaacctggcctgacagatctccttcctcgacctgatacgttcttcaatccgtctggctcagaatccgaggctgagccgccgatctatcaagttcctcatttaccgctgacgcccacatggga

SEQ ID NO: 1278 - DNA, 2280 bp, Xanthophyllomyces dendrorhous
gacgcccacatgggaggaagctgactttacccttcctgcactctttccctcctggtcgggattagacccgagaggagtcgatctaatggattggacggtcaggattttgggccggtatcgattctctttaggtttgttttttctctcttccttgatttcctcaaatatgtttgtgcgcgcgtatatggattgttgactgacaacgaaggtgaaatttccgacgtctcttctctttcttctccataggacaaacaccttcttatttcaagtctatcacagataagagctctgtcccccgagttatgacacacatcaatcaacacccggacctggcgctcttggcgcttaatgatgatcttagggattcaacaacggataatgatcgggcattatatgtggcccagatcagaagctggggagaacagatgttccctggggaagaatggtgggagttttgaggaagttcaccaaggagaacgagagattgtttagagttttcttaagtttatctgcatgtagagattccacatatttgtatcggtataccatgtttagattgtttattaagagatagctacgatcagtgcgtgcttctttcgttccctagcgcgagaatgtgttcaggaaagaggaccaagttcaaagtatgggtatcatgatgtacaataatgataacagctacagaaacccaacgagaagggaaacataaacaatctggaatgatagagaggggagaaatagaaaagatgaatgaggctatgttttagacgatcaatcccatctgtcgttcctatccagagcagtgagctccttttcgagctcctcaacctctgatgccagtctctcagccttaccctttatcatggcaagctttctttcgtcggctgctgttggtcttgatctaggtttgggttttggctgactggactttgatgaggacgtagctcccgatgaggatgagttggacgctatttgagcgagcttaggaatcaggaggggttgggtaatggaaaaacagtcaagatcgtgaagcggttgtcaagactcgacacttattattcaaactagaaacccgtaagaaagaaaactccgaacttttcgcttctttaagacttctctgcgttcccaaacggccaaacctctttctgcccgactgatgagctcatcaatctgaggttccatctcgttcgccagtctttgtttctgagcctctacaaacggttctggaacgaaaaggtatctctatcaacgtttgtttagatgcccaggtagagagatcgatcagaaatgaacaaggagacacaagagagagttcagcaggctttcgcgcgtttcttgaagacatccgaactcaattatcatgaatggactcactctagaattctccatcacgtgagatagtcgaggaaagtctgagacggctgattgcagaatttgaatagacgttttctcctgttttagagaggatgtgtatccaagaatgaggtggtcagtatctcggttgcctgatgtgtttcggtatgatgtagtaatatttgtagaacgagaaaaccaacatgagctacacatgattcggtgactctaacacactcagaaaggaggtccagaaactggccacctgaggacatcgctgtggaacaggatcgagttggtttgtgggtagataataaacgataaacgaaagaacgacggatgctagagggcgtgtgttggaaagagggaaatgagaggatgttgttgatcagacgcgtttgacttttgacaattaaccatcgtccatcgttcagctcgacctgattccggaaagatggcatcccatacaaactccgttccttttactcccagaccatcatcctctgcatctaatcgctcgacccattcaagatttagagcgacgggtgctacattgagtactcgcgaggaaaacaaggtgattacatcctttctatcagcggactgaacacgcatcctatctgaacccgcgtacagtccgtgcgtgttgtcccttgctgatccatcgtttgtttctccttgttcatacttcttgaccattttatccatagatatctcacacattggcgtccatcagaaaacctgctcgtccgtcaacgctctcaaaccaactggaacatgctgatattccccaacaaccgttccttcgtccatcatcctcgtcttcttccgtcgcacccggctcaaccgtccggaacggattgatggctccgccgcctgtcccatcagctacctcgaggccaagatcagaaagacagtcgacaggct

SEQ ID NO: 1279 - DNA, 5156 bp, Xanthophyllomyces dendrorhous
gtggtggtgggctggtcatgggcggggaggtcctcgaattaatatgggagatacattggcaaagcgggtaggtagtctttcctttcggttctcttccttggtgccgcttgtctcaaattccttctgaatgaccttctgtctgacaatcatattgaacccttttgatgacgatatcgttggtttttcttcagagacccgatagcacaagatatttattcaaacttgttccttcatgcgtctcagccatacgccgagatgttggttgattggatctcgactggtcatctttcggacaagtctgaagaatttatggttaaagaggcgacgagtatcacgaaggagcagctcgacttggactttacagacgaatattgggaaagaagatataccgtccgtcccattcttctcatgtccccaaatgtccatccttattcaggccacgcaatctttctctaattatttcttcccctcttttctcgtttctgtgtatgggactatctagcttcgggatgggtcgacagcatcaaatatcttccgaggtggtcaacctccatcaactgctggaattcctcttcctcgccgaggaacagaatcgacgtcaaatcctcgtcttccaggtggagcctgtatacccaaatttttggaaccatggaagcacaagattttattggccggaaaatatctaaacgtgataagggaatgtggagcaagtgaacgacagggtcggccgtccgagtttagggcgggtggagggaggatgatcgacatgagggatgaattgtgagtcatctactggcctgcgctcctcaaatttagaatacgctgatattcctggttccctacagatttcaaagaaggattgaagacgcatatttctatgccaaccaaactttgctcaagatgctgatagaagaacaggatctcaagtctcatcttcggtacgttgtctaactgatattatagccttcgatgctcaacagaataatgaaacgtgtcgctaactccttctgatgttttcgatcaaacgaagttcgttgaagtaccacttcttcttgagtcagtcagcttggatgacccattttcttgatctctccctatctgaattcggaaaatcctccaagaatgcctcactcgtcaaactccagtcgctgctcgagttgactcttcggacttcaggtggacaggtcggtgaaacgcataaggataatgtccgggttgtcatggccggtcagaagttgcatgattttttgaacgcggtcgtaaatcagagtgcggagttaagtggagagaatggccgagttagaatgaactcggaaattgtaggaagcgtggcgccttctgggggcaggaaacaagaagaaaagaagagagagcttcttggtatgtaacattttagatttgtatcgtttcactcttaaagagcgctcttgactgacttcaaagttccaatctgatttgtttggatgatattgtgccgcgcttccagcgttcgaggcttttcaattggactataccgtcaagtttccactctcccttgcgatctctcgaaagacaattgctcgttaccaaattcttttccgatttcttctacaactccgacacgccgagctccagctgtctctgatgtggacggaacataccaccgatgactggcgtcgacgtacgaagctaacttctttcgaagcttggaaacggcgagtatttgccctccgcgcgagaatgctcgggtttgtacagaacctgtcggctttcttgagccacgaagtgctggaaccgaactggagaaacttggaggaaaagctgagcaaggtgactacggttgatcagatgttgaatgaccatgtggatttcttagatacgtgtttgaaagaatccgggttgacgaaggccgagcttatcgccgtaagtttttatctgttctctgtcttctttgtgcttcaacctgttttctcacaccgtcatgaatgacttcttgaaacgactaatgcgctcatctttgggtgaattttatggctactctttgccgaaatttcatctaggtcatcgccaagatcatagcactaatccagaacttctgccaccacgctaaagttctctctagctacgcccgaaatgccatggatgctatcgatcgagcgtcttcttctgagatactcatcaacgacgagaaatcgcaggaacgttcggatttattggaaaaatacgagagaaacttttcacatcagatctcggttcatatcgatcggatgacataccatgccgggtcggatagtcagtcttctctcctctctgtttatctccctgtctttgatattctctcagtcctttatgttctgagtgggtgaactgggtgtgctcatctgcgcgctgctcttcgcacgtctgtggttctcttcgattgatagatacggctctggatccacttgtcgctcggctcaaaggaaacctccgacccaagacgagtctctcgaattgagaagcgcgtctacatccaagcttctttcacatcccggatctttcaaactgcgctgtgtatgttatcctctggtctctccaatttgtatttgtatgccctcatcatttgcctttcttttctctcctcctatctctggttccttgtgtttgatacgtacttgcttgaagttatttaagactcaactacaaaccatatatagatatgtatagtaataatgatgatagcgaattcaacacaaagaagcgaggagaggaagaagaaaagctaacaagtgagacgaacaagtgcaaaaactggagcaggttgtagaaagaggagaatgcacaaagccaaatttacagacttataataggaggaataccacaacggtatttggagtctaacgagaaatcggaatgaaataagagaacacttgtttcaggtacgtccttttctttatcatctctttgagtattcggtgtctaacagaggttcacattcgcatgtctttgcggataaaccttgatggtagtacccaaagtcacatcgcgcctcaacctcgtttttttcgaagaacatcgcggtcgtcatgtgtcgtaagggagagtcacctatatggttcaacagccagtaaagagcgaaagaaatccggtggtgagctttacattaggaaggcggcctgttaagagaaatagacgaaggagagtagatggtacttaccccatcggtattggaaaaacccgagagggtacgcggcgattgctcggatccattcttgtatgtcgtcccgaagaaacgaagggacgtgggcaacttcgtaactgaaagaacgagtttttccaagacgatgagtccatacttctatcacatgatttaaaaaaacaggaacccaaaacaatcaagatgttaaggtgtgaggattcacttattataccagccaagagcgcctctctcgtcttttccttcgaacgtcggagcaggaagaagcccgttccgttcggcgatctgaagtgcctttgggtggtggcttgcaaattcctctgtaaagttccacatgccaagaacgacgtatcccggatcatttccgatggaccggctcgaatagagaagcttctttgcttgcattctaagaaaaggatctgcacattgaggagtagtgaaaaaagaatcggtgtcgaatctcactgggttttcaacaagagcggttcattaaatttgatcgatgcataggcgtcaagaaggacagatatagaactgggacgaactatagtaatcgagatctctaatccgaggatgattgaatatctcgaccgcaaagaaatggcacatagcatgataacctattacaatatatgggatacaaaatcggttgtaagtttcaagacaaaaacgaagacaagagatcctgaacattcaccaggccatcggtttttgtcaaccacctctttggtttcatctgacagcaagtctttaaattcctccggtgcattcatattaatcgccaggaattcgaattgttcgccgaaagcctccatcttcttagccagtatgattctattaaaatattcctcgttctcgccgttatccatctctgccgtctgtcgaagcgcgagtattctgtcgttccatctgtgtaggaacgccttcttcgcggcgaatgagttgtaatcaccttcgtgaatgaggacggtcggataaacttgggagaacgggatgtagcgcatgatcgactcgagcgcggcgagtaaatctgtacccttctcaacggaggtcagacagataatagcggcgcgaacaggaggatgagatatcgggttaattgcatggatagcagatgacaagatgctttctgtgaaaaggaaaggaggaggagagaagagagaaaggacgcaaaatcaaagtaagttgaagaacgcatgagaacccatccatctgatcaaacgtagcagtcgtactcgatttagcccccatccgatgaatctcttgaacacggctcatatctgatagatcgtgagctcccgacccaagaacccagtgagtgttcaacccagcctctttgatggtggaaggtgaagagaatgaattgtcttgagtgagccatgttccatcatcacctgttgtctgggcggtcaagccccctataaggcaaaggagggcggcgccaatgataccgaggagcagagatactccacgaatgggatgaatcttgagcatcttgagtgtcttgagagcctgatgaggactgatggacaaaaagggggatcaaagtgagattgagatgaacccgagtaattagaacgtagaggagactgagaagggcgaacacaagaacatccttccttcatcttgccctcggtctttgtcttttcaaggatggtctaagatgcaagctcgaggagggataccaagacgagactgagtgtatgcgtcgaccatacattgctcgtgcgtcggttgtgcatgaacgaattcatgatcgtgtcgcgcttgcaactaccgataagattgtggatgtatttttcgtatttaactgaatataccgtgagttgtctcaccctaccacagatcagaacgggaacgaagtcccttcgaaattaaccgctcatcgaacagcttacattcattcaactctaagtcacatgctcatcatagctcataagcccctgtcgacccactgaaaatcgggtgaagaagaaacgga

SEQ ID NO: 1280 - DNA, 6188 bp, Xanthophyllomyces dendrorhous
agtgtaggaaggacaaatagacagagaaagagagagaaagagaagcaacagagccgatcagtatatcatcaagagaaatcccgtttttttttcttcacaatagtcattaggcgatatagaaaatcgttcccttaccgaattaagtcgatgagcgtcgtgttgttcagagggatgtactggctcgtcatcagcttgatcgcttcctgagccaccacacctccaacgaacgccgccgttgttggaatatccgactggccggatcgagccctgtatagtttcaaaatttccatttacacgatcccatgaagtaccaagagaccatcagtaccaacagaaattgtgttttgcgtcgattgtgagatcccatcacttacatctctcctaaagcatctttcacgctttttggcaaacctcctttctctcttgtttcgacttggcccattccatcctcctcctctttctctgaagcctcctcttcctccttccacccacgctctcccagaaacttggccgcgatccgttcaaggacgatcgtatcagcctgataatcagcatccatcggtgtaccaggataccgaccgtgggtctgatgaaagacatctgcacatcggaatgctatgtactgaactatcggtggcggaacataaggtatttgccaggttggatcaggagagaacgataggatcgtttcttcgttaaaccctttttccttccgctcctgctccaggcttctccctctaatgaccttcaagaacgctgcgtgcttcacaaaatcctcaacctcatcctcacctaccgcatcctcgtccagtcctatctcaagcaggactttggataaacatccttgaaaggccactacgtcctcctttgcttttgtcttgtagactgtctggagggccacataagactgggtgtctgacttcatatccggaagaaaggaggacgtagggagaagaccgtcccctccaccttcggatagaggtaggcgaacgaatgagcgaagtgcacgaatgagcaaccaaaagttcttggactgccaaagaacagaccaaagagctcagtcagtatataagatacacgtttaaagtcatgtctcgaaagagattggctcacattctttgtcacattttcacaagacggatcctcaaacaattccagaatctcggaaggtatctacaaaacatcgtcaaatagaccggagactatcagacttctgatacaccgacacgttcaacttggtaaaagacgaacctttgtagtttgagtggcgaggaaacccttctcctgagcttcggcaaagttctcctcatccccgtgccttctctgttgatcaatcagagtcaaaaactctttcttctggctctgtttgccggaccacttgggtggctgtccatcgtgctacatgggtagaaaggatttcaatagctgtcagctcgacgccaacttgatgcttcctttcagggacaaacagtacggtcgagtctaagcaaagactcactgtcctcttccattcttcgagcgcgcggatcaagatgatgacgaaaggtatgttcccatgttgcattgagtccatggattcaaagtctaagctgttggcatgttcaagcaaggccggaaaggggttgtcgattcgaagagaagttagagacgcagggtgtgtatcaacgactggattgtagagtcaagtacccagtagtgagcagtcagatgaagcaaagtagataatttggacaaatgtggtgaatagcatattcgagatgaatagatgctttacaaactggtatgctctctgatctgaactcggacggatcccatgaacccagccgaccgaacaaggataagaggaatgtctgggtgagcacccaaggaagtagctgtagatgaggaagggtcactggctgatgtacacaaacaataatcagatatcaccagtcaacatttgtataggcgcgacagcactaatcggttggcttaccggaccaaagcaaggatgacagcgcttcttcgtctgatgcaggtaagttgacagcgatgatcaatgtaaatccaaggaaataattaggatcctctttaagaagagtttggacgtcctgtggtgacgaatacgcgcagtagatgtgagactcatgatgtccgatcgcgacagagcaaggtcatcaagtagtgtccgttaacttactcctactttcccaaccccagtcacactctgattaagttccccaacgaaccggacggtttctgaagcaaggggtcgtccaatggattctggcataaggaagaaattctgtccaatatcctgtggggtcacatcccgattggaaagagtttcgaaacagccgattcctatttgtaagagagaatgaacgcgctgctgggtcaatggttaattcatagattggtcgagacacacatgaagatacgagacgccaagcattgtattcaaagttctcaccgggtaagacgaggtttttgagtgattggcaaccagtggctataggattaataagcagtactctagcggactctaatcctccttgaccagaggctccccatagtctgatcatcgccggttcaagatagattctcatgagtcaggatttactcgacattgagttcaagaagaaatatagctaattcaagcttaagaaaaagcgcctcaacacgtacctgagttgcctatcgtatctacgagtctttgcatcaggccgaatgatcccttcagaccttcgatgaaagaaaggctggatatgagtttcaaatgacgaatagataaatctgactcggaccgatcggtgataggatcggagagcttactgggaggacacagaagggacgaaggtttccgccgctggaacggatatgtgatcttgcatttgaatagcacaaatatggcagagaacaaataatgggttgggtggcccagaaagaaagattgtctatagatgagcaagatgagatggatggcagagacggagagggaagaacgaggagaccgtggaagcgactgctgtgcttgctattagatcagacacgtgattttgacgtgttagatgtaaccctaacatctctgtggtgtaatctaacttgctcttctttgtgtttctccgacatgaaatgctccgaagactccttgaccatcttgtttgtgtcttctgactgtcagatgggtctcgcatgtcgctcggtttgaaaacttcggcacaacaaatatcaaacgttgaattcagtatccattggtgctcacaaatagcagaacaaatctccatctcagctcgctgtcacgatagtttggctgctgattcgactccttccgagtggccttctactacattcacacttcagagctgacgacgtataatccatgcaagcgaccaagatgcattctcataggcgatctagtcaaagacggcacgcatgatgacgcgaagatatgaggatgtcaaatgtagatgtagatgtgaatgtgaagatcaaagctgctataagactgatcgtagacgcgtatgcatgcagtatgaaagagaacgaagcataagatcagttatctaacagagcatacaaacaaagtgtgctcttacgatcatcatcgctgtggaggacagttgagcttaaccttctatctctcctcagatgtcttgcacttttcttgactctttcagcctaaaaccatatctagagattgtatatagacatacatagacgccctttgtatggggtttcaatccgaacactcaaaacaaacggataggactctcctgtctgatcgtgattttacatacatgccgtattctgtacttctcgggtatatgacctcaaatctctaccgcgatacatctcagctattgccatgtttcccgtagacgatgcacaagaaagctatcatgtctgtcgacacagacatctgccacagtgactacacaacagatgtcatctagatggtcacgcttgctttaagcaagattccacaaacgtgtctacacgatctctataactagtgtaatttatttatcagcatacaaagagaccatagggcgtcccgttttcactataggagcgttattgagtcagacaatttgttgacttcctctgagttggctccaattgaacaaggacgatgtattttctaacagaaatgaaccctctatctagagccatacttgtgatcaaacgtacacttgcactttcgtatgtgggtgcgcgtgtgcatgcatctgttctgaacgggatgggcgatattcataaggatgcctaagaggcaaatagacgaagcgactaggaaatcgactgcgacccaatacaaaagacaatagaattagaatgcttcgattttcctaatgcatctcgactgtttcctaatgggcagactagaaagaatgaaatttactagacatctgaccacaaaagtcaggtcatttttcgagaaaaaagtcagacaccccaaaccgccgggtcttctctaggcacacaacgagagcctttgagccttttttttacctccttatcctcaagtcaagtagtcattcaaggttagtatgcccgtccagaatacgatagatatgacaccagtagcacctccggataccgtgtgagagatacgaaccacaaatcagagaagcacacacacgcatttggggccgtttttggggaggaggaatccattcatttatcgacaaaaatctactctgggaaacgtttaaggtggaattcaaggatgggtgtttttgatgatctggtgcccgagtcgaggttctggatggagtagagagaggacatgcagatagatagggatgattcggagggagcgtgtgtgtgtgcctccatatctacttgtgtttcagaatcgggctctagaggtgctccagaaggtctgtcgtgtccgttcaaaaggtctaaagagctgactttcagttctttgttgcctacactcctcaaaaaactccgtccttttaaaccctaccaattcaccaatcttgcccgacgactcccaaaccattttcccataacgttctattgcctcattgtcaatcaattacgacaatccgtacacgattccttctgaaactccgatctctgccaccacttctttttaaaacaactagatgaaggtcgagatctgctctttctccggttacaagatctacccctcccggggacgtctctacgttcgaagtgactccaaggttcgtcaacctaatcagctgttcttggtagccgacagcttgatggggaaatgaatgaagtctgatcaagaagcatatttttcctccttttacccgcgatttctgtacctcttcccctccgaattcgcaacactgggcatccatatgactaccacaaaaccacaaccaatctcaatcaacttctttatcctcttatcaacacttttgacttccctgccaacccctcatattcgcacttcttcaacaacaggtcttccggttccttaaccagaagtccgaatcccttttcctccagcgaaagaacccccgaaagatcgcctggacccaggtctaccgacgaatgcacaagaagggaatcactgaggaggtcgccaagaagcgaagccgaaagaacgtcaaggcccaggtgggtactcttttgtttttgggtttgagccggagcgagtagaagaggtgcacgaattggttcagctcatcatattttcttgttctccatcctttgccttgattcaatgtgatatatctgatttgggttatcgacttggaaatgaacgataatcgactacggttgtgtagcgaggaatcgttggtgccgacttggcttccatcctcgctaagcgaacccagaagcctgaggtccgaaacgccgcccgacaggctgccatcaccaaggccaagggagagaagaaggagaaggcttcccgacccaaggtacgtttgactttggagttcttatcttctataagcttgttgttttctgaccacctctcaactcggctatattctcttttttttcttttgggcctcattcactctccgatttttgattgtgtagaccgcttccaacgttcccaaggtcagcaagcagggcatgaagggaggagccaagccccagcgagtgtaaaaaccctctgaggatatgaaccctttcctacccaccctctaccgtcaccgggccgacccagacctgatgatgtcttgattacttccttgaggtttctccccaca

SEQ ID NO: 1281 - DNA, 5520 bp, Xanthophyllomyces dendrorhous
gtttctccccacattaaaacattaaaacaaaacaaaaaaatctttttcttgaacgtttgctcatgatacatctccctatcatggctttcccatgatctgtgcacaccctatttcttcgtgacaagacacaaccagatgagctaacttgaggataccctctagggacacatgaatggaaagtgctaactgttcaacaatagatcaactttctcagaataaagtcgatcattctcttgtcccgaaaactaacgctagtcagttcttctcggctctccgctcgtgtttgcagtcgtcttagaacgattcacatcgccagcctcccctaccaccatcctcgaaacgagttgacggcgttcagccaaacacgccgcgagattctattacctcgtatatttttacctggtagctctaaccctaaccaacctctgtctaaaacgcatctaactaaatccaatgagcgacctaacctctagattgtctaacccgggtcagatgtacagacgtacttgaagaacagaggccaactatctcctttctctttccattcatgtattccctagaagctagaacgaatgtccaagatgtatttttatttgtttgtttgtgtgttcacgtaaaatgaaagaagaacgagagagaaccagggcgaggcaaaataaatagaaggaaaggggagagagcggcagaaagatgattaggaaaacacgatagtggtagaagagaaagaatcaggaacaagaaagacaaacaagagaggaactccggtttaaagagaaaaaaaacgagggtcgaacgaatgggttatgctacgtcatgcaagtacataagaagacagacaaggaaggaagaagcaagggctaaggagcaggagaggaatgtgaaatagggtatgaactgattccgtcagagcacagaggaggaacaaaaagtctttgaaacaagtgaaaaggagcaagtttagaaagtaagacgaaaaaggaggaaatttttacttcatgaaccaaatagacaaggatggaaacgacgaaggtaaaaggtagaatgacttgtttgttttcatcaatcaaagttgttgaactggtgcacaagtacaaagcgcacaggagcaaatgagcagccaagaatgtttatgtgaaaagtcggaaagatacctgtgtcagctcgctgtggtttcttgaatactcatcccagatcctccctcacagaaaatacttactctgagagataaggaactgtttctcgtccttcgatagcaagaaaaagcagtatgaacaagatgttagatcaagattgcctctagacagcggtgaagttctgaattaaatgacttgaaccttacattgaattgttcatctaaccaaaaggcaacagtatgcatcaaatacgaagatgcagacaacacatcagccaagaacgtcgttttatgatccgacacagaatgtggagcgcgtcatagaaagctcagaataaggcgaacgtatcaggaaagaggaacgaaccgtccttatcgttatggaaattcttcaagaaactgagtaatttgtccttgtttcgttgaaggatcaggacaattgggggtggtttgtttgggttagccacaaacacctactcggaggcatacaggcaggacaagataaagttgtttatcaattattcattcaaaaaacgatcctccatcatggccagtcagagatagtgatgattcagaagacgaaccttgaacacatggaacgcctcgaactgaatgtttttactcttgtccctcagtaggatcatcatcatcttgaggtttgcttcattagcaatgtacctcgtcatgactttgtaattcgccctatcgagcaggatttcgccaagtagcttaatcgactgacgcttggtaacataattggaggacaaaatcagggtggtatatgttgagaagaactagtgtttccatcacaaattttgtgttgtagttgtcattgagaggatccagagatgtagagggtcagcaagcatgactaggaggcgtcagatatatttgagtggataacaaacgcggtcataattcttgtccaagaatgaggctaccatcggtttgtgctttgtcaatagttcctatgagtcgaatgatcatatccccaaagaagaagagttcaaactatgttcgtggcaacgctaagccttgtgtgtaaaagacaaaatggaaggaggcttacctttagattccctaatacgtcacacgagattccgaaagtcgtgttttcgatgtaagacgggaacgtgtagaatctttgtttcgaccaagacaccacaagagaaatccaaagagacgggtttagacataatcaaccaactgcactggcgtccgcatacgagggaggagaacattcaactgactgttccgaatacagaagtatctgcgcaagtgattcatacttgagcatctctttgagcatcatccccgtgttgagcgcgacatcctcatttgagtatctagcgcaggtatgaaaggtagaggggatcagcgaataattagagaagccaataggcaaagagtagagatcaaagcctgcagggcatgccaaaggattgcgaaaagacacaccctttgagcgtagcaaagatgatctgaggtttcttggatatatactcgaccgttggaaatcgagatccaatctgtctgcgaagcaaatgattgaagatttgagttacatccttcttggcctattttaatcaaaaagaaacaaagaaaagacggaactgtaagctcaagcgatgcaaaatccgaaggcgaaggacgctccgaaagagacgtaagaataaatcgagagcgccgagacagaccgacctcgaactcaaatacacctatacgttcgatcaagaggagcagaacatcggttgagtaggcttcctgagcgagctgagcgattccctctggcgatacgtcgttttctgtaagtacaatgcgaatgggtaagtgtgatcgattcccagttgctcacaacgaggcgtgtcgaaggtcaggaaaggaaggatggaggaacatgaagaagatgaagacgcacctgaatctccatatagacatgttttgatctgagccagtagtttcgagagttcttcgttggtctgatatgaaaggaacaaagaaagggagagatgtgcgagtagagagttgagaaacattcagtcttgacatgcttgtaacatggattcctcagatacagagccttaataatgccaccgtttgaaccttccaacgttgatcttgctcttcaaaggtgtatcaagaacagagaacgaaccttctttcttccatcatagctgcctgtgctaccgtccagccttccgccgggtgctacgaggtctctgaccgcccgaataagctcggttggtgactttggtctcttttgaaagaagttgatctttgtagaagaagatttcatataggaatgcgttgatatatgagtacgacgttgagtgtccgtttaggagagaataagggcaaaggcaaaacaggaaggtgagaggacgatggttgttgttttgaacgcgtcataggaaaagcaacatctttaacttcttcaccttcttttccttcttttccttgatctagacgacaacgacgactcgtagcaactgtcatggaggtcgcagacatgacgattgcagatgcatcggacatatctatgccatcagatacttcaactgaacgagattatagcactaatcatcgatcctcgttgactgactggatcatcccacctcttgtcattctttacatcgtgtgagttcttctgtcagatcgctttctcgcctgaacagttcgattcgataatttctcaatccctcaatctattgattacatacatccgaatactgtgttacttcattgaagaacggggtttgtgtatactactcggacagtctatcaacaataccttgtcgaccacctcaagctgatctccttcttgcctcgttcgtccctcatgtctgacaatgcgttcgactctgattgatgttagatcactcaaacgcttgattctgatccgattcatgctctgtctcgctcagagctctaccttgcttctatctgtatattccttccaatcatcttatgtctctatctatctctctatctgcttcctcagtaccattccgctccgccagccgtaccacctcagcaggtgcttgaccggtcgatcccttttgagtgcgcggatcgagagggaggttatccaagatgctggaaagatgaatgtaacggtagatggaagccaagcagagttagacattgtgggatttgtaaaagatgcagggtcggattcgatcattgttgtccttggtaagtctgtctctgtgatggaagaatgatatcagaagacatctcattcaccacggtcttctttgtttcctccctcttaaccaaaaggctggcgtgagtcttgatctttcggcctgtgaaaggaattaaaaagctcactgcatagaatattccatcattcttaggacatgtgtcactacttcgacctacctccctttcctcctctttctctctataacccctgtggccgtgttcttcctcctgcttcctcttgccaaaccgctgtttgctcacgcaagtgaagtctgggcgtttgcacgtgactccgaaggcccgattaccatgagatggttcaactggaaatggagttgggtcttgggaataggacccgtaggaagacttatggttggttttatatgggcttgctgggtttggaacaagaggccggtagaatcctgggagtcgggagggggacttttcttaagcttgattggagtgttggtcgctctgatcgctgttgtatgtctctcttctgccttcatccttgggtctgttgcgcatatttctaacaaaacattcctaatctgatgttgcgaaccaacaagggcctgttcatatccacctcactttcaatcaaccgcggtatatcacccatcgagtctcgcatttacctgaactaccgtcgtattgaccccaggttatacaatgccgctttccctccgtcacccccacctctaaccgaacgtcttgcgctcaactctgtttcttcacacaccctactgagcgtatcacgcgcagatccaagggtcctcatctggatccctcatccgacggtgaaagggagaggaaaagcggtctatacaagacctgatgaaaaaccttttgatctaggatggagagaaaattggaagacggtttggagggagggtataagggatggatttcgagtttggagcaggggtagtgttagtgacagtgccggtgccagtgtcgatgtgagctcgagtgggaatgaagcgagaaagaggggtctgattgcgttgaatgagaatgtgttgcataggctgaggtatgaagccagtttagctttcgatgaggaagatgaggaggaggaacaggctcagtatggaagtgacgatgaaggagatttggttgtgttgtaaacctggtatagatagtcaacactgtactatatagaatagaatgatgtgtaa

SEQ ID NO: 1282 - DNA, 8270 bp, Xanthophyllomyces dendrorhous
aaacagaagaagcgtctaaaccagatgccctgagaaagagaggacgaaacgaagacgaaggcgaagataaaaataatatatgtaacaacagtcacatagtgagagttctgatgaggaaaacactgtaaatggcatttattcttccatatctctaaggggaagcaggtggggtttcaggaagagttggttctgacgaaatatccttcttcgactgacttccggtcgtgtcaacttctcggagttgacccgtttcgacctcactgaaagatacaaaagagaaaaagacattcgtaaaggatagattaagaacacagatggataggaagaaaggaaacattcgctcactagatccagccggtcacttcggttcttgaatcaaacatcgggttggttcttagccaatcaacatcccacttcacactttcctgcaacctagcctcatgctcatgtgtatgcgcatgtccctctggtgcttcggggaacggcaagaaggaggtcgaagatatttggaaaggtgcagttgaaggaagatggccggaggtcgattttgagagaagcttagctcgaagagatcgttcggtaaaggtcagagcggcgcaatctgatgatcaaacacatagaacgaaagaagagaaacatcagccggagagggcccatcggaatgagtccgagtatcgtaaacacgccgactaaccagtgtgttgaatctggattcccatccaatcattgatgcacagatgagtaaatcacacatcacacatcacttaagttcagtttgcttttcatcgcttagaaatatacagagtccaatcctcaatacagatcaaccgcagactcaccagcatcacttcgttcaatccgatctgggtctgggagataaccagacttcgaatagctgtagagtacaaatcaggagaaacaagactccatcagggttctgtatatccatttatagagtgaatggaaccagaaagagaaggagaaaacagtatgcaactcaccatcttgaattctccctccggcagttcggatgatgtgtacatcaccctcatcgacgcctagcatatcgaacacgttgatcctactgtccatacctgagaaaacaaaaacaaaacgaaccgtaacaagcctatatcaggactggaatctgaaaggagattagagaagagaaggaagacgtacatgtcactatggccgtcttaagagccagaccgagaggttttgctttagccttatcgaaccgagctacgtgctgggcgtttcgctgggaaaggagagtagcgatccggggtatgggagacatgattatcgtttcttctttctcgttcttctttcctttatgtgagtgttcttctggagaaggatcgttgccgttggagttattgatttgtttactacgaaaagaaagaaaaggagtcgaggagcagagagaaaattgaataaatcaccatcgtcggttggctcgctcttcgccggccaacagaaataaggagataagaaaattgggatgacgatctactcgactgtttacctttctttcttctcttccctaaagatgatttgccaatgaacttttttctttttctgaaccaattcttcatccaactatttcgcacttagcctagcaatcatcagatacatattcgatagatgtatggacggatgtgcgcgagagagcaagaacttttatgaatcaacgggcaagagagatgatgcaattaaaccggaaaaattaaagatgaaatcttgaccggtgatttcatatcggaccgaataaacattcctctattcatatttttttcaacactgttgttcctctggtttatcttcttcatcaagctttcagtgagtcatatcttgataggtccaaaaaggacgaccatcatcaatttctgagaatgccaccggcccgacagccacgattctgtgggatacaccagtctttttggttcaatcgatcagtgttccttactctcataccaggcggcaacagaccaaagactacatgttatgaccatacaagcagaaaacaaaaaagcacaacagggatataagaaggtgagaagaaaggaagaaagaaaaagaaagatagggaaagggaaagaggaagaagaagtgattgccgacgccatcgcattggcgccatttaatctatccaaaccccgtcaaactagcattttccctgtagtctccagatactgtcaagctgatgtagtatttagtaatgggttcggtaggattccggacgaagatgctcgattcccttgaagtctgttttacataacacatagaagaggtcaacattcgttccacacagctaattggattacaatcgagtataagactgaaagacttgaagcgtacaatcttgctcggtgttgtgaaatttgtggttggcgaagttgaaccttttgcaagacaacgagaaagatttagattaaactcttcaagataattgagaaagagttgatgagcaagagctatatgagaaggcttaccaggggaagacagctgaacatgcccatttccgaaccaccgattgacaagaaagaattcatcagccttgcaaacatctcttcatcacgaaacactaagaacacataccaagcctgccctgggagcgaacagattgcctcatagccacaccctgggcatattcgctcatctcggttgctccatatagcggaagacccttctctgctcgttccctcatctcggcgtaatccttagagacctccctagcattctcccatgttccccagaatcggtctatatttcaaagagagatgcacacatcccattcagcattctgagcaacacactctgttaaaggacgagacatacacgaggatcttgcgtaagcaattaagaaacctccaactagaccggtacacgcggtcaatctcatcactggtgcgagtccaaatttgttatgacttggctgccatttgtctaccggttcgacaaagaaaaagagcccacgcgtgtttggaagaggatgcaaacgaaaacaagatagtcagaatcctaatcccttagatgtaaccagatctgatcatctgagaaacacgcgatggtaacgaatagacaggaccgactcatgaggtaaacgtatccacaagagagacctgtacaaagaccgatagtaccgacgtctgctggtcgaaagtatctgacgaccctccagaaatgaggatcagaatcgatgagaggatactctgtgggctctgacttgatgggcatatcttctgattgatcgagtgcgagtatgtgatgctagagacctcccgaggtagtagtgatggatggttagcagacaacttctgaacaaccccccatctcccatctcttctgttggctgaaggggtttttgatatataaatttcatatatcagattacgcacttagataggtcagtttacctcgatccgttcatccatcctcgatttgttcatcctttctcgacctgaaacgacaagctccttataccccacacacaccatcccatccagttctattccttgtctttgtcaatcgacatggctagaccgtccgatcaaaacggaacaagaaacagattcccaacattggatgaggttcttctcagaaagacacgtcctccagtcgacttgttttgtttttacgtacgtgtttttcaactgtatatatcaaactccaactctctttctctcacgggctgaccgccgctcttcgtttgcaatcaccgattacacaacatagatatttctacaacgagaaggacaggaagatattttggacttttggctagacgtccatcaacacgagaatctgtgtcgagcttatttcaaggttagatttctccacgagtttcttcattttcgtcaacatagagttgtcactcaggtttgcaatttgtatacatcctcttcacaggacgtccgtaaatccggtcgtaacatcgctcaggaatggccccaatattggaatcgagcactccaacaggggtcttcttatgatgctgcagctggcattactccacatgcgcgacagtcgtacctccgttcctctgatccattcgccgatccacacgaacaacatcagcagaacagctccacaaatggtgtccatgataatccagccatggctcaagagtctaaggaagctcatcctgctccaattttctgtcgagagcgaagggataccgagacagacgtagcgggtgcttctgtcatgcgtaccgtcgatggaaaacggtcaccgtcgatcgggggcagcttccaaggagagaaagttggcctggtttctcctcaggctcaaggccaagctaaacgatcaagtggtggatcgattggcgggaaatggacgaatggtctgggatggggccaagggccggtcttgggaggagcaaaggagaagcgaaagagtcgtgcaccgaccgttatcccgaggaatagcgcgatcaccaagggcgagttgttgctgagtgcggagaggatatatgcaagataccttactcagggcggggaaaaggaaatatatttgccgtatgtcctgttttgctcttttttaaaattttaatttaattcatcagccagattcggcgcaaacatcttataacctgcttgtgttcggttgcctcattcttgttcccttgctccgcagaccatcacttcgaatccctcgatttcccttgcccggtcacctttcccacgtcgactcaaactcgttggatgtcgatgctgaagcactcgcgtctgttccggacatgtttgttagacaaaaggcctacactcacgccgtcctcgtccaggatgcctatcccagattcctccgtgccaaggcgtttggaaatttaacaccttttacttgcttcttccggctccttcttggattgctcatcacatggggagggctcacggccgccttttgctttgtgttcctcgatatccaacctaggagactgagattatctgtaagtacatctaaactctttcagacgatcaacctggccattgagggatcgcttacgtttgtttaatcaaatggtatcaattaaattgttatacaatacagctcctggtccccttctatatttcacttcaccttcttctttccgcactgtatgctctggatccgttaatggttcttttgttcaatcgatctgaaaccacaccattcagctatttatctatacaagagccctatgtccggaaattactccgcaaacgcagcattcttctggaaggtggcatcttgcttctcttactagccgggatcatgctttggtactgggttcctggtcataggctttagatttaaacgctaccgtggcgtttttatcggtctctttcgttttttgtttcttcttttctccggatgttcccttctttcggtcttacctacgttcctcttatctctctctgatcaaaatcgtactcgtaattgctgctctccttcgtgtctcattccgctatgtctgctttgttacttctcttgatcagtccgatctccttgcttatcaacacaggtatatttctcgtccgacttacccacatagttaatatctaatttagtgattgctctgttcccttgtgctcagtttgtttcatttcagttgctcgatgcaacgctgtatctgacgagtaattgctcgagttggacgcgtagaatcaaggtttaatgagtcgcgcgggaaaaagaaaagaaataaaatcaatcaacaacgatttacaccatcaacattcctttgggtcatacatacatcatccttcattcagctggctctttgtgtatctgcccgtttccacaaactggagcaatctccagcccctcgtccgcttcttccagcatacatagcctggtatcagactaatggatcagatgtcccagcaatcaacagcatcctcccttcaacaactcatagacgacaacctacctctactccgatcgtttcattcgaaactagcactcaccccagatctacttgaccgagatgtccgtcggatagttgacgcttgcacaacggagtttgaagtgttgctgacggaaaaaagaaggatgttggatgatatgagaaataaagttgaacgtgctcgaagaggtatgtttcttgtgttctctactcgctctttctagatttagaaagtcaaaccgggtcaatgacgtctcactggacgcgacaaaatgcgctaccgacatagaatgtatcaaactgacgcgtctaaacgatgttctacagaatgtgtagctttaggtcgagctttaggaattccaatagaagtcagtagtatactgagcggagaagaagtaagctgcttttactctcgtccttgcgtaggccagtcggttctaggtctgtaactcagtgaaagattctcaacccgcgttgatcatgtctgcccttcaatgtgcttggtgtttcatagattctgcctcagcaattggcccgattggaaacataccgggacaagacgttgcttccagcttatgaagctcgattggtcgagatccgaggttcgtcctcatttattgtatatgtcccaacctttcttggctgaggagggataaacaagaacgtggttattctcacatctggctctttggattatcctatggacaaaacagttcaatccaaacgtttatctacattaacaaatctcctcccatcggaattcgctcttcgagctctccaacctactattccttctcgtccgccatccatccattctcgatcagtcccgcgcgctacccgtcaagcctcccctcgaccattagacggagaaacagctctaatcgacctttcgttgacgatgaatgaggcggataagacgaatttggaaaaggaagaagaaccaagatcgtgttgggaggatgtgagtgaggctagactgaacgagttacagctcttagtatcaaccggtgaaacagaacgcgtgagttattcttcagtctacgttcgtatctagcattataaattgaacaaaactcgcttatctccttaaaaaattgatctatcttataatcctgcgcgcattctctttcgttcaacgatcagtttcggttacttcgcgttcttcgccaagccttctatgatttatatgaactccttactattcttgaagtttccctaccactgccttaccctttgccctcggctcctacaacctcatcctccttaccgacgatttctccaagatcaccgttatcatctgtgataccaccgggtccctcggaaccgacagctgaggtccaacgttatctagaaatcgcagagaacttcatgagatgggctaatgagatgaacgaagggatggatgagctaggagagatgctagagaatgatgatgactcaaaaggatgggaaggaatggaaggggttgaacccgagaaagggatgctggcttgggtcgaacagtctattattcaggtcagtcttcggctctcctgtttctacagcctaaagattcaggctttaatcctgtatgctcattccaaaaaaccttctaaacctacttatcaggtacaagccggtaaagagtggaacgagtttgagattcaaaggctgtacgaccaactggagacactttgggttaagctaaacatctcaagagactttattgatacgttcatcgaggagaacagagggtcatctgctcggtgtttggaaggtgtacgttttttcctttgcgtatgatctcttgttcaaaccactttgaaactgattatattctctcgacatgaacttctcgatcgatgaatcaacggactgctagtacgcactcgagttggagagaaaccttcggcttaaggccgaacaaatggaagggcttgtgatagagactcgagcacagattcttgctgttcaagacgaactcatgatgactgaagagaacaagcagagttatgaatggttttgggacagtatgttttatctctgtgccaggcctccgcggttcttctataatggaaacccacatttgtgatttgactaacgcctattcttaaatcgattgtgtcacttatagcaaactatacggacgaactgttgtctgtgcacgaggaagagctcgctaagttgaaggacgagctggattctgttgcacctttaatggaaacttacaagcaatggcagagatactgtgatctagagaagaagttatccgtatgtcttttcttagagtttgccgtgatctgtttatgaatggtccagctaatctagaagatctgcgcttggttggctggtcttgtcatatctcaaaggacgcagaggcagatacgaaacgatatac

SEQ ID NO: 1283 - DNA, 7943 bp, Xanthophyllomyces dendrorhous
gattttcttcgttggaagaagaaaagctcaggaaatatgtgaaatcccatgcgaatgtgagttcctatgagttctcacatccaaattttgtgtatttctgtctcttcttttgatatctcctggaaccagttgactgaacgcgccgtttcatacccttcattcgacttcatgtccacgaatcagattgaacaaaacctgctcgaacttgcggctgagtgggaggaaaccaacggccgggcgtttactcttcaaggagaaagaattatctcaatcattcaagaaaaggcagaagcaaaagagctcgaaaaggagatgaagaaggtattactgaccattcaagtcatctgctaggcgtgacaagagttatatgcttatcgactacttggttcggttgtctttctttcagcgcgctcgacaaggaggcaatgtcgtttcaactcgttctcaaacaccagccgctcaacatcgcccacctccaccatcggcaagccgtcgtgtgatggctactccctctacttcccattatcccgggtcctcaatgtctactgtcaaaagaaaacacccacctccacctactccatcatccacccacccgaatggcaaactcgctcgaacaacgccccgcgttgcagggaatatatcccgtccagctggtcttaccgcttgttctttacctagacctggagggtttacgcgaccaacgccactctcgtcggttgcaggaaccagaagactcgttagcggtagcagcgcgaccagtagtagtagctggggaacgatggtcgattcgtgttcatccaacagactgaatagtcattcgctttcgctctcgtcttcggcttcatccacatcttcgactatgtgttccaaaggttactcgaggttaccatgtccaacaccttcaaaaattgggatggctccatcgtatggaagttcaataaagctgaagcagaacccgaggagacagagtttcaagccgagaccgtctgttggaggctctggtttgactggcgagttcctatgatctatcattttttctttgcatgttgtttttttgtcatattcttctgccttcctatgatgccaatctgttctcctcattctgttctcttgattgctatttggagcttgctatccaccctcattgtccattctcattcttgttctctagccacgctatgtctgtttgatttttccttctctcctcgttcttttctgcgtcttggtttgttcttcctcttcttcttgatacccgtctcgagatggccttccctccgggtttctttcattagctttcgctttgtctcgtcgtcctctttgttctaataaataggatttgctttgattacataagcaacaaccctccactttcatgccgtgagatgtaatgagactaccctcccgctcaccaccaccattccatacatcaggtcctgacctgcacaaactcattgagttcgacttgctgggagaattacttggacagcgtgatatcttggaagaagcatccagccaatccattggtccagcttaatcttcgcttacaatggaaattgctccccggaatcaactgacacaaaacccagagtttggtttggccgaggacgctccggccaaacctacatttgcttgtggcacgtgtgggaaattatactctaggttcgtgcattgcttcttgcgttgttcgttgtatgattctatcaatatgtgtgtacatagatcataagggtgctcaatactcaaccgttgattgggggtttattggtcttatgtatgtcttgtatgttggcatccaaatggatgttccaatcgaccagactggagtatgttaggcgtcacgaaagaaagcgttagtgattctatctttatcatctagctacaggaacgtcgcttggttgaccatgagaaaatcattatgtcactacaaccgaatcaacagaccaagactcgaagccgtttccgtgtacagaatgcacaaagtctttcgctcgaaggtgaatgttcattatatgagtatttctattcattgcatcttactgactatcatgcaccgtgatcctcacgatgttcttacagtgatgttctgcttcgacacaaacgacgatgtcatccgaacagcgaaacttctgtaatcgtagtgaactctaactcttggtcgaatgctatctcgactacatcacctcctgctctaacagcgccttcgcctcagacgttagagtaccttgcatcggttgcttcccaatcagagcatcaagaaactctctctcatccgcaacctgtatcaaattctagagatcagcgaagagaatctgctgctccatattctagacctagtctttctagcaattcgtcaacagacgcaattcatactcgacaatctgtatctgaacagagaagtgactctatcccgactcctaatctgtacggttcgaggtcttcacccgatgacaactcaactccctccaacccaataaacagctatccgtttgtatcggaatccattaatcaaagttccaagcctccttctcagtatcagcttccacctcatcaacctgagtatgtccagccagacgctttcaatgcgtcgaataccattccgttcggatcgttcacttctcctgacgtacgtttcaaggacggatccacaaactcacaattaacttcgacgctacctccgttccactcagaaggctctcttctttccaaagaatggggccaccctctattttctcctccattgttctctcccataggtcccctgacgaccgccacaaacggccccgttcctcctctgtctcagagattcttctcctctggacctgtcgccgaaggctttccattcccttctccgatttctccagaggcggtcgattggaaacccgtctcttctttccaactttgtccctctgaacaacagtccactcaatcgtctcttctgttcaactctacacctttcggtccgacaagtccagcaggtagtccttcattgaattccttcccgttgctgtatcctcagctcttcgagagctacctccagtcaaaccaatctagttcactccaccccgaagcaggattcctatttgaaggtctcttggactatcgaacatcacccggagagctcatatcttcaatagcaggacttcgagaggctagccctcgattgcaggagattgcaaatgagcagaaaaaacgagagcagctagaagagacaacattagaaccagaaaagaagcttttggctatcgacagcgagattagactgtcgaagtgtgggtcaggagagtctgcccttcagccgggagatcggtattatatttcgccaacaaagttctcccagtgttttggtggtacgttcttttctaatttttctcgcttgcaagatgctcggggaatacacaaggtctctggaatgatctgaccatatcgttgccgtgtgctgttcttctcttggggcgatcattcctgaatcaagtcgagcactggcagcttcctccattaaaaactatgacaaagattgctcgtcgaactatggttcaattagtacctcatatccctatgcttcaccgtccgacgtttgtcatctgtcaggttcccatctgcatcgccttctcggtctgtactattggaggccctcgaagagggccccagtttagcgacaataaccttcgaatgccgaacgggacttcccgggaggctgacaattggctttggccggtgttctgtaaggataggaaagaagatcggctaagcactaagtcgacaacagagacgccagggtttggtggggtattctgggagcaagagagcgcggatgcagattgttgggacggactaaaaagtgtggttcggagagacaagacgaacatgatggtcaaggtttgttttcttcataacgtccggcttccatttcaaatgaaaggctataccactctgtctaacgataccgccattcttcattgcatggtatcaacagtctttctgtcgatcgaccggtaatctatttaccgattataacattgggctggtccaagccttgtacgttacgccacatattttgagacgcttcgagaacatatagattgattcagatctcttatgtgtgattctcgtcataagaataatgtacaatgcccccgctgcgttgagtgattctttggtacagaggatggctgctcacatgaactttggatctttagccaacgtaagcctttctccttttacttgcttctgtgtctgtttggtgttcaaagaataagacccggctatgtgttgatcatgctgaaccatttccgtattctctgagacgtgttctacagattgctcgtcaggttgggatcttcgatgcttccaacggacaaaccaaaacgacgccaatatatgactgggaggatcgtagtgtagatttaagttggaagaagtgggtcaagtcagagggcatcaggaggttcgcttcaagttctttattctgtcttgctgtcgggttgagacattcgctgaccacttcgcttctctcaatgttactattttggggttcccctcttatagaaccgcttgggtgttatatattctcgattctatatgctcgattgagaccggttgccctcgactcgttgcttccgtcgacctatccgaattcccgcttccatcccctgattcaatctgggaagcacctacggcttccagctgggccgaagcatgttctaaattctcaaactctgaacacgttttcgaaaagcagatgagatcgatttacaacacgtccagtggctcagaacctgtctcggaaaatcattcggcaggtccgttctcctggcttatcgttattttgactctgacgagggagctcatagacctcggggagggcaaaccaagggacaaggcgtgtccgtggattggaaatgttggggacgatatactgaaagaagagatttccaaagcattagtaagggtatgtgtaatgctatgcgcgccatcataagccttttctttgctttattttaaatattttgatcttatgcgatagctgcaacttactttattatacgtttacagtgggaaacgagatggtggcccgacagtctatgtggtcctgcgccatctattttctatgaggatgagggcgaggatgtcgatcaccggcccaataacacaacgtatgatagctgcatagatctggatgattctccgtcggactccccatcatcgagtacaaatactagggacactacgagggagaggactggatcttcatcttttgacgggacttcgtgctcaaacccagggagctcggcggcttcatctgtgtcgagtaaaggaagtaggttaccgtatgcggatgtgttgttctgcagggatgctgtgagtctatttatctttcttgattgtgacaagtgagataatcagtgattcatgttcacggcttttctccaatcagctccccttcttctggttctgtaaaattctcttaggtgtactggacgaacatcaagcttctattgcttcagatgacggttcttggtttgttcctggattcaacgttttcaagtccagagagatcgattatcgggccgcattggagagcgctaggaagtttgtacgtgtccactccctcctgatcttctccttgctttgagtcaattcgctcatgactggccaactcgtcttatgcactcttctcggctcgaacaacaatatgaatgatagtcaaggaacgaagggggtgcactgtaacgcgtgatatacatatatgtgatttcgttcaattccctacaagcatcagattccacatccacccctcttctgtcttacctacttttttatgatttgtaaacatctaagctgtacctgtttcaattgttatctttgtctttctctattgtcaatcttatgtagatatagcgagagaaagataatgtatttgtatcttgcttgcgctattctttttcttctttcgatcaatctgtttcctcatcatcccaaccgtatctatatctgggtttaagaagcaaatttccatcatagtagtaaaggagaaggaaccgaaatgtaacttgtcttcctctttagatatctcgtatcatctcgacttgtcactatcatttccgacgatcgacacgacccttctgatgagccaattataggctcctatccttctgagtccgaaaaatatcatcaacagcatccccacaagcggcaacgaagagcttggaatgacgcctaagtatagtggttcaagagtgacaatcaactctggaatttgttgtgttgtgagatagatcgtggagatttttagatatattttggaagggtcagaagggctcattacaggaccagcgatagagagagttgttgatggctgggagaagagagatcagcaggcaactccagaaaggattaatatacgtgatagtcactgagagaaagaaggagaagagacgtactcgagcaagccaagagaccttcatcatacccttcgcttttcccgtttttccttctgataagataactgaatctaactccacccaaacgtctctagtctgttcctgctggttttgttggtcatgtccgaatggaatagtcttttttgatgaactggattccgttggttggaaacggacagactttttccaagaggaaattactaagtccgtagatgaaggaatcaaccccgttgtagacgagattttggaatcaaagtgaaaaggtaaagagaacgtcagaacttctgtatctgctctgactgagaggacagcacagagcagattcagaagtccaagagagatgaaacgtctcattggatagggtgtgttgctagacgatggggaagtgatgaatgatacagaagaaagtttacccaagaccgtcgtgagaccgtcttagacatcttcgaggattatttcaaagctcaaacttcaatgtcttattcatttcacgagcttgtctctcgcctggttctgatattgatgaaagccatattatctatgagcagacaagatcacagttattcagatagaagaaagaaggattcaggatacagagaactaagggggagattttggttttccatcgtacccaagccgagtctgactcatgagcccgacccggccaatcttttgtacggagaataagaggccaacctcaaggctaactctctatgttcttcttcgcaacgtgctttagaacgaaagaatcaagaaagtgacaagagcaaacatgagacgaaggtgagagtcgagataactatggctgactaagctaatgacgtatgatctctatccggtgccatcggtcgatgtctgttcccttgcgcgatggttaaatacggcaagcagcagataggacaggttttttcttcttccttctcttcccacatccatcttcactatctctcaattatcattcatgtttgcccagactattcgatcttcagtccgaacaacccggcttcctgtatgtatgctttttcgtgcgcgcgctcttaccttctctcatacgtcgtctggccctgtaatctgacccaaaattgctccatctccttgcctccaaaggctcagctcaggtcttatgctcaagctcccggacctcccaaagagcgtcagggagtctctcccatcctgattggcgctgtgggtgttgtcactcttggactcggctggacatactttctgaatcaggaaaaagccatcaaacagggtatctccgtctctggcagtgacccgaccaaggtttgtgttatgttttcgtctattcttctctgttactacgtcttgcttgaaggaggattactcacggtcgagttgctatctttcattggtaacctcagggtgttaaggaaggacaggaaagacaggcccgaggttgaaatttggagtcaagactgtataaaaccgaaagattgttaccatcacactgtattgaacgaaacatgtttttttttttttttt

SEQ ID NO: 1284 - DNA, 5933 bp, Xanthophyllomyces dendrorhous
ttgttataccatttgatgttgatccgagtagagaaatgatattggaatcagaacctcttcataggtctagccggcagatatcgcgctctaaacatcatgttcacgaagagcctggcagtctgcgcaatactgaagagttcatcaaaatcaaatcgatcgtgtgatcaagttctttagatgtcgttttgctcgggtcttttccttgacggttgatgataacgtcaatccagaacgcctgaacaccattgaatgacgatagtgttggacattagtgaacttcaagaaaaagaaggaactaggaccatagatgacaagagacgaaaagagggctaacagctttgcatgaacacgtttcttcttagtcaaacgaggatcgatgaagtcgtctttgtcaaatccttcttcgaccttgacagcttggatcgttgatgacataaaggtcttagccaaaaaggtagaggggtcgggactagaatcaaaaaagtaaccagtatgaatattcgatacagcttccagtgaaagcttgttcgacttacgaagtctcaaccttgatctttccaaatctttggaacaaagcaaaagaagcgtagaatttctcgatatcagtatcctacatagtgcaagtatagagagtgaaggaaaataaagcaacgaacggctcatcctgatccaagcctatcaagcacttcacaattctttcttcttcctcgtccgagtctctatctgcgccgttgttttctttgtctatcacctttgcgacacaacttatcatcactttgttttctgggtcagttgagcacgacccaaagctgttcgcacttgagaaaaatcacgcgtaagccgattgcgcgatgtcaaagaagactacaaacgtgtggatgaaatgacttgactgacgtagttgagggctcaaagcaagtatatgcgctgtctaggtgcggcccggcgaggactgtacaagtgctgatatgttataccgactttagtgactaagcctcgactgccttggtcaattcagaacactcacccatggcgaccgaaagatagaggagtcaagagagaaggcgcctttgatgacaagataaagggatcaaatgatacacttaagacgcaaagcttctgatatcagacttcttggaacatagcttgagtcaaagacgaagtgagaaaaaaacttacatgtgtcccaaatttaaagagcatgagatccacgaagaggagataatctgtcaagcaatattcataggtgtcagtcgttatggacacatgatgaccctgcatcattgtaaggacacaggtatatgcaccaatgtcgatgtgtccttcagcctgaatatcagatgagagcgcacatatagggaacgacctgtcatcaatatgcttgagatgcttcgaagcaagaggaagaagacatggcacgtactttgcgtagagaggatcacatcttccgtcacagaagacgatcttgacatcagatacaacataagaggacgaattttccaccaccgtaccgccattctctccttgataccaaaaatgatcgatgattaaatagataaatccatcagcacgaaagaaagagaagatgagaataccagagagaggactgactccatcgttgaacatgcaacctatcagaagaagcagaaaaccaagcttcgaatattgatgggtgatattgtaagcatttgaatgtatcgacatacgatcctttacatcatcagacttaccagatccaaatggggagaaaaaattactttgctgctgcatcgtaaaagtacgagatgcaatatgaggaacaatgaagttagaaacgtagaaggaatgtcatcccaatgcagtacaggaacgtgacagataaactgttagtaggatccagatgacaagtttatatgatggtttctttctttcgcaaacaattttttctgatgacaatcaagtcaactagccatggcatacataacataaacccgaaactcaagaatgcatgagactaattagatggataaagctggttctgttgtggtctagacaggatgtcgaaataggaaagggaaaaagagaaggaaaaccaaagggaagtagagaagacgacatgagaagagaatagggcgaaagaaggtttgctgtatatcggaggatgagggggtgtctagccctttctatttggcataaagatggaacctgctctcgatcgcagagaggagagcgttccacttcggttgcggccagtacgtaaaccagcttctgcgcgaagttgatcttgtcgtgacatgtgcctggcactacccactccggataatcggctttgacttcgtctaagaccggcaactcctcctccttcttcggctgcaaagttgtaaccactgccacctccaggagttacccggccggtcgccatatctgaataagggcatcgatatcaagaagtcgagaatgatcaatataggcgcagtgatttcattgatgaactgcaggaacatcatgataaagaagacgtaccgatctgactgcccgtcgtagccgttctgttaagcggtctcatggaagtcatcgattctcgaggattcgcttccacgttatcgcgagcaaccgatcgtcggttcgaagccggatactcttcctcaggctcggccgcgttctcgaaagcagcttttcgagcaccaagagcaggatggtcggcaacattgattcctttgtcttgtttactgttggacacaagtggaattgaagaggtcagaaatgcttaggtgagaaagataaagacaccaggccagaggctacagagacttaccgaacagctcgcatgatatctatatctgtcggtcggtacatctgagaaatggtgttcagaaggtacttgggaagaagcccaataactttgatgcacgcgaagaaaagacatcaaagatcagtcaattagccactacaagcattagaaagagaaagtatttacccgaaacaaagatggttccgaaccagaacagggccgaatggaagagataatgattgtttccgctgtgtatacaaaaaaccttggggtaagtcgagtgtagagaagggattttagagggactatgaacgaactaagagtaagtgatcaacaagttgggcggtaaagcactgtacaccgcgacgaaagactgttcgttcaaagaattacccgtagtatcagaatccagaatatagtgaggagcgatgatttcggcatttcacgcaagtaaatacatacccagagaagaacaggtccgatgaaacaggctagcgataacaagatttgatcatcaatatttgaatctcgcgtcaccaattttacaaatgcaaaacctaccaccaacaatccaccaagggaacgaatgtgtcgtgatagcatggaattcgtctatagaatatggaaattcaaataaaaacatgagcctccttatattcttgttgagttaagaaaggaaattaggagaaaactcactgcaaaccatcaccgcgccaatgaccatgacctgaagaatattgatcatcaatacgtgagcatgactgtctatgcgcgatcgatagccagaacataggcgacataccgttgagaattcgtataaaaagacatcaaagccatccgatcgagcagttgtgacatcgtaagtatagttgatgaagaaaaagacgatggctgattgtagaacaccctcaaagctatcgatccccagcgtcccagattaatcaagacgagactgtgagcctggatgcgtgagataatatatatgagatcctcctaaacttacacaaagtaaatgtatcgagaaaatccgaagtatcgaccctctcgaccttgtctgtacagttccggaagcgcgaccaagatgtcatcgttcagatctcgatcaaagagtccactgtttatagggatgataagatttgtgttagcgaacgagaggaaagtgaaaagatagaatatagatatgattcaatgcttacattccgatgacaggctacgcgagagaatagttgtaagatcggagtcagtgacactcgaggaaaacacgatgattgtagaagagacgtacagcgatggtccagacaacattccacagcaacaagtagacgtaatcgtatgcactatcgagaagacaagattgtatcagtaaatgtgtccttattaaatcacaaaagagacaaacactcactaggtggtactgacaaaaaaatattaagacatcgagttagcagtaagaaactaagtcgacaaaaagggcggcacatacctccaggtacagtagatctggaagaagaacaggaccgctactccaacgatgttcttgaagaagctgtataggacaagaacatatatataactatcagcaaacaggtcttttcaagctgtacgagactgaaccgactaacaagttcaaaatcatgtttgagtttcgcacgtagcaccaatgaccatgcaccagaagaagtcgagtcaagtaacggaactaatcgggatatgttgaaaacaaaacacagtcagttgccaactctggtgaaagacgttcaagtggaaaggttacctgagcgatggcataatccgaggctatggtagttgaagaaaaccacgttaacaagggaagttacaggcggttaagatcatcagaaacatacagttgacggcttgcaaaccctcttctccagagattccaacacccacatccgccgcctgaatcatagacacatctaaagtaagagaaggaaacaagtggacacaatcaattctgttcttaatgacatggtcgaaacaaggatgaagagaatcaactaaccgttggcaccgtctccaatagcaagcgtcatggcgccgatattgaccttgatgagcctgacgatctgagctttctgaagaggggacactcggcagcagatgacagtgttgcatcgagtagataactgaagcagaagatcctcggtccactcctcggcaaaagtctattgttcaagcagaggatgccggatagacgatagttaggaatataatgaggcagatttctcaattaaaattcttcctatcatagaaagcaggaagagaaaacatacatgcgtcaatgcagaaccttcgatgactagagagtatccacctggtcgatctccattatttctaccgatgatatctgatagtccagtgttcgttcttttaagttgggcagatcgtctgtggctggacctacgttgctggaatgacggccgtccgaaccctgacattcgagatgtcgtcctttctagatcaggcgggtgatagttcacgtcctgagagacttccggtccaaagaactggtcgattgcggctttcagctgatcgtaagcagagttcggggttccatacgctccaccacggacaataatcaaatttgaatccttagtgagcaagttggtagagtaaccaatcgaaatcgccgtctcgagtttatcacccgtagcgacccagaccttgattccagctcgcttgagatcggcaatcgcctcaggcactccatcttgaagtttgtcctcgatagctgtcgctccgagaagaactagagagtgctcaatctgggcagatacctcagccatcttgccctctcgatcatctagagaggtagaggcattgtggtagtcactggaccactgagcaaactcttgttcggagatcattcggtaaccaagacagagcgttcgcagaccttcgttggcgaaaaactcaaggtccttgttggtctgttctttgagatcgtccaaaccaggagcgagtcgctcaaagatcacgttgtctgctcctttgataagcaagaaaagctttccttcatcgtctaactttcggaggatgaccgacattcgttttcgagcagaagtgaactccaacacattcaggagctcatactcgtcgatgccgtcagaatgaggagttttcaaacgaaggatgtttcgat

SEQ ID NO: 1285 - DNA, 5117 bp, Xanthophyllomyces dendrorhous
gtttcgatctttacccttgaacacgaaaccaacgtcggcagcagcttggactctgatgagaagaagaaacagcataccgattgtaagtatcagcgtcgaagagatctatcccgaggagacaacctgagaagaaagcgaaacgagaaactaacaaggcagcctcatccggagactgtgccatgtactccatcattccattcgagtcttctgaggccaaggcggtatgacaaagcgccaggttggtaaagaatccagaaacattggtgtactgttcggagtcttcgttttccaaaactcggtccagttcatccgaatggaatcgagggatatcatctttggcttttgctttaggcttaggtgcatcagaaggcgtgtcggaggcagagccagaggacgagtcctggaccaactcggacttggacgtgttctcggtcggcttcattccgggtccttcgttgacctgagctacagggggtaggtcggcaagtttgccgtctcctttatagatctaaggggaaccaaaggcattagccgaaggtatagatagaacaaagtcgcatattcacaatgtttctgagagaacgaacaatatgtccaatagagcactgctggaaaatcatggcgttctgagtcaacgttccggtcttgtccgagaagatatattcgatctgtcccaaactagaagttgatggtatgaaagaaaggagcatgaggaatcagagaccacagttggatttttgtaaatcaatgtgatcaagatgtgtaaaaatctaaacttactcatctgccaagttccaacttcgagccaaagtttttgtatctgtcttctcataagtcatttcttcatcatagtagatgaacgcagcctgagcagttcgaacgaattcgatagagatgtagagtgagatcggaatgatgttttggaaagtgatgagcgagttcaagaaagtaaaaagcccattgatctgtttgaagtgaatcatataaaacgagagcgggcttagtgatggacggttatgtttttggtactgaaagcgtatactaacgctcggattatcaccacttcgatcgtcatacaacgtccagtatgagttcaatcggtagtacttcttttcatggaagtaattgacaattgcgcaaaccataccggccaaaccgaggatgagaagcgaaaatagactgatgtgacgaaagaaaagcgaagagacagcgcattagagatagaagaacgagtattcaaaaccttgaagaattagatgcgagaacacttacacctgggggttcatctgtcgttcgactttgcttcgcttgctgggagttcctccagagttggcaacaattttactgaacacatggcccagttcacacaatacatcaatcgagttcagttcacaccgaacgattttgacccaactagatgagtcaatgatgattgaactcacgtatcggctccggtgaacataacaataccgatcacccaggccgtgttcctgaggacacagcctctcaacaatgaagtttccaagttgataggatgcttgacctccactccatctggtccaggagcaacgacggcagcgttcaatctgaacatattgacctccgggggctcgcaatcaattcggaaacgggcagttgagcaggagagagcacttcggagatgtgctagttcggggacggcgtgtcgagatttcaaattggtttccccgtcaagattttcttaagaaaaccatgtgaaaaaaggcggttaagcatcctagtagatagcaagagaggctctaatgcatggtaagagtaaaatgacgtttactcactggtctcaatgtacgcaacatcttcttcctcggaagtagcgcagatgacgacatctagatggcaggaaagataacacatcaagacaatagctaaagacaagagtcaaataaagagaggcacgtaccggccgggaaaccttcgttgttgtagatctatgaagcagtgagttcgatcagattagacgatgattcctaacgcgtaaatctaaagagggaagaaagacgcgttcttttcgaacggaaactgttgagaactcaccttgatgaagtccccgactttgacatcttcccagatagtctttttccatccgatctctccactggtatctacagcctccacgtcgtgttcgaagtcctccggaatgccctcggccacttcctgatctctactcctaattccccggagatcctctccagggaatatcacggcggtcgcgtcgtcgacaggaatatcgtggtgctcatctctgacgatctggtcgaaccctgctcggtctctggcttgtttggcccgttttttcttagactgagggagcctgactcctttgacgaaggtcttggccttggctcccataggattgtggttgacataattcgggccgacaagcgtatggacgacagagtggttcacgtttcgatcggactgatgtcgtttgatgtcttcgtaaccatccttgagagcggtgatcagaaggacggcgagcagaggcaagatcacaagacctggactgatggtagagaattttgggaagaattgaaggatggcgatacctatcgagaaagagtgagtgtcgcagaaaacggagaaatacgcgtgatgagtaaggcatctcggccacccctgtcatttgaacggatcttctgaaaaacgtacccaggaaaaaactacacaaggaaaaacataggattcggtaaattgatcattgttatgtcggtctctatcagtattggttctgtggggaacgaagaatcgaacgaaaaaagaagagaaggatagactcgacaagaacagatcaaacgtacatgttggcgattcttcgaaactgttcaaacaagtttttaggaaggaaagtcaagatagtgtatttcgaagtgacgacctgggaggtgctataccgcatcgccgcgggcactctgcccttcttgtccaacagctcgactggaaggggttggttaatgtagattgaccgagcgacagcaggaagtggtttttgtttaaataagttctctgggttgagatagtattgaaccttatgaaagaatgccgccgtcttggacggcttgtaacggggtggcatctgatgcgaggcgccgttgttgtaggataaatgtgtggatgagtggagtaatgtgctgatgtcaagtagaaccgaccgagtggcaagggaaatggagaagagtgatgagtgctacactttttggagaatgagtactgtctttgtaaggagggcccggggatgaagtgcaacgggaagacgattctcttggaagagtcaaaagagtcggatccgattcaagtttgtaaagagacgcgtcgttggtcgcctaggagcgtcggattcaaccaagaaaaaaaccttctcaagggagaggggtaggtgggagaagaatggaggaggaacgacgatgaccctgctgggcaagaccttgatgagtggaaggatagatcgaatcccaaaaggcgatacacgatgacggaaagaacttgaaacaggatgagagtacacggcgagaaaatgggcagagaatgccgagaacggccaaggtgatgatgatgatgactaaacggttcccgatccggccgacatcgggtaccggccgcacagatggtttttgctcagggaattctattgtaaagtgatattgaaactatgaatatttcctgatactcttctctcgttctttttctcgcttcctcacacagcgatctcgtaagatcagagtcttcatagcattagatattcgtcagaaggattatctaatactgataacaccatgaaagctaccatgactgtgagcagaggaatggatcgcagagagagaaaagagtcgatgagatcaagccttaaagtatattgaagaatttgctatcaattacatcgatctgatacatcttagaactgttctgcataagacctacaagaacaagacatacattcactatacgtggtttcttgatagatctgtggacaacatgatgataaacgtgatggcgcacgtcgcgccaactttcgaataattttatgtccgggaacgggtgtgatccggactatctcggtaaaacaaactggctaggctgattttttgtcgctcaaaaagctcactctcttccttcgtacacctctttgaacgatcaattcgtgacgaagtataccatcaaactgccatttatcaggatagtctcttatgagcacttcacatgtactaggcgacaaattcttggaggcgtcatttgggaatttcgccaaacaatcaagtagcgatgttttcacattccacatacaacaagttcagcattaaaaacaaacaacaaaatatcagaagaatgaaaacccggaatgagcatatagatgagatacgtcgccaggtaggaaacccacaaccaagtcatgacattcatgttgctaacgcctcacattgatattcggtataactgggtcgctttgtttacaaccttttttattattaacgacggtacaatgatcttgtaacagagtatactttcgcgctgaggagccacaactgtatagataacatatcagccaatctcaacaaaaggtcaagaaggcctgatccggcgaacgtgtgactatgatcacgcgtctagacgcgtccaaccgccaaacgcgtctcaggcgcgtttggagcgtgttcctctcatttaataagttctcttgatataccccatcttagctatcactaacgtcctcaggttcagtctttggacccgttgttcctcgtgtcttttctttcctcctctctttccttcgttcatgttaaatgatagttctcttggtctctcttatatatctcccgagccaatcctcagagttcgactgacgaacctgttggcaagctcggccaaacctcttcgtgggctcgatcagatgtcatccgggttctctgagggtagacaatttggcaggattcctctacttcaagtctttggcatgactgaggccggccaggtaattcggtcgagttcacttggattgagatgagctgctatgctaacaaaacgtcctgtctctttctctagagagcatgtgtcaatatccatggagcatttccatatgtatatat

SEQ ID NO: 1286 - DNA, 6944 bp, Xanthophyllomyces dendrorhous
atttccatatgtatatatcgagtatccgagagacaactcgttggaacccaaaacaggtaggtcatctgtctccccagacgttgatatagagccctccagtcttcctcgctacctacacgctcatacatgttgattctataattcctctaagtcaagcacttcatatcccgtctcggttctgcactcaactttgctcttgctaggaccttcaatgtcgaccctcagattcgagccaaagatcactacgcatcttccgccaacgtcattcaatcgataaccctcgtcaagggtaccccgttctacggctttcacattggtcacacatatttccttcgaatcgcatataccaagccaacctctcgacagcttttgatcagagttctcgccgaaggcgccatccttggtcaacggtgggacattttcgagggtcacttgaactttgagctacagtttctctgcgactttgggctctcaggctgtgggtggctagaaatcgcagacgctaggtttcgtgaacccttacctggttagtgccgtaagaacagtcgtctatccgctctgccgacttatccttgtcgtttcattcgctgttctcctgttctgatggatcgataatctagaacaacacccaaagctcaacccaagatcagaagctcacttgccatctcgactccggaagtggtcgaccaaaacaacttctggacgatatcttcatccacatctgtcaccagctaggtctactcgaacgacactcgagcttgacatccatgtgtcctcgatcctcaatcggctcgcgcttaaaccccgcgatcttcaccacgacttcatcgaactccgacacggccttgcctcagaacgaaagctactcaactcattagaagaactgtgggaggatgaacgaaagcgcagaagagaagctggcaatgtaggaaccaaaggtatgcaaggtttgagctacggagagagagagggtgtagcgaacaagattcccggaaaaggtatgggctggaactcagaggagcggtggtggtcagaagtacggcttcgaatccaacaagatcgagacgcattgaacgaacacgatgagaaaaaaagttacgagctttcggatctgctgatggaatcatcggagccaaaggagcggagagacgaacgagctaaatgggaccatgtgagtcttaaagcttctatatagacctttctttatgtacgtattcgacagattatctgattgaaatggatcccaatggatagtacattcccaccacgttcgccgctctgacaaaaggatggccctcagagccaatgccgtttcgagaaatgatccttccttcgccatcccaagctccgatcgattaccctccgcctactccatatgacgatacacttctcccttcagaatttgtgggagaagactcgtcgactaatgatattctatcgcgaacgtcctcacagccagcagaagatgttgatatcgatatggtcatcgcagcctctcaagccgtgtttgatgttgagagaaaagagaaggccaacccagctcgggatccatggggaataccaattaccaaggaggaagaatcagacgatgatgaagaagaaactctccccaaagaacaggaagctcccttgccttgggatgccgacttcgattttgaggatgaattttacggtacacaacgggtcgagcgcacagatccaaaagagaagagtcaagagataagtatgccccagagtcccaaaaggatctcaagggagaagagacgtcgggaagaggacagtctcccgagttcatctttgtctgcagctggctgggagtccccgtttcaatcttcaacagagccatctatgtcacccctggattcacccacaaattctatcagtcccaaatccaaacactgccgccgctcatcccgcttgtctcaatcacctactcatgaccaagctccatccgtattgacccgtgcctcaccatctctcatgcagtcacctgagatgtcttcaggatcgcaaatgaccaacccaattcgtagtccagagatatcgagagatgccgatgaaaaagaaagcgatcctaaatcgacgcctactatgtggtctcttcccagaacgcgacctacaataactcctctcgaaattcaatcaacgacatctcggcagatcgtaaatgttccaagttctatttataaaccagcatccgagaatacaacagcagagaaaatcgcacggtcttcagcggcggacgactctttttttgatgcatcactcgatgcaggggatgactggattttctctcagaccgggccggattctgtattgtcttctctgcgggccgatcggtcggtccagcaggtatccaacgatagttcttctccagttaaacaattgcttatgagtcgtgtcgagactcagtcagatgcagcgacaaataatccgcttggtgggccctatggcttatcatctagttcctattcaatacggagagctcaacataagagtaatcgagagaatgccaaagacgcgcccttaagcctacccactgatacttctgaagcgacgatagaccagccagtccttaacccttcagtcattcgtcagtcggatcagttgtcttttttgcctttttgtctcggtttgagttaacacgtttggctatctaatgattgcatttgaatagcatcggtcgactcgatcatctcctcctcagctcagctcaagacatcggcgtttatcccttcaccttcgcaacaatctaaacaatctctggcatctcccacagaatatggctgtgatattgattatcaagatccctacttctccaatccagtcgacgttccaaagtttcctagagagtatgccggaagactctggacgtttgataaaaacggtaattctatccgtcctgaagaggtctggtcgccgaacgtgttcgatggcattcgagatcaacccgaaatcggaggtagcagagtctttaaatggggcggtcttaagggaggtctttcaagattcagacgaatggtcgtgggagaagtagcatctttggaactaggtcatcgcgcaccatcgaggagtgaggctaaggagtggctaaagaaggatattcaagcaaaagagaatcgtgggtttatctacttcttggtatcctgttctctttttctactcttttatcttttatcgagatcaatattattactttgtgtctatgttatcttgttgtatccaaaaagtttctcacaaactacttttttaatcaatttttaatagggagaaaaaagattttcgcatctcaggtatgtctccatgtttaatactcattccaacaattcttggggggtttcgaccagcgattgtttgctaaccgtgtatttgtttttttttttgctggggaaatgttctgatcataagatagaaggacctactcagttgaatactcaaggatttaagttcagtcagattaatgaagtctctagctctcgggagaagaggttcatgagtgttatgtctctagaagtccttcgttagtcttaatgtgttacctcttttctttgaccatgaagctaacttatgcttaaacaaactggctctgctttacatcctctcttctcacaatcggtttatagctgcaacaaggaatggccatctaccagatgccagagaagatcctattctcgctgtttttttctgctttcaaagcgatgggcaagctttcgacaactgttatatgccaggatgccatgtcgggctcatcatcattatgacagacgaccattctagcaatcacagtcaaccaccttcgacagatcccaggcgcactataggatcgcgtccgatagagcctgagtttgtgtctagcgaattggaccttttaaatttattgactgagaaggtctgggcttgggacccagacatcttgagtggctgggaagtacagggagcatcttggggatatgctacgaaacgaatgtcgctttatggaggtgatatctctccgatatttcttattataacacttctggagtgatgaactgacagcacttactccatggtacatgctctttgggttctctttgaacaggcgaacagttctttatggcggagctttctcctgtactggatacagacggccaaaacacatcgtctgaatatgactccgatcatagctccgccttccagatccaagggaggcatgtctttaatctatggaggatgcttcgagcagaactgaacctcaatcaatacacattcgaaaacgtggcttttcatcttcttcatcgtcggtaagcagcttcctttcgaccatctgtatcttcagggtgtggtcttttgtctgaagctcttctcgtcatgtggcatgcagagttcccaaattctctccacaaagtctccaagattggttctgctcggacataccgtccaaagtgattcggtgtatcaatcactttcttcttcgagctgtgatgattatcgagatgctagatttatcggaacttgtttctcgaaatgcgtgagtggtttttcaaaatcatccggattgacattccatatgatgggagattttacagattgacatggacccaatttctgcaaggacagagagttcgcacgggtatatggcgttgacttctcggacgtttatcaaagagggtctcaattcaaagtagagtctttcatgttcagaatagctaagcctgagagtctgttgttccgtacacctactcgagaacaggtcagtgttttgtcaacgtggagtcgatatggtatgtacgtcttcggacaggcactgatgcccttagtacttctttctttacaggtcggccaacaagccggggcggaatgtattcctatggtgatggagcctcaatcagccttctacaaggacccagtagtagtccttgactttcagtccctctatccatcaattatgcttgcgtataatatctgctattcgacttgtctcggacgcgccgaccgactgaaggataaagatgggaatccgactgacaggtttggctttaccaacttagagctctcacctgggacgcttgaggtactcgaggatcacatcactagtaagtttggctgtgtagacctccttcttaaagatattgatagattgatttcaaactgaaatatgctattatacaatgctctgtgttggtagtttctcctaacgggatgatgtttgtgaaaccaactgtgagaaagagtttacttgcgaagatgcttggcgagatattagatacccgggtgatggtcaaggacgctatgaagggatataagagcaacaaggtgatcattgttacgtatccatctacgctgcgacagtagtgatataggctgatcagtgtgagtttactgccatacagagcttgacgagaacattaaactctagacaacttgcgttaaagcttttagccgtaagactgttttatcgagattgtctactgcctcgattttgacttcaagtttgacatgcattgttttgaatctgccgcttttttcaaaccttcagaatgtcacttatggctatacttccgctagtttttcgggtcgaatgccccatattcaggtggcggactcaattgtgcagtacggtcgcgagtccctcgaaaaagtttgtcttttacatgtctatacttgaataaccaatgctggaggtctcatatctctcttactgcaggcgatttctctcattcactcgacccctgaatggggcgcacatgtcgtgtatggagataccgatagtttgtttgtccatcttccgggaaagagcaaagagatggctttccggatcggatatgagatggctgatgcgatcacggctaagaacccaaaaccaatgaaattgaaatttgaaaaggtttgcgttctatcaactttttctctggtatcaataagtatagtgctgacgaacttctgtgttcataatttcgaccatgacaggtttatcttccctgcgtgttacagtccaagaagagatacgttgggttcaaatacgagcatcccgacgaacttgtcccgacatttgatgacaaaggtatcgagaccgtaagacgagatgggatacctgctcagcaaaaggaactcaaagaatgtataaagtgagttttgtttgatttctaacatactgcacattaggttattcagaagcgtgtcttgctaacatacttgagactaacgaaactttgtcggtctattttgaacaggttgttgttcagagatccagacctctcaagagtcaaagaatattgttatcgtcagtggactagaatacttcaaggccgagtttccgttcaggacttcactttcgccaaagaagtccgtttgggatcttataggtaagttcagaatacggttgtttgtttcatgtgtttgctgttcagttttctcatcgcttccttgctcgttcttctttctttcttttataatcaacatcaatctaaacagcgaaaaaagtcatccgcctcatgtagtggttgctgcgattcgagcgaatcaagatcctggtgacgagcctcagtacggagagcgtgtaccctacgtgattgtccaaggggaacctggagagcctcagtatagacgagcgcgtcgaccggaagatgcgttggaggacgagtgagtcgtttgtctcctgtgacccgaccgtactggcgccttaatagacttgatttttttgatggctgattttacttcgtttttttctttcaccgatccacagaggactgcgactagatggtgaatattacatacaaaatatgctaatcccgcctcttggccgagttttcaacctattaggagcggacgtagcgggttggtaccgaacgatgcctcgtccgaagtggattgagcctgctccttttggtataccttcttcttcggctgttactactgctgcttctgctgttggtccggacccattaggtcctgcgcagatgattgag

SEQ ID NO: 1287 - DNA, 8915 bp, Xanthophyllomyces dendrorhous
  misc_feature (4164)..(4173): n is a, c, g, or t
gtcctgcgcagatgattgagagcgctagagggaaagttgttgctcgaaagattaagttgacagaccacttcaagagtgatctttgttttttgtgcaaagctgaaacccatctaggtaataatttcctatctttcaggcaaagagcttttcgtttagtgagcaaccctgaatagttgctgaaacgtttgccttctctctctgcattgttcgtgatcgcggcttatagtccccgcgatatgtaaatcgtgtcgatccgatccttacaccacgatctacgctcttcagaaccatcgacaacaagccgaaactcgattaacgtccactcagttgatctgcagttcctgctcttctacgctcgcttcagagagaatagactgcatcagcctggattgtccgatcatgtatgagcgggtcaaattgaaccgaagggttaatggtctggctggcgtcggagagtttatcaagggactggaagaggaagaagcgaggagacgagaggcagaggtgattgatttaacgttattttgagagcatgaggtttcaatagcaggtaggagagagacaaagtaatcaatcgaggggagcatacacgtcagatgataaggtaggtgtatgtacgtcgttcatcaaagtttacatgaaggcagatacaaataggagaaaggagaagggaggaaggagaacatagagatactttgaatatgatcacagaataattcgtacaaaaacaatgataaaggacaactggtgtatatgagcgaaagaatccctctggggctactaccatagttccccacctcgaacaaagggcaatcggtttccagatttctggcgcttctccaactcgtagtacaatgacctgtatcaatcactatcaccatcagtgacaagacccccgagaaaggagtctactagaaaagacagacgacctgaaattgaacaagaaaataaatatatatattaaataaactgcttacccatcgtactgctttcgaacactcctttcatcaaggatcccagtttgggggtcggctgctaggagccaaaggtatccccacaggaaaacctgaaacgtctgtacataatttacgccgcgggaccaaagaggtatcaacatatcgaggtgtcagctcgtgaagcccgtggttttgaaaggaccgttcgctctgctttgtttagatcaaaaggggaggtgataaaattcgaggaaatgtgcaacgaacccaaccgatgagatccaggacgtttcggtttgctttccacatcgtcacgatctctgaaaaatacaagcctcctttttggtctctatcgaaatgagagaaggacataaagaataggtgagaaaagctcgaggcaggcggctcagaaattcggacattacagtacgtactcgtcaaacttcttgaagatcctatcatatcgaccttcatcaaatgttccttccatcgtataagattccgtatcacttccggtcgcaaaataccgatcccggtccgggtacaagaggatcatcatgtgagattggtcatcaacgttagtaacttgtttttctttgaaaacgggcttgctctaacaagggtatatgcgcgcagatacagaccttccgtgcttagctcgcgcaatcctcctttaacgcagaagtcggatgaatagataagatctcaatctgaccgaatctaagcgatcaaagagagaaagaaggaggacatactcgacgtaaacggggaaccgcagatcaggtatccagctttcacatgtagggaacgagacatgaagtatgtggaacgccagagccgattggagggctatgaaggtgttgaagccaagtgctctaaagccattgtatgtatccgtcggaaatcttgaggaattatagtacagcttcagggtatcagatttctatttggaaagttttggttggctcgttcatagaatcggagggacttacatcacaccagtttttcttctatcccaaaatgagacatctgcacccaaggcagacgcaaagaacctcgtatgcaatcagtctcatatatgttatctcgaaagatcgagacctgctaagaggaaagaaaaaaccagaaggagagagccctcaaatatatgttgacagtttcccgtccactcacgcttttgtagagcagtaggcttccatcccaaccgagagagttcgcagaacaaaccatatcagagccaatcgccttgtttttcttgaagttctgctacagacagcctgaacgaggattcttaccttgtcttgttcactgacgatttgtctaggcatgatgctgagatgtgtatatgtgtgttcgagggggagaagagtagacaaacggatcgatttggattcgccagaatagctagcatcgagatcgagctttcatctctggacaatcattctgaaacgtcatctgatcaaaacgttgctcgccatgactgcggacattcttctatctacctctgtatacacatatagactaatcatcgttccctccacctccgaaagatttccacttgctggtactcgattgagaagcttccatccgttttctgtgttcttcctctgtttccggttcgtcttcaatgtttctgaacacttttggctggtttgcccaagctccggcccatacactatttcgtttacatgccgaggacgacgcggttagttcttgtgccgtaaggcgagagatggaaaagagaaacgaaacgaacggatttgtctcggccacattggcatatttgagcaaagcttctcgaggctatggaacagacgacgaatccgaacagatgaaaggatgagctgagcaaggggttgagaagatcgcgttaagagaaagagcaagaaacttacgtcctcctctcgggtgttgtctttgatgactcctcgtaggagatgttgagtggcactcgctccgactcttccaccctttcctggtccactcattggttccgccggcttcctcgtcttgaccggatccgccctttccttctcccgcttccgttttccgccacccaacagcctgttctcctctctgtacatcggaagtgaatgaggcgtgatgatcacctgaggcatggtcaagtccgtaatagaatctaggtggatcggtgccgaccgggggagtttcgataacggaaggagcgctccatgagttgaggctgtgggtgaatagaggacgttgatccggccggtggaggacgcggtgacgatctagtttgaggattaaaagtcaggattggacgcaaccgtatgtcaataaagaccaaagagagggagaagataaacaacatgtttacctgattaattctggaatgccattcaactctgacgacacttccctcaccaacatccacccttcgttcctcttccaggccttcctttccaagcacgacaagctcacccgactttttctctcctccaggcctgagagcgactccggtgaggatatgtctgtcgtctggtgagaatatcacgtttgtctctgcgtacaagttcggaaggtttgacgcggtgaaaagtggttgacggatcgatcggagatcccatactttgagagggggaggaaaaacatgcgtcaatttgagacagtctggttcatccgtctacggagtgtgtaaggtgctttggaggggaaaaggctagtgactcacatttgacagtatcgtccccccctcgggtaataaccgtgcggccgtctatcgagaaacatatcgagctagtctccgaacctttgatatgagcggtctcatttgtcatgtttggtcgagcaaagttgcccgaggtggaccagatatgcagcgtgccgtccaagccggctattcaggtttaaattcagataaaatcagggatgacatgattagactacggaatgaacaatctctgggggtttcctcaaaaattaatatagagaacggaggagtgaacgaacttgcaccgatgtgttttccgtctggactataagcacaactggtgacctttgttcttgcgcctctttccttagacttcacgttaatcaccactttctgcttccgacggttctcgacgtcccatattctaagtagcagtgggaaggaaatacatatgagtggtttcagatgacctcatcagcgttcatatctagatgaatagctagtctcgatcaaaggaagagaagagagagaggnnnnnnnnnngagaggagagagaaatggaaagacgaacctgacggtactatcgttggagctcgtcacgaactctgcattattttttgggttgaaccacccagaggtaagctctgctacgtgtcctctaagaggaaagagaagtgaacagggcagaaacagtctaagctgtgtgttgcttttctttcctcttagaaacaagaggagaagaatcgaatggagaaaacgaacgaggtatgcttcatgtctcgaatgtatggatctcctttcatgtactgcgttccttttccgtcgcttaagatcgatcagagaaaacaatgagttgcaaatgattcagtgcatggttagcgaacagggtctgtaacggataacgaatcagatcctagatgactcacccaggctctccgtctctggagtaaacttgtggttgactggtaccagtgacgaccaagagatttgacccatcagaagaataagacaagttgtgaatctatcgaaagaggcactgttagtagaataatctacagaggaggttcctgtccaagccgttgactagaaataacaggaacgtacatgatacgatccagccggttcgaaacttctgaaaggcttgtagcccccgttatctggtagaccggccgtcattcctccgaaatcatacaacttgacgtcatagtcgtgggaacccgtcgagactcgagctcctgccggatcgatcgctagtgcagatacgggctttaagggaagatgagaggcgcgaaaggttagactaactaggtaagatatgctacagagggtattagatatcagtatagggctaagaaggacgcgacacgaacctttccatggtctttccaggtgatctcgtgcgagattggtaggaaatcagtttgctcttcaggacctaggtcgtcttcgtcatcttcattatcctcatcctcgtccttctcatcgggtctgtcgatcccgtcagccttgatctccttatgaacgggctcagcgttctctgacgaagagattttggctgtcggcagggttgagggaacgagagagggggaaggctctgatgggactggttgaggtttaggagacgttgccacaagctcagactgacgtaatcgtcaaagtttgacaaggaaaagaagttgaaataagtgaaagagaaggtatttccgaatcggccagtcagtcaaaagcatcaggagcgaggaccaacgcgtgacgcgtggaaggaacaataaatgagaaaggaaacgaagaaggatgagggcggaacttactgttcgtttggtctgttccagcttagccgaagtgttcactttcttggccggggcctttttcccgaacgagccgaagcccatcatcgctgcaaagtctgggtccatcttgggttgggtggatgagtgtcgcaggttgaatggagaccgaagaatggatagcgactttgatagttgagaccggactggacgacggatgatgatggatctttgttagggttaacctctccaacagactgtaaccatggctcccgattatgacattgtgtaaggctcggttgttaagaaggtaaccaagtgtaatcacttggttcgcggggtgacacttaggctctggcgattaatatatctgaagcagaccaaactattaacaatatactttggataagaggtttcaacaagaatctcagcttgaggaaaactcttatccaagaaggcgcgagggcgtccccgttttatatcaggacccctcgcgcatttggtctgccactaaagatatacatatgacgagcctagagaggctcgagatcacgagaactaaaaagatgaagcatgaaacatgcaaactagagcatgatggaaatgggcgaagaggcataagggatggagggaacgaatagcctgtaggggtaacccacgtaagagaacacgtgatacttaactcgtatccctgacagtgaatgtgtaacggtgaccgtaaagctggttacagaagataatgctgccacaaccagatagggtgaccatgttgcgcagcgaacgttcagggcttctagcgaagatcaaacgtcttggcagtctcggtccatatcacggaaccatacgctgtatattttggtcacaggcggccattcgtcaaagaggcactcgatggcgaaggcgcagcaactgttcgggagtggttaatcacccctcgcccgggaagaacaaccgagacgatctaggctgagcctcggggtctcacggcttcagggctcccagagagaataaacgtgccagattaagccaagaactagactcttttcttatttctgtatgacacactgaatgaccacaacactaacacatacgacatgcatactcccttgctcgcttacccgaccgttcagccagcggccggacaagctacttacacttacgaattaatctgatgctacagagcccggaggtcgcgtatgcgtctgatagaactcactaaatgaccgtttcctctctttcttggcccgtatttacctgatcttttgatcaacgttcggtccgtttgaccggctgtgtgtactcatacatcagtggagatcacgtccatcgatgatctcttatgttctctcttctgtgatacttctgaatgtgtatataaagcttgaacccaatcagaaacgttcttccgattcgcccattgcaccaatatcaccgtcgaatttctgtttctaaaaacagacgagagttcaatcagttgttgtttttccttctattgcccatacttcctgtgttcgtttactttgacggaactaaacctgagcgaatagtgagacaatctgttcgtatcccgacgtcgaatttgtgtacctttcttttctttccgtcgtttgattgggttgagaagagcggtctgctcctggtgataacgacggtggacaggccgttttgttttgtctcgttcgcttcttccctattgactcttatttgccctttcttccacattctttcatcagcgctcgggacctaatcaacccaatcagtcaagactttcgttttgctcttttttctccatccgtccgatcacatccgtccatctatttgttcgatccctcgccacgctctttcccctataaactctcttctcactcacctactcagatccatataattgtcaatcacttcaagcccaccaccaatgtacaaagtggtcgcttctccgaacctagaccagaggatgaagtcccacccaccactcaagatcaagacgagaactcagttggtctcgttgataactagttgtcagtgtacttagtttcttcctctctttcttctcgcagggccatagagtctgatagcttccctgttctctttccttctctcactctctttcctctctatctcagttggagccttccaggacaagacgttgatccagagagcgttggacgattactgcagaggaaagctcggaaacaagtcttcaaaagaaagactagagcagaagttgcatatggtcgaagcagttcgttctttcctcgttctctcttctctatatatactgatcttcccctctttcttgtgcaactcgctcctgcagacaatgtatgactaccaggacttgggtttacctgattactcttcagagtaagcccgcttcttctcctcgtctctttctcttttgcacacacgtttcttcctctcgtctcacacttacaaacgtattgctgtcagattcattcatttgcgtaaaacactgggacttcaatcttccaaaatcttcacccaggcccgatcaccaatgtcgtttccggaaaagaaggagaacgaacacgatccattcgagaccctgtctacgctgggaaagtactgatctgcctcctccttctttcaccttatcttcgtgtttgatatgttctgttttgtcttgcgtctggttctcgttcgctcttctgggtctctcgtcttcttggtctctttgtctcctggtctcctggtttgagtggaaggttcgcatgccacttgctttataacacccaaaatgaacaactgtaaaaaaggacttctagcctatgtcgtttatcatattttccttccaacattgtctgatgcttactatttcggctttcgctagcttaatctgttattacaacttctatttcaacatctatacgttctttctgtttttggttttcttttaatagatcgtacttccttttgtaataatatgatatgatacataacaccggatagactcatatttttatcccttctcaatgtcttcctttccttgaccatttgtctgcctgctttgttatccattactaatcgagcgagaacatgagaaaaaaacctaaaacttctcgcttcttcagagctctggacgaaaacttgcttcaaaatgcttagtatactcctcgcgttctctcctcttgaccttggtgtctatctcgtggtccgccggagaaaatgtactgcaacgaggagaaggaacatctaatcgtacaccaagcgaatgtttgaaaagaaaaggagaagagagatagaaaattcgggaccgggtgagacgtgatgtgacgtagtagagtagaacgcgacagggtgggataagatcgggggtggagtaagatctgtttttcgtttatgacatcggagcgatcgatgaaggagggaggggcgaaagtcctgggccaggagtagaaccagaaccaggagcaccgaacggactgtttccctgagcagcagcagaggaaggaggagggaaggggctcgatccgttag

SEQ ID NO: 1288 - DNA, 20041 bp, Xanthophyllomyces dendrorhous
gtgcggaggggggtgggaacggaccgcctgcttgagggaatggtggaacgggcattcttttataaatttacaacaagaaaccccatcgaaagtcaaaaagaattcagtctcccagaacgagtggagcaaccacacgaggcaaaaagagattgaggaatgaacagtaaagaagaaaaaaacactcaccctggccgccagccgggaggaggtccaggaagagggaaaggcggtcggaacattccaggaggtggcatcggaggcattcccatcccaccaccaccaggagggaatgcgaatgaaggtggaggaattcctccggccagcccaggaggtggcagaccaaatccaggaggaggagccatcactccaccgcttacaggccctttcattaatgcgatatgggccttcagctgggcttgaagatcagcctcactgatcggggcatacgagatcctcactcgtttcaccgtctttttctcggcagcctgagggttgatcccggcctcctcggccttacgttgtcggtattctttcaacgcgtcagcaggaaatccttccattccgaaaatctcaacatcgtatccatcacgaccaggaagacaattgtcaagcctggaagaaacaagatcaaacaggtccatcagcttttctgaaggtcccccatagggaatttggaagagaaacaaggataaagatgaacatacttctcgggctcgagcttgtggacctgctggatatgaacggccagacctcctgcagtgttaagctttctaggacacaatcggcacttaaagtgctttgccttttgatgctgcatcaatactttgaaaatagaaggaaagaaaaacagagaaagggcacgcgacgagtcagtaatcgatagaaacctaacttaacacgtcgcatagcgtgtaccgagctacgagcctagtagatggatagtagaaaagagaagaaagagaactgctgatggacgaacctttctcatcttcaaactctcgttctaaaaggtgaggaagaaaaaaggagaaaaaaaggagaacaagattaaatatcattgagagctgctgatacgttgatatgtatgcgtgtaaagattatacacataccgcaatagtagcaaacaggtttctgaacgagctgcttggatttggactttcttttacccataatgtagataatgtagatgatggatggatggaaaattgggtcaatcgatggaagatgcgactacagggggtgtaaatccttgatgtaagcggcgcacagctttctaacacaactatccagatagcacccatttatcatccatatccaacctccatcaccatctaggctcctccttcttcctagatctttgtttcctatctgaagggatgcaacaaatgggagatcaaacagattgggatatagactggggaaatcttaccttagtattcaaagtaacctttggaacagatagccggcaagtcacctatccgaaaggtagacgatgtcagtatgagggtcttagaggcacagtcagttcgaatgctactatcctgcctttcttcttccaagaagccatactgacctctttgtatttcttggcatttgaaaaaaacaccaccaggtggaaagactcttttctctgtccgcttcgtccttcctaatcgcatataccgatgacgatggcgatgagaatcccatccggtccgatctcgaactctctgaagcagtctcttacttttactccggcacagatgatcttggttcaacttatacctcgctgacaacttcgacatatgactcatctcttccgggaggaggatatggaggaaccggaaagatcactctaccaattcaggtcattgtcgagtatgatggcccgagtctaagcgatgtggacgtgaatagtatagcggagagcctagaggacagggagagtaaccattcgctcaccgacgacgagagtagtcatcgaagcgggagtagtagctggagcgcagaaagcagaagctttatcgaaggaagtaatggaggtcactcttacagctcatgtaccagagctgccatagaagaggattggggtcaagacccggtggacacatcagtcgatccgttcttgacgtataccggccgtacccagttcgaacatgcctaccgccttccctcggatatgtctttagcccggcctcgttcagatactctgttctcggacagtccaatttcgacgctgcctacatctcgccatccatctaataaccatccatcttcgtcctacactcttgcatctggatctacttctgatacactctcttctgaagacgaaggagaagctcgtacctccattccatcatcgcgttttcaccctagaaggaccaagaaattgttctcggatattgacccgaccagctccgcaccatctattccctcatcctacgaatctttccacgctccctccttacattccaaccgtcagtcatcacacgatcaatatggagtacagacctcgcctgagtatggtaatttcatcgatgaagagccagacatcttgttcgagcacgcagttggatatgattctttacaccaagcatccggatcatccgcaagggacagtcaagaagctttcatcacagaatcctctagcagctcgtcatctggaccagagattaatgagctaggagccagatggttgaaagagcaggaggaaatgcttcaaagaaaagctagaggcataagtggaaatctagatggtagacgtggaagtgaaaatagtgtagagggtgaaaacacacagcttggggggttggagttagaaagagacccctctggaaggttagtttgacatcttactcatctctatctttactgccatcgttccccttcctcctaaccattcacttttgtctcgacctacggaaacagatggtattatagatattcaacagattcatccaatctttcttcgaatcaggactatcctgctccctctatgtctgcttcgtccattaattcatctgcctacgaaccttcgaattctagcgcactatcttgggctcacccatcaacttatcagcataatcacgacctacatcagcgtccccacattcatcatcatcgaaatcatgcacaacatcctacccatcaccaccaagatatttactcttcctactcgccctatcatccttacccagcacagaacgattcatatggattatcccaccagtctccatcgtttagataccctttatcccaagtgcaatcgtcatcttccttacgctcggtatcgagaagagagcaaggaggaaggctcccacaaattccatttgagtcattggcgattgctgatagagatgatagcagaagggtagcggatggaggagggccatttatagcgcctacatgcaatggttgcggaacatggatgggatacatgcggtacatttgcgttcaggtcagtgaactctctatctcatcggagacgaggtttgtgtgtgtcgtcttcgctcacgagttagatttctcattcactcggttggaatgaaaatcccttttcaaaatcgaacttcagtgtggagaggcagatagccatcctgaaggacagtcacaccacggccatcaagaaagtaatgtacgcttcaatgggaagaagatcagatctcgcacatcagcacgatctatcacgtctatatcaggagatgaaggctacgatgatgctggatattcctcggatcaaaccgaacacatccaacctcactccccttcggtcgcatctacatcacctaccagttctttgtctcatcaatcacatctctcatctggtagcatggtttccctaccaccccgaaggagaggctttgagctttgcccatcatgtatcgagacgtctggggttgatcattcgaggacgttttataaagttccaggccaaagcagaagcaaaacccaaggggctcatgcgtttagggaggtcgtctgggatgatagagacggttggaaggacgtcggttcgtttgccaaccgcttatcaaagtgtcatttttcaagtgttcttcgactaactcgcttatatgaaatgatatatatgcgtagagtacgacgatgattctgtgtgttctatctgtaaaagcgtcaaatcttatgagcgctatcgatgtaagtgtcttatttcgctgtcacttgcacaacgctttcttatgaacacaagctcatcatactgttaatctaccggcttaggcgtttcttgtcaaagattcgatctgtgttcggggtgtttccgaaagatggaagagatccatccaagtcatgctttcttatctttgcctccaaaggcgggctccaagatggaaccacgagcatcatcacctggttcttcgagtgagtgctcttactctctatcatcaacatgttgtggtttactgatagagcgcgaaaaatcgttcattgatctctgtcggaaatcagatgttcaacacctaggagctttttgtcacaagttcgtgtgttatctgtctcccgattgagtaaacgcatcactgatggcttgaacaatggttttatcccattcctctccaccttgtgtagctgtctcaaaaccatcgttggccctcggtttcattgcgctatctgtccttcttggtaaggaaacgacacacttactttaagctacagactgggccctaaaagagttttcatgcctcatttcacagggatctgtgtggagtctgcgaagggctcccaatcgcaatccaaggagctcatcaagccgaccacatcatgatgaaggtatgtacaaaatccgtattgactatatagtctcatacaaatattcacatcacgttcttttctatagatcccggtcccattaggcatcgctgaagtagagcaagtgagccgacgagctagggatcagtggctcacccaagatgcccaagccatcgctattcgatcacagatggattctcgttatgccccttcagtctcttccgcatcgtcgtttccgagcactacgtttacctcccaatccccgccagtgtcttcacccccaattcgatatccaccagtcccgccgatgccaccatctcttccaccccttcctccactgtcacctcgacgacacgcacctaatcaagctcccactatcgagcgctcagctcagaaagcgtcatggaacataggagcagcactgacaggaattaagtttagaaagccacccactcagtcttcaacagaagctgggccatcaaggtcatcatccatgtcttctgtcactccagtcagagttggccacatgcggaggtgtgccgactgcgatctgagcatttctgggtgcgccatagttccagctacttgttttctactatatttatttcatataacgcaaaagctgaccttctttgtccaatatttctactgatcaaacgaacttatattcgtaactatcgaattccttagaccgagataccaatgtgctaattgcccttccgaccctttggcttataaccttgtgagtggattatcacgtttttgtctgcgtatatcttttctgaataccttcctgaataccttcctgaatccgtcttgtcatagtgcgcgacgtgcgagagaagatcttatcttattcatgatcctatgcatgtgtaagcaatcagatttgactccatatcttcttttgttaatttgttataatccattaggattaaagaaatgctcatcagaatcaacccttcacaatcacacactgaaagcttcatccgattcgacagaccggtcgacatccctgtgaagtcccttctcccccttctccccgtattatacaagaccccggcgggaagttcggttgatcctaatcagcctgcacctcctgaaggctactccgaggccgcgttaaagaacagaaacttgaataaccctacgagtccgttcaatttccgtcttttctattcttctcgaaaacgatgagacaaacccttcctcttgtttcttggctatatatgtgtatgcacatggcatacagtgtatctcaaccacctctaccaccccagcactgtgtgtgatctatgcatggtaagcatctcttcttcctcatggtgtttgcctctcctgtgatatcatcatgcagggtatcttacgtttacccgtaaaactcatcattcaacattgatttgaaaaacagaccccaatctctggaaaatggtatcggtgtgcagtctgcgaagcttcgtttgatctatgtgctgactgtcatggctcggccaaccacgacaaaggtgtgtatctccatccgtcactggctctgcaagatatctttcgtggtttctcaccttctgtgcacaacttgtgaattcggggcggtggcagatcatgtcttcgttgtgttcaaatcgaatgtggacatgtctgcttttaggtgagttttcctacgaatatatccgggctctcgttgcttcttcttctcttctctacagccaatacttcaaatctgaatgaacaatctttttttttgctcatcttttggtagagatcttacggcgctttcactttcaacctcccgtccgttcatatcccagcaaatttatttttctgatggaatatcctctttacgttcttagggttacactttgcatttacttccattcatcttattcctctctgcttcctagtatctgatccttgatggacgttatttgtacaatttcttcttacgctgtacaccattatctcttgtctgccatgctcttcataatccaagtactgttattctagaactccgcacacacgctgaatgatatacgacgaattgattagtaatgaccacgagttactaccgtcttcggccgaaacctgcgtcggcgtttaccgtcgtttttcttcttttcattcctccttctgaacacatcataccctaccgactaactacttctcctcctcccccgattatcgttctatcgatatcgctatggcaacgtcaactaccaccccaaatagttcagcagaactccctccagtgtccacgctggagggattcttatgtggaggtctagctgctgtgacggctgttaccttctgttagctgtctctcaacacttctctctttcgacgcttcttgtcttctgatcttttcgtaatcgttctttcttctctcttttgctccattccctcttcatacagctaacatcccagaggtgtgcaaaactcgacttcagctccaaggtgagctaggaaagatgactgagaaggtatacagcagcgtgtttgatgttgcaaggaagacttggaagaatgaaggaatcagagggttgcaaagaggtctgggaacggctgtaggtgtttcttttcgttgttctcaagacttgacgttcttggttcaaatctgatgtattttctttgagaactgaacagtacggctaccaggtaatacaggttcttatctcttagaaaagcagtcagtccggttaatcaactccatttttcgatttgaataggtccttttgaacggatctcgtctagggttctatgaaccaatccgtcgatctgcaatgaagcttgtgggtaagagcccggatgatcagaactttgctgtagcagtagctgcaggtgctggaagtggttgtatcggaggttggtcttcttcttttccagctatcttatctctgggcatgtactgaaaattcaccccttcagcctcccttggaaatcctctctaccttgtcaaggctcgaatgcaggtcaggccctttcaactcgctgaaccctgatgttgatatatttgtttacgcatccacgttcgtaaccaaataggcatactctcctttccttccagtcggcgcacaacataattacaagtccagtttcgatgccttccggcaaattcataaagcagagggtttccgaggaatgtttcggtatgttctgtctaacctgcaagagctaatgaggagattaagtatttgtgaggtaattctaaatatctgttgtctgaatccgctgcctctgacgtggaaacaaacaggggtatagacgcagcgattctgcggacgggaatgggaagctcggtaaggatcctcgattctttttcttcacttctgatcacttattgactccgcctagaatcatttgctaatcaaacgtcgctgtataggtgcaacttccttcatatttctttgccaagaacttgctgacagaaaacggattgacctcaccgactagtttctggacgtatctcctcagcagtagtttctctggaatttgtgtttgtgtaagtcctgactgcaccgctagccttctcgcgttatctgctgtattgaagagtaatggcaaacatgagtatacgcgtattcactctctctctttgtttcttctatcttgaaaccagattgtgatgcaacccgccgacactgtcctgacacggatgtataaccgtgcgttctgtcaatctatcttgactgttgacagtcgaatgcagtcattctgaaacccactaatgccaattaacgtacactttgcttctgccgaccttgcgcgtctttagagcccacggaggttcttcctaacgggcgctcgaaaggactgctctacaagagccctatcgactgcatgatccagactacaaagtccgagggcttcttcggactgtacaagggaagcaccgctcacttcttgagaattgccccgcatactgtcattactctaggtttgtattgagtctgttcttcttgttctgttcatagccgttactagtgctgacaatttatggtccgccctccaattgcatactacacagtcgccaacgaggtcagtcaatcaccgatttccttgcgctgttaagagagtagcccggaacaatacgtatctgatttcttctgtcttgtcttttaacacccaagctcatcgtcaaccaatatcagcagtacaaggctcgtcatgcagctgtcgaagtttagtttttctacacaaaaatgtatcatgtcaatttgagagccaacagaaagcaaagtttcgtgtacctgtctacctagcagtattgactcgcggacaagatggaaacctctccgctttcgcttactaatacttgctgtaccttgcatcgcacttaccctctccattaagaactcctttcccgaacgatcacgcttgaagaggtactatccagcagaacgggccgtacctcgatcttcataggttcgaacgggttcctaacataaattcgtccgacggtcctgtcttcctttgtgccttgaaactccagcgattatagtggctctgctctcgttcaaaccctcgacctgaataactctaataccgtcctgattcaccaaagaaatctcgttcctgtccgatggacgtgggcgcattctttccatgcatcggaaacagaatcgttgaagtgtataaaaccctgagaggatgtcgatcttcggatgtatctattcttcttcccccattctgacctcctctttcccaacacattcttttgttgatttgttcttgattgaaactagaagaacaccacagccccttcttacattctttcttgactcgtttactttcgttttctccttgaccggatcgaccacaatgtcttttgccaacaacacgagcggactagtgaaggaactgcagtgtaagccttagctttcccctcttttcacttccagttttgtctttttctctctgttcttggctcttttctcaaatttcgacagtctttctttctatccttcagctatgaaagaggtaggactccagaagtcatcgaatctgattcggccgactcctcgagggcccaaccgatccgctcgatcgttctccatttcatcctcggtctcgtcctcggtctcatcctcgacctcgtcctcttcatcttcctcctctaccaattcatcccgctccgcattcactttccttcggagcccaccggtcttgaactcgacgccgattcctatcaggctgagggactcgcctttgcttttagatcccacctcgccattcttcaggaggtcttccatgccatcgtcgctgacgaagcaggctgagactggagaagaaacaaaggtcaggaagcctatgcaaccaatcaagttccagagaaggtttcccaaccttccccgacctcagtagttgtatgatgaattctctatctatccctgtttttattcgttatatttcctagggtttatggcctccactcttacttctttgggttcaagttcagggcgtttctttcttttcctgggtctacacatctatccctcaatctcttctattccttttgggttctttagggacattttttttctttaacgaacatcccttttaaatccactattttccgtctttatttcctgggcatatatttcatccatccatcttctcaatctacagcacatctcattccttgatgatttaaaatcaaacattaatttatattgggtttacggttgtcctttccttattaactcttgacaagcgaatctagttccttcctcttccctcccttttcttctcttctttgggcttcatctcgtcaggacatccacaccgttcggagtgataagcacctgatgctcgtactgagcggatcttgcgccagccttttcaagaagcgattaaaagagtatcagttagcatccggccctgttccagacgatgaagacaagatcgagacaaaccttagtaacaacggtccaaccatcgtcccacatgtgacctccaccgatatcaccgtctttgtctataaagatttgctcgatcgaaggctcgatcgtaaagcagtctccgggctgcatgatatcttgttctgtgtttctgttatgtagtacccaaggcgggtggtgaaagactctagatattccgtgacttgtattcatacgaaaaggaaaaacaacaacaacaacgacaatagatggcatacagcgaacggcgagttagttgatggaagtgaaaaggggaagatgaaaagagaaggaagcgttcttacccggaaaagagatcagatactaggaagccttggctctctgtgaatgattctatagcttctccaatctggctgtacggtacttctggtccgcagactgagattcccttttcgagcgcttccctcgctacttcacatagctctcttccttccgaatcctgccatgtatatatcaaattaaattgtgtacaaacgtagactcattcagcccgagagcaacacaatagaaataacagccagacaaagagaggagactgactaaatcaggtagcatgaacgttgcgcttgtgtctccatggtatccatcgagataaagtgtgatgtcgagattgactagatcatgtgagtctagtggtcgactataggtaaggttggtttgcagtagtgattagtcagtctgtattttgactttgaacaaacaaatgaactgatagagaagagattcactcgtcagggatgccgtgagcaatgacctgatccaaagagcgaaaaagtaagatcttgattagttggaagcagggatacgaagcgcattaaaagtctgggatgggacggacgagctcacgttgttgacgcttgaacagagtgatttagggaaggcagaatatcccaatggcgaaggatatgctcctttagagattataagttcgtgtatgcgcttgtctatctcggcggttgtgactcctggctgggtagacgaaaaagagaacgaaacgtgagcctctggcgacgtctagcccagaatgacgtaccttaccttgaccatctcgccagcctgtttgagaacatctcttgccaatgcagcagcctttctcactttgagctcttcttccgttcctagatcgatccgaccaccttctgggataaggctgactggttcgagtggagataagccggtgtgaattgaccagaaatctctgggaacataatgtgggatgggtatatgcgcgggaacaggaaacggttgtgggaacgaagtaatctgttctttcgggggatatagcgggatgaacctgccaaactgagagctaggtatctgtcttgtcaatctcgtcaatgtcgctctcatcgattataacagcagtgaaaggaaggatgatggaggaacgagatgaagttgacagggtggaggtgacaggaaaaagacgagcgtaaccactgtggccagaataacggcgggcacgtggtttcggattaactattctgtaaccaagggtctagacctttaatttacgctccaattcttttgtgctttttttctttacctgcactttcgtttctcgttcttgatctcgtccgacttcatctttatttggtgtttcctcttgttcttggttttgcgttctttcttttcttttgggtttctcttttctccttcactcacctcctctgctggttcttcctctctcatatacacgcttgagaaggaaagaacaacaacaacaaacatacatcctttctgccgcttgtctctatctttttttcttccttctttctatatatctttctttctttcttctttctatatatctttctttctttcttgttcgcttctatcttgttcgcttccacagtcagctcgcttctatcaacatggagcgttcgccatcttccgacgttataccagctccaggtcaggtctccttctttccgtcgacaactgccagaccttctttcgtgcctcattcgtccccgaggtcatccacctcgtctttctcggcctcccctccgatccctggtctggcagagcttaacctgaactcggacgacactgcctcgacatcatcctctccatccaaaaacgctataccggccgatccatcggatccaaactttgaattcggagaagcggtattccatcaaaggcgagcggcctggcttgctctgcctgcctcacggaacgaaagaaaagagcaaaaaagccccggtcggctgggtctgctggaagaagtgttggacgagctcccagagggaaacattcccgatgatatatggaagggaggtctcgaaggagtctggaggggcttgattggaggtaggcgtgagtctttccaatccttgaacttctcttcttctccttttgattgtgctcgtgcgtgtcttgaacaatgtgtcgttctggaactctcacttctaaaaggcctagcaaatcctatgccgctcccaacggtcatcaaggtatgctttcccgtttttccttggtcatctctcgtttgtgttgaccgctcaaaaagttcccccctcctccttcatccaggttctcaaagcaggctggatcaaggatgggacatggccaaccaactatatcactggcccttcgtcctctcctccgttgatccctccgctttcagctgttgaacaacctatcatccccccaaactttgcccccatccccgacgctctctctccagaatccaaccaaaattctggcctcgttactgattgacaaataagccttagtccagtaagacaaagtatctctcctcatcgttcggacgaccaagcacagggtggatcttcgacctccatatcaagtacttcgactttcccggcttccacagttttacttggttccactctcaaataagactcttatccaatttaattaaatctctgccctcctctttctcgtctctctgctcttcaattcttcataaaataacataaactcgtagtgttattttgatcatctggcgctctagaatctctaatcttcaacaatgtatcgataactctcctctttcttcctctttttctatacacatccatattcgactctgcatcggattgcacggtctccgtctctttaccttatcatatatgagttctagaatcttgtctcatctcgttttcaccccaattcctttttggctattccaatttcgttgctattgattgtgctattgtcgagatattgagtcgttaagaagaggagaagagagaagtaaagggaaaggcaaagcaatcaaaaaaagggcgtcgtgctgacgtgttttgtctggagactttctctttttcagtctacctgtttttaaagccctttgctctttgcttttcctttatcggttgctcgcttcgcttgtctctattgagcaacgcacatcatcccactccatcctaatgcatttttacagtgatgatcatctcgaacgaaatagagatggatccggatgagaacaaagaaggagagagaaaaaacgacgtttgatcatacaagttttcgaccttccctctcgccggctcgctgacttcccttctttctcccccctctatccctctcgtcttgctacgttgcctcccagatgacttatttagtcatgtactgatccaacaagatctgttttctcctatccaataagactttgtccatctgactcttcgtcaacaacgtcggtcgttctagatccttttggttgaggatacctatccctatgaaacccactcctgctgctccggttgtatttgcgctcgtgccatgcatgaggctagcactggtgtcggtcggagattcggaatccggatcggtcaacttgagttttttggaggactcatcctcggtcggctcctcctcagaaacagcctgggcctgcccgtcatcttcctctgccgatcgttttgatgggccggtcgtcggtgctgttgttgttgctgctgttgacgatgatggttggacaggggttatacgagggaaaggagggatggattcagttgatgcccccaataggtttgataccctctcgaaccctgctatccaatctgttttttttttttttggtcgttcatccatcaagaacaaacaaacacgtacgcatatattacgcgataagcaaagaaaacgtaggtgatcgacttgaacgagatagaaagaaccaaagaacataccactctcttctcgttctctctcggcatcgaggacggtaccgtccgtctcgtctagatctccataatactccggtccttggttcctgtatcgtctaaagagttcggccctttgagactcgtctgtctctgccaccgctatcgaaacgaaaggagaagaaggggagagagtgaagagagaatattagacgtcaggttccaaagatagagggtgcatttcttcacgcgtctggtcgacgaaccttttttcgagaagagttctttcactccgggcaattcctttgctcgaccgaaatatctggaggaccgatccaaaagaatgtcaacagatggccttcactttggcttgaatttctagaagaggacggaagaaaaggacatacttgtaacccctggtcccggggacttcctttccatcctcatcaaccatagcggtacttcgtttatagtttgctccaccaagactgacgatctgtcgctcatagtgacccttttctcgcatgagcttattaatctcgtcgttcaagtctctgatttcataatcagttaatccggctagatatcggttcggcagtttgtgaaagggggggaagaagaaacaagaagaagacgatattccattcctcctgtcagaccatgattctatgcagactgaccgatggaaataaagtccttcgaggaggaaaagaaaagtcaagaggagatgttaaaaagggaggacaaaccatcctgaatctttgaaaccttccgactgatctccctcaagatctctcctctgtaccgctcacaatccttcagattatcaaccgagctcgccaatcttggtcgtctccctccctttggtctggcgaacccgagctcgacctgttgggcctctcggaatcgatagagcatcgatctggtttcatccgaaaggatgtaagaaagaaaagagggaggaaaaggacgcgttcagcctcaattgacttctttctggttcttggttgagattcagccagagccttcatcaaacacgccttctcatccattcgtcttcgtaaaccatacatttcaactgtagctgttcaagaaagaatctccgaccgaacactcatacagtcgatcttcagaagaccccttctccaactccagctcgaccgacgcgagatccagaaagaatggaaagaaaaaatagatacgcactgtgatttctcttcatttcgagcctacagacgtgatcgattgaggaaagtccccagtacgaaaacaatacaagggcaacagcgatgagaataaaggatcaaagggaggaaatcccaaagaaaatagagagagagagagagagagagagagagcacattgaataaatggatctcggatgtggaaatgccggggactctcaattgaactcaaacacataccattgttgtgaatcaatctgccgacacgtctttcttcaaattccaagctcaagcactatctctaaagaacagttctgggtcaaccgagagggagacaaaggagggggaagagggaaagattgaggaagaagatagtttgaagggcgtgtgaggtttgatggttaggatatcaaaacgccttatggccgcttgggggttgatctgatggattggttacgcctgatgtaaccacaatcgttaccgttcacgttttccttgtacacagacagacacctgatttcttggttgaagggaatgggaccgatatgtacgtatccatttatattggacgatgatagatatttatatagtgaaaacaaggtttttttaagcaagatgatgtctattctgatgaacggagagaggtacgagagagatacgagagatgaaagaaaaacgataagaacagcgcaaagaagagtacgagacagaataagtaagtagacaaagagaggaaacaacgaagtaaatgagatagttacgaaacgataacgttaccgaagaaagccaataggaccaacttttacagtatgactctaatgtcaacgccagaaagagaggcagagaagaaggagaaacatggtacaacgatgacgcagaggatatataagaacgaataacgggagacaatccgagagagccagccaaagggaacacgaaaagaagattgaaaatgaggagagaaaagagcaggagagaaagacttaatccgctccccaaagcttataagtcgactcgaccagtccggaatccccctgacggaccgacatagactgtaggcctagatcgatatcaaaccctgtgcccagattcagacccaaacctaagcccggaccgatgaggatggggacgttgtgatttgtctgttcttcgaaaggaacagttgaaaatccagcggctggactagagcgggacgttcggagcgggcggtggcctggtcgatgagccagctgagggtacgcgtctggatgaacgggcccaggggccactccaggccaagttagtggcgatggacaaggtgatagagaggaagatgaggaagacgaagatagcgaggatggtgggaagatagaatggatcgaagagatcgaccatgagtgggccggtcttctcgttctgtccaataacggccgagaatgcgttttcttttcggactcaggcgaacgacgaactgaactcgaccagcgagaactgtcctgttcgggagaacgagggaagtgactggaccaacgggatccatctggaaactgtggatgagaagcttccgggctgaagaggttcgtatgaggattcaaatgagggcccttgtccgtttgaaccggtgagcgggatgagtcaaacaaggtggacgagagagggctaggagtaggaagaaatgtcgctgtcgatgctgtcgctgttgttgtagagcaagacgacgaagaaaaggaaggaggacggggcgagggggcgaaatatgaaggctggagaacggatgggaattggcgcggtggactccgtcggtcaggaaaaggggaaaaggtctgtgagagattcgaagggggagtgagcaaggatagccaggaagaggaagttcttgagggaaggatccaaggatgattcaacgactgaccttattctggggagaccaacccttgaccaacagaccatcctcatcaccgatttcggtgacttccgaccggatgtctcctctccttgccttcaagttgttttttcggtctctggccgcgcgggcttgttcttctgatacctcagtatacacgcatgatctattgaggcgggagcaactcttgcacggatcgtcccctgaacagcccgtttttctgagagagatggaaaaatccccaaggtataagagagagagagagaggaataaaaatcgtcagaagatcggaataagacggccaaatgaaaaaggagcgttccgattaacgaagcctaagaaagacggacctgcttcgacatgaatcgcaagcccttcgaactctggtgtgtttactcgtccttgagcctgaccaagaccgaggccacgagggccaaggagaccaacgagggtgatggtcggctgccggcgctgttgtcatcatccccgtaggtgtagacacttctgagggtacggctgatgggaaggatacaccgagggaagaacccgaggatgatgaggatgatgcgatggatgatgttgcgaatggtgatggcactggtgtgagagtaggattcattcttcttttttccaaagtagagaagaaaagaggagaaaagaggagaaaagaggaggcgagcgggatgataaagcagagtaacgtgttgaggctgattgacatacaagagaacaataaaaagctatcggaaccgaacgaactgaatggataaacaaacgatataaccacccaggaagaaaacaaaaggagagaacgggaagacagcaagaaggaataaaaaaccacaaaaagaaaaaaagaaagaaaagaaaaacggagaacagaaaagaacgccctatagatttatataaacggacgcatgtatggtgttgatcaggatgatgaattgaaccctcacatttgaagagattatcttcatcattgaatgaaaaatattggagaaaaaaaatgaggacagaaatgcccgggatctattacgtgcccggcaagaaaagagccggtaagaagacgtaggtaaatgatcaagatggaagctgtgcctttgagaaagaagccgcgcatgtggcgtagcggcgcatcaaagccggccgcctatgagtgagtgcgatcaaaggtgatggtacccgcactaatgccattgcttgcgctactgttgatgtgatatgtatttgtactaacactggcaccactggcgttaaagtgatggtgtggttagtggccgtatcgctcctcttgctgatcatgttgccaatatagctgtggctactgaatcaatgacgggctgctggcactgctcatactattaccaccgagcttggccttgctgcgattaccgccaccgagttataattcatgcgactggttggtgtgatccgaggattttctccccttgaaaaggaaaaaaaaaaagggggagaaattttcaacagcagcaacgggtgtaatctttccttttgtcatacctgcctctcattctcggtcgttcccttcgatctattcttggataattctcctcgccattgctgcactttgctcatccgacgcctcgtcattctgttcacttggcttacctccttttgtcgtcggttattatgcttctttctttctttctttctttctatatccgtgctctctcgcgctgttctcattgtttgttccgattctctatgcacattgttctgcgtgttctctattccgtgccggctgtcagggatgtgacctgagtgttacacctcggtaaccttcttttggttctggtttctcctgcctcggtattccttatgctctctcattacatcaacatgcaggtatatgaccttccagcgcaggtgcttctagcaccttctatgatctgttctcttatgcataatcgttggagtctaaggatgatatataagacgggtcccctttgccacccatagcatagtctaccaagtctgaatcctttgtcattccttggttccctagtactcttgttccattgttgtatcaaccttattcatacgatttccctgccttgcgctctcgtcacagtcaccaagctagagagcctgaacttccttcttgccagccctattccctgcctggttacattcttgtgacct

SEQ ID NO: 1289 - DNA, 132067 bp, Xanthophyllomyces dendrorhous
taccctctgaacccggaccctgacaccgaccctccccatgcttttctttctcatcaatacgtagaacagcgtgggtctgtctctctccctcttcctatgcaacgtatcttaactttcttttctttctttctttttgtttatgtaaattcaacgcatggaaataagatagacggaccatttcgaccgttgtgtacacataaacacataaacacagattcttcttccggactctgcgtccgaacggagttctaaactagatatacgtccaaccagtacaatcctcacagctctcgtcctcgccttctgccacagggacatccgtccagtcccgttctctaccttttctatcgtccgtctcgccttggttccatggtttggagtatacgttatctgataatggtaaggaaaagaggcaaagatccgatcaatcggggagattcgtgattgatattgagaagagagatttaccaatggcatattgaatggtgtgtgaacgcgtcgtccgatctaatggccacccccactgaggagagacagatagatggatagagagagaacacacacacacacacacacacacacaaggcgatcgtcagcgcgacgcgataccaagaacatgataatgaatgacaagaaacaagagacatcaaacggtaccttctcgacagttcggtagatgatcagattcccctggtggcagaccgaatcgatggagtaacccgcccggccacacacgctgaacgggcctctacagttcccagtagcaatcacatcacctgtatgccacacatgtgtcactgggttgaacctcctgtcggccggtacaggcaaccccaatcgttggacagacaatctatcgggcacagcctcgaacgtcaccgtcggtaatccaaacgtcaaaccgaggagagaagccagggagcctcctaaggagtgaccggtcagccagaactgagcgcttggataaagcgagagtagagatagatacagcttgatcgcctccgggtaataagattcagagtcgtacaatccggttcggacacacatcgacaggcatgtccgcttttttcctggtagcactcctctcttctcacatccacactgctcttttgagaggccgccacaacaacagctaaacagcttgttatcgttcaacctgtccaaccgagccgtactctttcctcgaccggaatcgatcgtcgtgcctttgaaagacacaatcacggtcgagtttgtctcgtccgcgaagacgtgtcctctcatcccaccgtcctcccaaccaaatgggaccgtcaggttgaatctctcgagctcggcccatcgggcatcgccgggaagagcgtacgcgtcgttcgccatcctcgccagattcaccactgtatctagatcactcacatccggcccaattacctcgacctcttcccattctatatctttccgactatatccatccctccactcatcagtcggctcccaatcagctatcgaagcctggtcgaacaaggtcgatctgtccgttctcttccgagccgtcaggatcttctttcgcaccgccttcaaaccggtataaccaaccggagggccatccgaatgggtcgagttggatgatgatgatgatggatgtagaggtgactctggcgaagagctatcccagatggaggcctgtactctggatcggtgatgggtctgaacgggaaacacatcgatccgttccgcctgagctacagattggacttgagtttgagctaccgctaaaggcaagatgagcgggacgataagactcggtttcatttagaaacgaccgttggttcgaccaaactaaggactacggatgaaggagtgatcgagacgattatgagtgaagggatgtacagttgaaatggctgtgtagaagcaagttgctattttcttcctccggaccgaatctaatcggttatgccgatgtaacactaatacccgagatggcctaaggcatgttggacgatcctctgcttgtccccgatacatccaagaatgcacatcctctgatgggtattaatcagctaaataaaacaagacgttgatcttattatttcattctcaatttacatgaccctcctttctttcttcgtttcctctcgctcacccttgaccgagacgaagacttgagctgaaacgagtatgaatgatgtcatttagttctctcctcgggtacgcagcaaaacggtgaattcctcagtgaagagaccagcggatatcatacctggcaagaaagtttatcttctgtccggatcactcactcactcactcactctcattcgtttcgtcatgcctttcagttgtaggttctgctttatccatcggatctgccttggtccttctcatcgcctctctgtgccatttggctgacatcatcattcttcgttcgattaacagaccagaaaaagactagagtaagccccgcccaccttctcatctagcagtcacatggaggctagacttctaaatatttttctcctctcactctcgctctactctagacatttccaattatccccggattcgcctacgtcagtgttaccgggaggcatttccacttttgggcgaaggtctgttctcttctcattttctctttttccctcttccgttgccccgggaacgctccagtcgctatgccagaaaggagaaactgacttgtttgccaatctttcttcatagatgggccggatgagatacgacaagaactagaaacctcctcgactgctttagcctcaagtactctttgtattagacatggctatttaggtcatactccgttttcccctttgcccagtcctagttggaaatactcaagggcctcagctcggctctgttctccttccttcttcttcttctatacacgctactcttccgctctgctcacgctcaacttatttgacgtgttctgtatgtctataacttctgacatgtttgctgaaataagaagagtcaaagaaatccattgcgtacgtgatccacgctgggcggagctgaccgaaaaagtcaacagtctcgaacgtttggtccgacttgaagcgcaacagctcttttacctctcacccactattccctcgacttctgttcttacattcttgatgtctggacgttcttttttctcttcaatagcactcgccttggccgtctgccatgtcttcctgacagcctctctagttaatgctgccaccgtcattagtggactccaagcaggatccctaccggcgaacgcttctcagttgctctcgaacagactcatcgggttttctatcgagacagcctatgtcgtcgactttttaggtacaccggcttcaccaaacagtttggtcttgaacttgatcggtcaggttgccaatcggactggaggaatctctttcaggtagcgtatctccctctctttcttcgcccacgtcaccacatctcaaactggccctacctctgctgtttcttctctttccatccctctaggcctggaggaatcacagtgtatgtatagaaatccctccgagcagttaactcttacgcacaaaagaaaacacccaagttgatgaatttcacgtcttgcagagactcatcgatctatgagccctctttgagtgaacccctggtccggattgaatctgccaccggtgggatctaccaaactcaatacggacccggctttttcgagtcgatgaacttgcttccttcgagtacagaatacatcatggacctaaactttgggaatgattcgtgggagattgcgaaagacgaggcggaagcagctctgagtgctatgaatgggaaaatcattgctctcgagcttgggaacgaaccggatcagtataatgcggctcagaggacacccatatcgagttggggaccgcaggagtataccgaagagtttcttgttcgtcttcttttacttttccttctttccctttctgtttactttggacatgctagctgatgtgaaaggtgtgcttcttaaacctttgacgaaccagacctggtcccgcaacttgacgtcggctctaaacctgagcttaccattctttcaagcgggtgcattcggtaaggtctttaactcgaacccctttctatttttatctctttcttcgtcttttttgtgccgacttgttgtttgatctgaccctctctctaccttttctccttcctcttggtgacagcaaacgatccaacagcgtcggcgttgattacaacagaggatgtcgtcgctttggggattggcaatgattcgtccatcaagacgttctctcaacatgtccgtttcttctctcgatttgtttagagttctgtttgagtaacaatatcctgatctcgttctcgtggtttctttcatctattcttctctccggcccctcctcgaaaccgaaagatgtatcaatactcgacgtgtgattctgctcgggacgagctcgctacgctggatgctctggtcaaccacaagaacatcactggtacagtcttttcctctatttccttcttcgatccatttattattgaacacttagcgtgatggctgacttgttctggagataccttcaccatggttcatgcatgatagcatatgtggatttgtggaagccacagacggcagctgcgaagagtgtaggtgccgagttggtcattggtaggttctcgatcgcttgcccgactgctttcgttactgcttctttattatcgagagtcaaaacaagaacaaggaatataaacgtctttgcacttgtacttacttaattctctgtatctgaacgcaatcaaaaggcgagtttaactcggttagctgttcaggaaaacagaacgtatccaacaccttcgggcaggccctttggtacgctattctccttcacttgatcagaactctacacaaccaatttgtcattcgagacactcattcttgacggcctttgttttggaaacatgtaccaaatctgatcttgtaggctggcggatacaatcctatactctgcttataccaacatttctcgaatgtactctgtatgtctcgtcctatcctctctatctttgtctttctacccttttgttttatattttcttttcgcagcactcaagatgaatactggttgaaattctagcaccaaggcgcgactcttgtcttgcagtcttccgatcaatcaaacactgtcggtttcagttggttcgtcccccccttgtccttcttacaaccggccacgttttttttgccttcctatatccgacccaactcaagccaacatgtccttgttcttttcttcatccttataggtacgactttgtttacccattgaactctactcgaaacgggccatccagatcaaccccatcttttgtcagctacctcctactagccgaagcaatttcctccacagccaacacttcccagataacgtacattcctttggaagagacataccctgacttggcgatctacccgatttacgactcggctgttagagacgtcacagtaggaccagctcggatggtcgtccttaaccttggttctcaatccgatctgtccatcaatgtcacttccctcggtttcacctcgtcctcgggcacgacggtaaagtacatgaactcgacaggcggtccatcatccaccgttacaaccgaggcgacctgggccgggcagagctacgagtccggcctacccgtcggaacagaagccgtctatacactcggatcagacggtctggtcgctctggatgcctaccagggggttcttctggttctgaatggaaactcgagtactagttccggttctggctctggtacgacctcgagtttggcttcgccaacggcgacaaatcttgggtcgggtaagagtgaggcaggaaggaagatgggaggaaccagtactttgtggcttggtggtctcgtttctgcttggattctcattttcctttcctgatcgcatatcttttaatattcatacggacttgctttgtgttgttttctttctgtgtttgtttgcttgctgtttatttatattggacaatttcccttctttctcatcttctctctcgtataccacacacattactttggctctcttttttttcctcacgctcatttctcatcacaccctcccaaggacaagataaaaatcatgtcatgttgaaatataaagacagtattaaagatgaaacgtgatatatggtttataggagagaaagggggatatttctaaatctagttcttggcgctaagagcatcaactccaggaaggaccttaccctccaagagctccaaggatgctcctccaccggtcgacacgtgcgagagatccttctcctttccggcgttggcgacgacggtagcggtatcacctccaccgacgatcacggtcgaacccttctgggtggcctcgatggcggcctcgaggagggaggaagaacccttggcgaaagcagggaactcgaacacaccggcaggtccgttccagaggatggtcttggactcgagaacggtagctcggaaagcctcctgggacttgggtccggcatcgagacccatccatccgtcggggataccctcggaatcagtagcggttccggtctaagagggagttcatggtgataggcacggttcatgagctgtgtgttcaaagcaaagacgaggaaaagaaagaggaagaaaaaaaaaagagcgcaccttggcatccttgtcgaacttgtcggcggtgatgaaatcggtggggaagacaaccttgacgttgttcttcttggccttctcaagaagggcggcagccttctgggctccggcctcatcaaagagagagtctccgatgctcatactctcgacggccttcttgaaggtgaaagccataccaccacagatgatgagggagtcgaccttgtcaagcatgttctcgatgagctggatcttgtcagataccttggcacctccgaggatggcaaggaaaggtcgctcaggggactcaagctagacgaagaacatggtcgagtacttgtcagttcatatcgatcgggactggctcggaaaaagaagcaacgggatgaaacgtacagccttggcaaagaactccaactccttggccatcaagaaaccagaggctcgctgggggagctcgactccgaccatggaggagtgagctcggtgggcagttccgaaagcgtcgttgatgtagaccgttccgagcttggtgagggactgtcggaacttcttgacggcttcaggatcggctataaaggaaggacagtcaaacggagcatacgcatgaaagggggatcagtgttttttgaagagctggaggcaattggggcattggcgaaggtgaataaacaaacccttggtcttcttgccctcagagtccttggaggaaccctcctcctcggcgtagaacctcaagttctcgagaaggaagacctgtccgtccttgccggcggcaacggccttctcggtctcctctccgacacagtcagggaggaaagtaacgggtcgctcaaggagggactgaaccttctcggcctgtttatggcagatatgtagtcaggatgtcagcgctgtgtcgtgatgtgataaattcaggcaaagacaactagagacgcgatctgatgagatgaggagaacgagaggaacgaacgataggcttgagggagaacttctcgaccttgtgtccgtcgggtcgtccgaggtgggacataaggatgacggaagcggcacctagaatttaacgaaaagccgaacgagttttcgagtcaggtcgaagaaagatgaatactacagaaagaattctttcctttcgaacgttcatatctctcttcggacttgtcggagatcaagaagaacgttcgggaagaaaagagaaaacatctagtgaagaatgtctatgacgtaccctgctcaatagcgtacttgacggtggggagggcggcgacgattcgctacagagacgagggcaaacaagaaaaagagagagcgttagtaactcggacgttttctagctcgttggcaagcctgtgttcaagaggtgctgggcttggccacgtttgagatgattgaagatatcatccgggagggagaaagagagggaaacctacggcagggttggtaatctctccggtcttcttatcctgggggacgttgaagtcgactcggatgaggactcgctctcccttgagggagacgtccttgatggagagcttggaagaaagagacattattctgaggaggacgagatgaaagatgaaccagattgatgagcgaagcctcatcggggagcaaaaggatatgtgtaggagtagaacgatggcagcagcagaaccaccaccagcaccaccagcaccgactacaacctagatgaggatctagcctacgtacaagatgagatgagagagtgtatacgagatgtgatgggttgatgatgtgaggtgatgggtgggagaaaaagtgaagagaaggaaaaaaaaacgtaagaaaaaagtatgggaatttttatacttgaatttctatctaagtgttttccccaaggaagaggcggcagttggcacaccttgttcgagaagctgaaggaagcgcccggagcattgtcgtcgagggtggcaatggaaacacggagagagcggggccagcatggagcatggagagaggatggcacagtaagaggacgtgtcaagaggatgtagcaagagagagaacggccaaggagatatcggagggcgcaacccgtggagtgatacattcaccagattgttctacacgttctattacagcatacacacatattcttcctctttctgaacaacgtcctctcatcggatcgcatctctccctctgacttgtactgatcggatgtgtattccgttattccctttactgctcacacccttacatcccgacggacaagggaaaaaatccggatacacctatatgtcatatatctaaagagagctgattgcttttatgtctttctcttcattttcattcttttcttcccttctctgttcatgctgatgacgatccagagtcagtcttgatttccttcgcggccgctcctacattgaacctcttgttgagatcctcataaaactgaacccggttcttgatcgtccccgggagaccaatctcgattccttgtccctccttggtggcagtgtgagcaaatgggcggagctgcaggtcgaatgaaacagtcagaaccaaatgaaaacggaaatagttcagtgtgtgttgaggattaacatgatgggatatgtgtccttggagatgaaagcgaaagacccaacgacagcgaatcgacagaagcaattctcatcctctcccacaaccgtttgtggaactcttttctctctctatattgaaggaatcctggacaacacacagacaaaagccaaagagcgaaggaaactcacatcgctacacttgaacaccgagctgttctcactctcgaatccagggccgataaagatcctgacctttttgtcgtcaatgataaagtttgactttccggccttacccctgtagttcgcgtgtcgaccgggaggaccggtcctgaaacctacaccttccgggaaagactgtctgtttcctgcataagagagagaacatttaaagaggatgtaaggattagtgagcggtctgacggtagagaaagaagaacagagtccaaagagatccacagagcgagagaaaaagaaaggaagaagagaaaggggaaaaaaattcctacaaacccttatagtagtctttgttggcatgcttagacttcagagggaaccgggaagctttgctcaatgcattcaacgtgggtctcatcctggctacgtcggttgatcgatggtcaatggcgaaggacaagtcgaagcgatcaaagtgtaggcaaggtgttaggtagaagcaaccccaagcttgttagggttaattcccttggctgcccacgaacacgctcgcgtacacgcgtctcttgcactttaacctccaatcttcaatcttccatcccactacccgtcgttgccgtcattcggagtatcgtgtacccactattacactcctggtgttgcctctggaattcagactgagatatattagaggtccagatcctgcttagtatcctgtccgtggcctcctcacaaagatggaaccctcgccggcctactccccagtgatcactcagatccttcacaagtcatcttcctcaaacgatctgccctcggtgtccacccttcatggtctacagaccgatctagatcaactacgagccgcagctaaacgaagggttcagcacatcgaaagttcgaaaagaagactagactcactccgggatagagatgctgccagagaaaaggaagccgtcaaggaccgaaagcaaaaggaggcgaccgagaaggaaaaggatcggctgagaagggaaaaagaaaaggacagaaaaaaggaggttgaaaggaaggagagaaaggagagagagagaatggaagaagaacaggaagaggaaagactagtcgtcaagagggaaaaggatcagcagcagcagcagcaggaagatagagacaaagaattggcccagcgagcgaaggaaaaggaagatgcggcccaagcggcagccgctcagatcatggcgagggattcagctcgacagtctgaaagacctaggagtccgtcgttgcctcctcaggtcgtcagacgatcgactcggtcgcgatcaagatcacaaacacccgtgccggatatctccaaaccggtgacccaccgggtcaagctcgagtctggttcgccattcttccgtatctgattctatcatcacgcttttctaacgatggatttcttgttcactgtaccctaggagcgatatccattcctcctgtctcaccaagtgcaggcatgtcccagcctaacgactcggatatggattctgacgcgtcttctaccgtggtgggtgctcctaaaaacaggttcgagtatcctttcttctctctctgcatcaactctatatggtttctgtttgtcttacgcgtcatctattttgtgtgatatcgcacaggaagaaaaagaggaagcgagagcagctggtctcgagtgatgcagaaggagaacacgagctcgttgtgcgaagcggtgctctgtcccgtggacatggtgattcctcaggcaagttctctactcttttctcgtcatactcgagacgcgacatgctcatgccaatctttcctttcttgatatcaacagcggacgtcggtcggtctagagagacttcggtgactaagccgacgtcgacaccttcgatcgtcacaaagacttccccatcagctccaggaggatcgatacacctgacacctcctgtagctcgaccaaagatcaagctgatcaacggctccaaccgagctatttccccattagcgaccgtctcttcgagttctacacctcgccacaaagcgaattctcactctccctgccctactcaagatccttctcttctcgccaccgctgtcaatcctacttctatcacttcttcttcttcttcttctttccttcatcccaatccctccaaccttcctggctcaaacataaacttttcactaccttctgttaccgcttcaaatggttcagctgtcagaacactggtccctccgaaaccagagattcaaaaaccgatgacgcccctgccgacgacacaatccgaggtgaacgaggatttcacccaagccaaaccgggaactcagctgttgttcgctacattctggcagacggccgaaggctacgtccgaccgataggtgaagaagatctcgcctttttgaagacatacaaagaggaagacaaaacgcctttcgatgttcccgcgttgggaagacattactcagagatctgggaggaagaagacaggttgatcgagctgggcttgcccctacctgatccgagctctacaggagggatgatcaattcgcctgcaaagatcaagacagaggacattcattcccgacaggatcagtcgatgatggatcccaacgggtcgagaacaccaaacgatgctaacggagccaccgggctgataacatcacaaggaggaccgaacggggtgaaccgaagcttagactacccacggatgggtagaaagacgtttcattataatcccagacgagatatgaaggatgaagatcttgtccatcaggatcgaggcgaaggaccgctcatggagagagtgctgggtggattcttgcgagtccctagagcacctagtggggggcagagaggagtgatgtttgaggagaaccaaatggacgaggatgatactccagaccgtaggacggatgatcggacgaaatccgaagttgatcaaccctcggaggacgtcgggttgggctcgttagaggacagggtcaagaaggagttgatgtttgtgggactcttgggaaaacaagaggtgagtaccgggctgagagctcgtttcttttttgggtcgtgtttcttccgctctcatattgaatcaatctaaattctcctctctctctctctctgtgcgttatcaacaggtcgattggtcccaaagagaggatgacgagatcacgacgtcactccgacaatgccaaaagctgttaaaagaacaagtctcgctgaacgaagcgcgccggtcgattctccttgagattgcgaaagagcgattggcttactctgaataccaacaatgtctggacggattggaccgaattatcgatacctgttgggccaaacgagcaaagcagattgcgaaacagcaaaaacgaaagaaggaagctcacaccgccgccggcggaacagggccatccggtggatctgcctctggtggtgggactggtgggggaaactcggcaggaccggggacgtcaacgatgacaaagacaaaagaacgtgagcgcgaacgggacgagcgggagaaggaagcgacgaaaaagttggtcgagacgatcaagctcgccatgggaaggcgaaggctgatggtcacccatctgggaacgatgttcaaggatgaagaagaggaagaacctggtagattcatcggtctcccggtcaggagtgtgtatgaaggactagaggacgagttcaggcaggtcggtctggaccatctggtcgagaatggagcgaagccgaggcgggtgatataggcttgctcatagacttgtctctctgtttgtattcatctctctgtctctctgtctctctatctcttcctctctatacctttctatgtgtctgtctcgccctctgctctcgattgtacatatgtaaaccaacatgaatatgtttctgtacgaacgctgcaacgtccatcaccaggccgacgaaagccgaagcgtaaccaccacttccctggttacggttccgtccgaggccgctccctcttgaatattcccagctcatcccaacttgaacccaaccaaccatcccacagccggtcttctctctcatccattctgttctctgcaatgcgtatcgcctctcagcttctcaaggcttccaagcccattcaatcgttcgtgtctttgctttgttttctttgttgtttgggaaaaaaaagctgtctccttctcgagcgttactcgtactaggacgtcatctctcctcacccttttcatattcgagccaatcccgcccatccggttttcaaacccaacagtggaactcgcatacagatgaaagaatcaacatttaataaactaaactaactctgctcttcctcttgttctgttctttctgctcacacacacaattacacacaaccccaggcatgctcttttggcttccaaggtctcagctgcctcactccgacagttctcgtccagcttagtgttcaacgctgagcgagtcaaggttcccaccatggccgagtccattactgagggaaccctcaagacctggtctaagcaggttggagagttcgtcaagcaggacgaggagattgcgtacgtcctctttttttctttctatattgttagtctttcttcaagctctgatggggatagagtcggaaagtcacggaggaagaaggaaaaaaaaaagatgggaaaaagttgatgaatgataaaccggcaacggagagcgcagccggaacatctgaatgacccgctgatgtgaaagcgacagaggggtctgctctttgatactgtttgggttcatccttttttttttctttcacaagaacggaacgtgtcaagcaaaggtctgagatcttacgagaaaaagagcaagatagagggccgtttgggaactgggaaggagggcatcggcagatcttctctcttgtgctcaatcaacacattcactaacctctatgccatccttcgctgtccgttcggcgtccttgctttctacaacagcaccattgagaccgataaggtttgtcttgatctctactagcgtatctatcatccaatcacctccgtttctacccgttcgctgatcttgattagcttgcttttaaaaatctaattgtgaccatttcttatgatggctattctctacatagatcgacgtgacggtgaacgctcctttctccggaaagatccttgagcttctcgccgaggaggagtcgaccgtgaccgttggagaagacctgttcgttttggaggctggagaggaggaggctggttcgtctttcctttgtcccttcctttatcgatcgttagctagtcgacccagccctttctctaagagcgtttcatcagctaacgcgtgaattatcgtctgtcatcgttttctttcttctgcaggttcgtccgaggctgctgccgagccccccacgtcttctgcgtccgagcctgctaaggaggccgagtctggtcccaagaagaccgatggtgagaaggcccccgagccagccaaggccgcccctgccgctcaggacaagccctcgtcgcccaaggagagacaggagagtgcacccaagaaggagagcccgcctaaggccaagaaggaggagaagcctgtcgaggaggccgtcaggggagccagaaccgagactcgagttagtcctctttctcttttctcttctctattacattccattccatcaaatcgttctttctgttgacgtaacctccgatggatcgttgtctcgcgtaaataggtcaagatgaaccgaatgcgacttcgaatcgccgagcgactcaaggagtcccagaactctgccgcctcgctcactaccttcaacgagatcgacatgtccgctctgatggagttccgatccctttacaaggaccaggtcctcaaggagcagggtgtcaagcttggtttcatgtccgctttcgccagggcttctgtgttggctctgaaggagatcccggccgccaacgcctcgatcgagggtcctaacggttcgtcgatcttctttgtcctctatacattctgcctttgtgatgtacttactcaatgaaacctgctcggtcgacatgattaaattcaggaggagacaccatcgtctaccgagattacgtcgatctttctgtggccgtcgccacccccaagggtcttgttactcctgtcgtcaggaacgtcgagaccctcggcttggttcagattgagaaggccatcgcggatctcggagtcaaggcccgagatggaaagctcacgatggaggacatgtccggtggatcgttcactatctccaacggaggtgtcttcggatccctcttcggaactccgatcatcaacttgccccaggccgctgtattgggaatgcacaacatcacccagcgagctgtcgtcgtgaacggtcaggtcgtcgctcgacctgtcatgatcgtcgctttgacctacgatcaccgattgttggatggaagggaagccgtttctttcttggtcaagatcaagcagtacatcgaggaccctcgaaagatgcttctttccgccttataagtagtagcggtcgcagtaaggggagtggaggagcgcggtcgaggtgatgagaataggaagaacaggagacggctgccggtcgattgtgatgatgttgttcaggctggttgagcgggcggtcaggagcgcatggttgaattttgatttccttttccattgtttacttcacacgcttctattcatcccactcgaattcggttctttctctctctaaacgtccacaatgtatgaacaatatgattgcctagatatcagtccgcttgccttcttgtgacatagagctctgtgtggatgtgtgcgattgggcccaaacgaggtgacgaagttaacggctttgtccgaatggaggctgaccgtctacgatttacatcccaaccatcacatcaaccatcaccgcaactgccgcttcatcatgcttgctacaaacacccattcatcaggtctaacaacagcacaaacatcaacaccaacatcacaagtcaactcgtctacacatccaacagctccatcaggtctatcagcttggacgtccagttcgggctacgtcttcccgccgatctggtcgtttcctccattcttcacgtaagtcagactcctcataatttcttctttgtagcctattcgtcctctcccaagagcagattgattctgaagatctgtggattgacgattcgatgcatccgacgtatatatttctgtccgtttatgacggaataaagtcaacaacctaacccagagacatgtcaacatcagacaaatctatggacaaacttgatactctcctgggcaaggtttcacagggtattcgaaattgccgtcgacggtggatccatctctactggaacatccataggagctgagctaaacggagtgggggaaaatgcaggtgtaggtacagcgacgagaacggggacgaggacaggtggaagggtcggggtttgggagaatgaaaggataaagagaaaggtgggcagggatttcgctagggttttgatggatgctctagtccggaatggtttgtcctcctttccctttgctctttctttctctgtccctcctctttctctgcgttcatcgtctctcaccgaaaaaggaaagcacgaggacgtttgactgactatcatcgttttacctgagggccaaaaggacaggcatcggtaatctcaccagttcaaacatcgaaaacatcaagagaacatccaacggccgtccttctctactggctcaaaccggatgagtgggcgtcgattctatattcatgggtgcgcatcctatcagctctccatcttctgtcttaaagaactagtctccatggactgaccgagatgtttctctttgatcgggtttgggggtgttgatacagatcgtggctaccggtcagacgaaatccatcttgacattctatgatctgcagtcatcagaaaccggctctcgtacgtttcttttccccctcctccttccttcgtgattattgactgatccattcattcaatctcctatgtcacaattaaacctcgaaattgaaacggaaacattttctccaaagcggtacatgacctcccattaccactcctccgatcggctctccagatcctcatcaaacaaaacaaagcacaagtgttcaaatcaacaggagaagacggcgaaactgatggagagggtgtcaagtttgtgtagcaggtttcttcctaggaatactgttattaatctcactatgatgttcgcggatttccctgtgatgtgtgtaggcttgctgtgcgcgagttcgactggttagacttggaatatcaagtgaaggagggcggccaaagaacagttcggacaggcatcctttccatcgaatgagtagaaaaccgagtgataaaataaaaagaagaacgaagacgaagagtaagcccaaatagaaaaaggaaaacagagaccaatccgagagaaaatggacgtgaagagtattcgataagacacgagagtctaagaaaagaatgtggtctaaatgagaggaagtttatgacttgactttgatgtgtatcaaccgagagggtatatatatagagattaaggacatttttttccagaatgaaaggacgtcacataatagggagtttagagacaataaagaggctagctttgtatttggacaagagacggaagagaggcgagaaagaaggcaggacagggcagaagaaggttcagacaagataaggcggtctatgatgaagcgtacaccttatagttgaagttgtactctgtcgtcgtagctaatcgaaccaaaaagacacagcggagatctagtgagcaactactcaaacgcaccattaaacacaagacaagggagaagaaaagcaaacgcactggcaaacgtgtagttactgggcgagtaatctacatacgtcgacccacttctggtaaggacgactttcatcccttgaccgccaacgagaggagaagcgagcgaagatattcctgcgttgacagagaacgtagtggaagacgtcccactggaaagagtcacggtcgaaggggcagtggcgaagacaagggcgaagaaactgttgatctcctgtaggatcgtaataagaaatagaaataaaaaaggttgttcagtcgatgtaccgaagaagataagaacatgatggctctcgagcaggaagaagaggctcaccgcagtatttgaaccagaagctccggtttgtgtgagagtaggaggcgcaccggccgtatcagcagtagcgacagcagtgttgacgtgaggtcgagccgacagataaacctgtagatgagttggccccccaaaggtaaatacacacgtcatcagctagcgaacaacggtaaaaacactttgtggattaccgaccttatcacatgtgatcgcagggaattttccagtcttgaaagcagttgtataataagtatttatagccaagtacactagagagaggccataagaaatagggcaagtggttgagattcttgcggttgacaaagagacacagaagagggaaaagagagtgattcaccttgatgatcgaatccgtcgacccaagcttgactgttaggctgcgctccgtggataggtcccatgtaatgagattcaccataatcgttccaagtgatctgttcgaccaagtcgaactgatctctcatcgagatcagttgttgccatcgaagagaaagcggccagttatcggattgatagatccagttcttgttgtaactattcacgccgtaatgagtgaaaaataatggctacaaagcgttggaaggtcatgttgagtgtgttagtccaacaatgaggctttcttcgaagaagtgtatacgtctcatcacgaggagaggggagaaaatatcgttgaagaaagaagagacgcacagagatggaaggcatataggtctttcctttagcgacagcgttagctatccaagttttgtccgaactggtcgtaaccggattggcatccatactccaagcactattccagttgaagatcccgtcgtaagaggtgtagctgtcaaagcctgagaagaatgcaggaaggaaatacatctgttttgggttcgtaccgagaaaacgtagtcagtataccgagtttgcgcgccatcagcaacaataagaatcatcaggacttacagaaacaccttttgcagaaagaacacttcgaaggtttgtccaagcgccatccccacaggattcacctgcaaaagttgagaccaagactttattctggtaataaaattggttggcattggcggcataattcgagatcaggttggccatagtgctggatatactgccgcatgaccaaacgctatgattggtaaagatcaaagaaatagaactagtcaatctaaacatcgcaagaaactgatcaggctatacaaggattcttctaggacgaacgacatgtctagactgtagaagggatttgatccagccagacacactcaattagaaacaccatacgttatattcgatcggagaatgaggctgcagcacttacgagaagaacagcttgaaccctttgccatgagctgcagcaactttataagcggacgcgacttgagttatttgccagtcatccgtcccgatgttcaaagcaaatgcgtctactccagagttgtacgccaacgtgctagagggaaaaaattacagttcagttaggatccgatgataagaagaaacgagacgaaaagaaagaagagtcgattggcgagagggggaacgtacatatcttgtaaccaatctgattcggtgtaagggtatgtgttaccaaccatgaagtgagaaattatatactttgtcgaactcgaggaaggagcggacaaagtaggcgtgtaagaatttgttgaggaacatggtcctgttctggcgttaggaagtgtcggcgggattgagaatgaatacgcagagagtctagaaggaggggttgatcagctaaaggataaagagaagaatccgactatgagtgatacaatggtaaaagaatgttactaacaagtatgctcctccacagatttcgctagagttaccagcgcaagccgtgctgcaacctgaagcggcgactcctagcccagacgtgaagtcgtttccgcaataacactatgaacagaagaaattccaacatctttcaaggcccatacttgacataacatgatgaagaagaaggagagaagaaaacggatgatcgtacctgacttccatattccagacccgcgatggtgtagctcatacttctacaataaacctcacagctctcgattgtcatcgaactcgtagaggtcgacgccccagtcaacgctctgctcgatccatccgtcacacagcctactgaggtccaaacggtagaggatgtgtagaccgagagtaagtaggatcctccacatttctgagtgccgtctccaccgcagatgctgttacaattagaagaagtcatgagtgaggcggaggaactgagggtattgccacagtaacattcggtcgaatctgtcgttgatgccggtcaggaaaacagaaaagaagaatgaggacacaaagaagggagaagagggcccaggaagaaaaaaaggagaaagaaataaaaagacgtacattccattcctgcgtttgaataacctttcgagttgcagagtgcaatacaagactgaacggtcataccagtcagaccagtcgcgctgtaatctgagagagtccgggttgctgaatccgtgtagcaacccaagtaggaccagccagcgacattagggatcgagttggatgaagtcgattggaagacagttaggaggtagtttccaccacctggatcattcatgtttcccgagatgtgtagaattgagaatcagagatgtgattacttgagacagatgccatcaattgaagagagaatctcttacaagcttcagtggcgtttgctaaagcgcaaagagacagaaaatgaggaggaaacttaaagtcaatatttgtcctgatagatcgcgctgcatcagcttccatccgagagaagagaactgaccagcacaagacgcggtacacgacgcgtcacccactatagtctgcgagttagagattccatatccacagtctgtaggaaacgaccatacacatgcattcagttaccaatcaatggcgagtatgagagaaagagaacgcgaaaggctgacagcattgatacgaatctgttgaacacatcggatgaaaaagcgccgaggtcaggccaatcgatctgtatgaaagtgaaggcaggtacgtagagagaaggcgcttacattccgttccggaaaaagtgtatcctttagcaagacaagtggctgcacaagccgcgttggtcattcctgagatgtatcacggaagggttctgttgtatcagcatcttgtgaaccccaatgaacgggggccagaaaagaaacgagaagacggaccggcggtatcggaatacgtatatccggtcaacgctcttcctgctgaagtgtcagacacacaaccataataagttgtgcccgatggggcgctaggaacggacacaatcgccttgtagaccgagatcaggtaagatccgccgcaagtctggctggaactacctccgcatgcagatgagcatgtgcccgcagtgagggaagaaggaagcgaggaggcgcagtctgttgtgggagaataatagaagaaacagtcgggacagaggaagagggtttatcaaatgatgaacgagcgacgttaaaattagaaggacaggaagagcgtcaagacgtacaacactctgttccatctagggaagaggaaaggaaagaaacgagaatgaacacgtttcggcgcgaaatttgtcagtaaccgatgatcactataagatattcatcttgaagagcactgcaagaagactcacattccattccagcgtacgtatatccagcccgaaagcaatacgacgtgcacgaatcgacagctttgaatacacgcgcgagacttgcaatgagcgaaggcatacgtctgaacagaggcaaatgatcgggcttactcaaacttgaagattgtgtcttgatagttcccaacactctgcttgacgcagaatctacataacacccaacaaagttgtacgaggaggacgtggcaattccagttgacgtctccttatacagatttaacgcataagatcctccgcaggtcacggtagtgttccctgtgtgtttcgttcgaccgaacaaggtcattcgtgcgtgtagaaagagaaggtcatcgttggtcagtttggcagctgaggctaaggatatacagctgtagaaacacggacctccgcatggagttgtacacccagaggaagcggtcgttccttgaccgtttgagagcgtgtttccacacatgcactgtgtgtaatctgggagagaaacgacttcaacaagactgcaaaacaaaggaaagagacaacacagacgcagaggactcacactctaagccagcgtagatgtatccttgggagagacaagtggccacacagagctctggcgtcattgagcttgaatcgacagagtagccggtcaaagctctagctgaaccatcggtcacacaaccctggcttgtccacacggtttctccagaagagatcatagtaggcggactagccgacgcccgtctagagagcgtacggctgattcgagttgagtttccaaaggaaagacggggagggagaagattgctgatggaggatccctggtggggttgtcgtcgaggaccgtgggtcagtcttccggtgactgacagaggaaagatacagagcagtgagagaaagagggagaggtaggggagcaggaggaaagattgcatggtgcctgttccgatcaaggccagatgaggaaagggacaatcaggaaaggagagtgggccgatagaaaggaaggtgtacccagagcaaggtaatttgccgaaaacgagtgtggctagtttgaaggaaagcgaatgtgtgttgtcggaagaagaggaggagggaacgaaaccaaaggaagaagagagagaaagaaaggaaggaaagagtgctgatggaggtgaaagattattccgataggaacatgcgaaatgaatagaggacgaagaagactcgtcgaaaccagtccgatcgagctctaccggatgtacggatgctagcgagggtgctgctgatgatgatgttgttgttgttgttgttgttgttgttgttgttgttgttgttgttgttgttgttatctgttgccgaagctgaaacgaggaagctgccaggagacggagaaggaggatagacaagaacgggaagagaggagaggagaggaaaaaaaacaggtcaagatagaaggcaaagaagaggagaaaaaatgatataaacaaaagaaggtaaaattggcgaggcgttcgggcttgcgagaaaggatctgactgagccgaagaagaagagaacgaagaacccgaagagactgagggatgagacggatgaaatccaagatgggttgacccgtcaagatatcagccggcaaaaggtcgcttgtcagatagaacggaagtcccgacaaggatgtttgatattcagagcgctcaattagttggcacagaagatatcttcttcggcgtgctcattagctccagctttgattagttctctctttccctctttcgcctctctgccgaggcttgtgtttcaagaggaatgtctgtttgagtgttgaacgagaagagacacggataaggttgttctagtcctatcttgtcttgttttgatgttttgatgttttaacgttttaatgttttttgtccgcctcgtcggagtttttccttcttgggtcgatcactgcgctaaattgattccatcctctcgcgttcttctgagcctgctggttctgcgttgttctttccgaagagaagagaagagaagagaagagaagagaagaagtagaaagaaaacatgtcccgagtatcagaggccacacattaatcccgcctcgccaaaccaaaccggcctgcgaatctgccgacagagctcgtccagccgtccttctttattttcctatctcccggctgttctttcagattcggagaccagcccatccatcctagatcagtcttccggatcgtccgaactttgtggttcttttgttcgttggctgacaacggtcgataacgagaatgagaatgaggccgagattgaaagcgggaaccaggtcgagatggacgagggcaaagctcggtcactgttgtcagctccgtccccgcagtatggacaggaagctcggaaataaacgccgaagagaaggtaactttagggagaagcgacgttgattttgacaacctcggttggctacccttccttccggccctaggtctgctgtcgatctccgttgggagaggaggtagaggaggacgagggaacggtagaggcaccggtgctcgtgcaggcgccggaatacgcccatgccccgaaccctgaagtttcaaatgaccacaggctgcagaaacatcggtattcggaggaaaggtattcggttggagaacgaagtcttttctcgggttatctagattcgcaaaacacgatcgggtgatcggcctcggactgaatacttctgtaccctgaacgggtgagggagtggtcgagctcgagatcgattttgaccggcacacagcaggactagacttggatccagtcaataatgtcggtggtgacggtggtgatgataaatcctcatcgatgatagtagtgttggtactgatcgaatcagagaacagcgaagagaacaaactcgcatgcgaggcgcacgtatggaatgaagaatcgtcgttctcctcatcaattaacacacataaatgaaaagaaagcgttagtcttaaacgacggccaagagcgttagaaacaagggaaaacaaataaaagaaggcttccatacaagattgtcttcctctttgaatgtgaaatcaagtataatccgctctttcgaatgtcgaggaatcccatcaagatggaaccccgactgatcaagcgctccaagtcgtagaagactactcatcctcaatttaccaagtatgtatggagtgaacgagaaggagaaaggatgactgaatataggaaagaaggacaatgtccactctgtgatagatcgttcttctcttttttatccctatcatgtcttcccgtttctttcgcctgatctgaatgatttttctttgcgggaaagtcgaagttgaatgactcccgtccaaaaaagaaaacacgacattcccgtccagaaggcagtaaagacagatccgagagaaccgcctcgagcagatcccataggacgggacgagcccgcatttactctttcctgatccttctttccttggctcagacagcgagagaaatgagtgagaaacacttgatcacacggttatcctgtgcgtatcccttcgtattctgtcagcgagatttctgacttcagaaaatgccgcccgtttcgctcaaacatcttcattcagatttatcgttccagaacgaaactctacacggaagcatgtctcagacaggcttctgataatctttcaaagcttcttcgttccagctgaggaatttaccgctgagatccatcggtcctcctctagctgccagcgccgcaaacacatatccaggactagaggtgtcaatcaaacacacacacacaccccatatcagaatgaaccgaacaatcagtctcatcacagtaacggacgatagatacaaagatacagaaaggaaagacagaacgtaagaagggaacagactcttcgggatcaagcaattcgccctcagcatacaatcgttgaacattttgataatcctttggagtcatgcattcctctcctgtcgatcggatcaaggtttgcatctaatcatgaatttcacacccgcaagaaaggaagaaccagattcgatatgtatgtcaaccacgagataaactcgaaaagggatgacggaggcaaagagagatagatcgtacatcggtattgacaactccgggtcggatggcgaccgtcaagacatctttttcttcctctcccagcgtactgtacatgaatggattccaaagtagtaaacaacgctcagtatgcctcttcttatcagttgacaggagaagaacgaggggaaagaagagtgaaggaacataccgagctaatgaattcatagctgcttttccagtcgcgtaaactccccagccctgcgttcctttgacggaagccccactagagaccatgacgatcgatcctttggatcttctcagatcaggaagagccacctgaatggtatgtaggagtgatagaaagtttgtttccagatgggcttgccatttggctctggataacaagaacggaaacgtacatcaatcagtcaaactcggcaaggcgacggcgacgacaacgaaggaaaacggcaaacatacacatcaatgtcggctactttcccgagaggttccaacaccccagcatttaaaataattgaatcaacaccaccccaagctcttgccgactcgacagccttctcggaaacatatctctcattcacatttccttgaataagctgaagtctgtccgggttttgttttttcaagtcgagcagagcccgaggaagtgatcgagagatggatatcacctgggccgagaatggaggaagcagaaggagcttgagaatggagaggccaagacctcgagaggcgcccgtgagaatgattgtctttggcgacattgcctcgttcaaggtctatacgagatgaagtttgttgcagacgatactagcggtatcaaagtgatagcaacatgtcaaagattcttagggttaaatgtgctgccggatgttacaatgacgtcaatggcgtaacactgagtttgacattgcaacgatgcactgtccattgtttttgtacaatcattttataactaaaagcatcctagtcggaagaataataaagatagggctacatatagagaaccaacaagtaggcagaaagaaagtaataatccgttacaagcgaaaaactctttctagatcttgtcctcaaccttgggggcaccggtgtggaactcgtgggagtgcttgacgtcaccgtggttgtgaacggcctcgccagcgttggtctgggacttgaactggtcgagcgagatggtaggaagggtggtggtctcgtggacgatgggggcctcgtgaaccttctcgtgaacagggatcacgttgtgaatgacctcgtgctcgtgaacgtccttctggatgacgggctggatgtgctcatggacgtggtggtggacgtgctcagactcggtcacaccaaggttctcaccagtctgaatggtagctccggcctctgtatagtggtcgtaaatatcagaattagaatgtgttgaacgatattatcatgagatgataaatgaggtaactaacgtcgggagctctgaatctggctctgctgctgggcaaggagggcctccttctcaggagaaagcttctcaattcgctctcgagtgacctcaggggcaatctgggtaacgtgctgatcggcaaggtgctcagtggcagccacaggctgaactcggtgctggtggtgatggatgtgtcgctccttgtcaatggcctcctgggtagtggtgtgctggtgagtctgaacggtctcctgggtgacaggggcggcaacctctcgatcgacctctgttttgtggagttagagaaagaatagatgggaagagcgtcgatcagatggatgttataattaaaacagacgaaagaagatcgaccaaaaaagagtgatggaggctaaccagtggtggtggcctaaataaaagtacagcaaggacaaaattcaaaaggagagaaaaaaggatcgagatgggtaagctgagtgtaaagccacttggatgcatgtatgcgctaacccagaatagagatgagatgggacatgggagatggaaaaaaagagatggaatacatacctggtggttagatccgaggaactccttgacagtgttgatggcagaagacatgcttatgaagagatggaaagagatttaagaaagttggagtgtgtgtgtttgtgtatgaatgtgatgagagaaagaaagagaaagggaaaagacgctcccctgcagaaaagacgattcttataggaaacctgatgagacaaaaaatatctgtccgactaggtacacaaaaaggcacaaaaagggcacattagtcgggcgaatgatgcgaataccatgcggtcattctgcggtcatccaagtgatattcgaggatcgcagtccggggcacgtatactttatatttggtcatcgttcttctctctagtggctcctgtgctcgttcgggaagtagggtattccctcctccccatcagagcagtctggggtagaaggatgagccagactgggcgagttgacctaagcgtcatcgtcacacgtcatcagctctttccttttctctcttcctttctctcgcccgggtttcacgtgaaactgcgcaggcccagtgggaggatgacggccgagctggaaacgatgttccttggagaggtgacgtaaacattcattttgactgcgcgcattcggctatattctccccaagttcttatccatcaaccttttcatctatccatctttcgccgtttcttcgtctctctttgttcttgtttccaatctatgcgaattaccagaaaaacatgcatatcgcaggtatataaccctacgagagaagcgctaactcatcatcccccctgaaagcgagataaactcgcttggaagtagcttggttgatctttcgtttgttcgggatcccggtcttgttattttggatctatgcatcacaaagaaacaaaacaaccagaacatctaagaacggacggaagatatctcaagacagaaaaccaagaaagaagaacatacgtaccaaaagctcactgatcaacgtctgtccctctgtttcgtcctgtccctcttgtgccaaccgatcccaagcatccatcaaagttctcaatgtcgggtactcttcaactacggccgaactcgtagcgggtgtcaccctggggatctgctcgagcatcttccggtacgtgtctccgaatgaggatccccgtcggaatgacttgtcaggatggaacgacagatgagtcttttcaatcagcctaagctcgacaagtcgcgaggcgggatggcaaagagaaagcgaagcaggaggtagcgtaagagtcaaagaaataatgaagagaaagaagtgctctcgtgaaatggacgaaacttgtaaggtcggatagccacatcccctactgtactgatgattccctccaacatctggctgtccgtctcggctgttgacgcacagatgcatagtgtttaacggaggcgatatgcttggtcagatacaacagatcaaagagaaaatgataaaagaagaacactgagagggacgttgaactaacaatgcatcaagaaacacgactctgctatctgtaatctcaccagcgctttctctatcatctctggagtgacatccgttacctctgttgccgtccccactctgttagtcttccttcctgctctcccagtccgtctacctgtcatctcatcgggcggcgcttcgagcctacctcggatcatcgccgcgaactctctgttctctctgtttcgatactttctcgcccaaccgttaaatccctgcacacagatcatcacctgcgctttgatacccaaccccaactctttcctcagctctctcggtaaatccaacagatcatcctcccttaccagactgacaagctctggggtagacagatagatcagggcggtcgtctctggtacgatctcttcggcctccaatggaagaaaccgtttgaggagctcatcatatcgagctctcagccgacgtctaaaccggatgacgttcgctcgctggaaagggaagaaagataaactcgaatgacgttcgatgatcgcttgttccaactctggtattaaatgatggattgaagatgatgaattttgagagggtgcagagagttcgaccaggagctctcgaaaggcttccgtcttgtctgtccgaagcttgttgacttttagctctctcttcttggcctctcgttcggcctgtttgagtgcctatttataagaaagagacgaagaagtccccaagaagagtctagttcaatcattcacccttcaggagctatggaatgacaatcggtgcaactcaccttggcgcgctctttctcttcaatagcaatggcctttgaaccaggaagaaagcacacatagcatctaagcgtgataaaccgagaagtagaacatgacagaagaaaaaggaggccaaagggagacagagacgaaccttttcttcctcggattttccctttaagattcccctcggtttagcagccccaatgatttggtcagagatctccttctcactcctctgctccctctccttgctcaagcccttctccctgcctcttgtcaatcgaacgggcggacgtcttttggtctcggataacggacctttaccgaccttctctcttacttgcgcttgtgctcttgctttggtctttactctctcctcccaaacgtccatctcaagttcatcctcgtcctcgtcattattcccaccctctaacctccctcctttctctaattcattgatccgtctcgactttccaccatatcgtcgtgatctgttcagaagcgcgccgatcggggatcccctagatgttgttgctgcagatcgatcactgtcttctccttcgtcatcttcattttcagatagaaataaaccgatccgtttcctagctggtgggctgatagacacagagagctctcggtgtccggaatcatgtctctgggttgcgctcgtcaaggagatcgaaggagcgagtttgggccggacgaccaattcagaccgctcaggtctatgctgaaggcgagacattggttcagatgtgcctgccagcttgtcaggggtcaacgaaacaagcgaggatgaagaggaggacgaagagaaggaagtcaacgaggaagacgaggtcgaagctgatactttggcctgatctgcctgtggaggtgtcgaagagataattggttcaaattcaccaccatccgattgggcgtcaacggctgggctggctaaacggatagagctcgtggacgacgagggccatggcggcgtttctatcaacaactgccctttatcggctcgagaggcatcacgatcgacggttgccgttgccgaggtgagatcgacaacctcagtgatttcatcatctgatctcttatggcatattggcctactatccgaatgatgacccggctgagtccgtatcggaggtctgttcctgacaacagcaacgacggctaggccagtgtgtctcgcaaggatcgttccgtttcgagtgtcagaggaagttgatcgaggaacaaagataacgtctgacgggtctacttccaagtctgtcaaagagtctgaagaaggtatctcctggagtgcatgaggattagaagacgaagtgacctgaacgagagagtcgtcaaaagtggtggtgatagaaggtagtgggcatggcctggatgacgaggtccaagcgattctctggtgatcgactgagggaagcccaaaggaaacatctccctcagatgaatcttccgctactgcttcatccgaggtgaggatcacgatggtctcgtccatcgatacgaggaagatgtattttgcggatacgactgcaacagagagagtgcaagatgatcttgattcacactcgcctgtggggaagcgagttcacgcgacgcgtctggtcacgtgagctgacgcgtcccaaccacgcatctgccgcagaaaaacgtctaatctgctgggagtacgaacggatattctgaatgatagcgccggttgatagagtacattccgaggacaaacgacacagatgcttatgggttccagatataacggatatatgtcagagctgtcctctcatgaaacacgctctgtggcacacgtaccctggtctctgggtgagatgatctatcgtaaggttgggcgcgatcaactatggtgtgataaagtacgtttgtttcccgttggaactctcttatgatgacgtcgtctgtctgatacaggataaacatacctgcagtgtatcagcacagatcatccgagcagtctatctgggttgattatatgactgtgatttgtgaatagacgatgccagtgccgatacaatagtaacacaaaagaactacaaaagaaatccaaacgaactacaaaaagaactacaaaagaaatatgaaacatttcaatacacttcgacacaaacgccgtcaactttctgtttctcatcctccatccgattgcgtccatccatccattcgtcgtatcccgttccatccatcgtacaatccatccgtctttctgaaggcactcctctttcttatccggccatcctatattcccccttcattcctatggtcgatatggacgatccaattgcttcgacatcacagtcttttcgcccatcgaaaccaccgactgtgatcccgtcttcaggattactgcccccaataaacacatcctcacaacattcgctgtcgtttgcctccgcctcttcttcatccacaccctcctttgtgccttcctcaacgaggacagctttgtctcgtccagatccaccttctcattcgtctagtataccctcgttctctcctcgtcggccagtcacgatgtctaacgcgtcgtatcctcctaatcaagctgtgtcagcttcttcgtcgcgttctcaaccctacaccttcttttcagaccattcgtcgacctcagccccggtcgcttcctcttcttcatcatacactcgtagctttggtacgagtggaccagagtatgctcatagtccatcacccataccgtctggatcagtcgaaagggtcactacgccgaatggccttctcaggatcagcagcccacggagtgggaagcggaaagctagaggctttggcgacaggttagtttctgtcttacttctattttatcctctcagtactcgtgtcctcagcaagccggttcaggatgggcacttgggcggaaaggtgtcatacaaatggtcgaggaagtcataaaaggctataccgggtcggatggttactatctcagatgtcatcctgtgctagaggagtgtatgcgccttcgtcggcatgactgagaccttgacgactcatgcgtacaaatctatcggacacaacgggtccagtccctcccgatatgaattcatccttccgtttccattcgtttgtaaagaaaaatgacatgttgtagttgacgcaaataaatctaccttgcctcgttagattcattcctacaagagacggatccgacctacactctacgtaccacctcttagcggatggttcaggtggaactccgccctgtcgaacacaacgacggcccaacggtggagatggaacggatgctcagaaggacgaagcgaacgagaccttctcgtatctactgaaatctgaactcttctcaggatccacaggtgtcccgagatcatccccgagttccttccatccaagcgtctcaccaggttcattcttgacgtcgtccgcttccttttcgaacccacatgtacccgactccccctctcgttcacactcacattctcaccgaccatctccgtcaaattcaccatcaggttccatcctccccgtaccaagcacgcctacccgaaaacgactgtttacctattcgtctcccgcttcatcctcccgactagcagccatcacgtcctcctcctacaacagtggggctcatccaccaactgcttcagacttaaatgatccgactcacgaagcatattctttgagtccggtcaccactacatcccaacgggttcttctgtctcccagaaagccaagcagactggtctctaaagggccattcaaagttctagacgcgccttatctggcagatgattattacctgaatttggtcgattggagcggaacgaacatgttgggtgtagggctagcgagttgtgtgtatctttggagcgcgaatacgagtaaggtgacaaagctgtgtgatttaacaacggccgctcaagtcgaggacggtagagtgcttggaggaggtgggcctctgcaaccagagaaagtcaccagtctgaattggactgctaaggtcagtttgttcaccctttctaatttatccacgcctttctcgtttgttgatctaaattatcctccttttctgattaaaaagggtaacacggtggctatcgggacaagtaaaggcgaagtccaaatctgggacgctgagaagtgtaaaaagattcgtacaatgaccggtcacactgcccgggtcggctgtctcgcctggaacgaatctgtcctatcttccggttccagagatcggcatatctaccatcgagatgtccgtgcacccgagcatcacttccgacaattggtttctcatcgacaagaagtttgcggtctccgatggaacgtagctgacaaccaattggcaagcggtgggaacgacaacaaactctatgtctggcagggtacagattcggtcgatccgatttggaagttcggggatcacaaagcggcggtcaaggcgatcgcttggagtcctcatcagagaggtgtgttggcgacaggaggaggcacggcggatagaaggatcaggttttggaacacgatcactggctcgttgcttagttcaaccgatactggttctcaagtacgtcttcgttcctttcctctacttatgaattgtttctttcaaaactcatcagttttgccttttacaaaaataattcgattaggtatgcaacttgatgtggtccaaaacatcgaacgagattgtctctactcacgggtactcctccggacctgttcagaaccaagtatgcatctggaaagtgccgtcgatgagtcaagtggctgggttaacgggccatacgttcagagtgttgtatctggcgatgagcccggatggtcagacaatctgtacgggtgcaggtgatgagacgctgaggtaagtgtcttcattattcaactcacccttctcgcggtcggccctaattgtatcatattccaaaaatcaaaaaggttctggaatgcattccaaaagacgaaggatcgcaaaaagacagacggttcagctcttgatccgttctttgcgaaaattcgataaagctttctgctcttttgatgaaaccgtcattgggtctcggctttcttttctctgataaatgtccttctgcctttgttctattctcataaatatgttcggttactccagttcagtgccttttctctgttcttttgttctgtttgaactcttggactttctttttctctttcttttttccccctcttattttccaattttcaatttatttttttgcttctaattactgtttccattcaaaccccatattcaataatgtatatacaagccgtctagatcgagtacccatctgatcagtccagacataaatttttaatattcgccatgtagtctatcttcctcttgcctcttcgtctctttcccttctcacttttgtgtgggtgtgcttattttttcttctagatcttcgatttgtttactttccttcttcaaaaaatatctcaattcggtgtcctaatttaatatcgtcttcttgctcagagataccggccttttgggttcctaggatttttagtctaagaatttgagaatcgaaatccttctacaaacaatattgacccacctgctcaacacaatcaagtcttaaaaaagaaatagagacaaaaatccccttcctgaagagaaaagcgagaagaatagaaaatgaaagcaaagaggagatgatgatttgtgtctactcctctcgttctatcctccttctccgagatgcgctttgctcgttttatgtcttcccggtgactgtctttcggagatctgttttgttttttaagtaccgattgtagacagatgccaatacaaaggtccagagaggtcaggacgaattgagaaagagaagacgaatttatgaaacagagaatgaatgaacgacaagcaaccaaccataaaggattccatctgcccaagcccaactagctggccaacccgggtggatatgatctaagaattcctgactatctctgatgacttctgcccacgcattgtacctcaccccacctcctcctcgttctttggcgcctgatcgtggtccacctgatcgggcttgagcgattatgaccctcttcgtctcttcctccagttgtctcactctcttttctcttaatacccatggccaactaaatttctgaggtggaatatggaaagatctaacttgcactcggggcacattggggtgattcggagggaacgtgtcggatagagtgcgaagaagggaggtcagacggcgcgtgaaccaggctagccgagaggacgagagaggtgtagatgatagaggatcggcaaagggtttgatttcatcacgggatggagagggatgggaagcgttcatcaggaagttcttgacagacatctcgtcttgagtctagagttgatgaagagttatgaagggtttacggatcacaagagatgatgagtgtctttttcatcgtcgagataggtttgtttgatcaaacatctgatgtcgaaatggcgagaaagacgacatactcggaacatgcctagatcccacgctcctactccaacttccaccaagtctatgtcattcactccgcctcttccgatagctttcaaaattggaaggaaaatctcgttcattcgggcttccgaatcgagtggagggttgaagtgttccgatctgaacaataagagagaagggagctcaacaaccgcatatttctggatcataggatgaataagacctcagagaaacaacatactcgataggccagaacgctcggtctccgaaaggcatatctttggccttcttccaagttccttctttccccactaactctcctttcgactttctacccttttcttcctgatgtccatattcaactactccaggcgtcgtgactccatcgtccaacccattccagaaaccccataggaagacagcatcgtattgatcgatcttgcacagccatgggcgactatgttctgagccgtaagaacgaccctgtctataatgttccgcatagtcttcttctagagtgatcaatcttgaaggatacgtgtcgggagttgtagtgggtgagtagatcgtcacatagtcggctgggtttccttctggccagggaagaggcgttagaggtgatgaaggtgataggaattggcagagatggactgataccaccgagtatgaaagaagaaggacgagcgccgcttagcaaccatacgggtgggtgaggggcggaacctactcgactgggaaggggaacttacgtagatgataacggtctatagagtctcccatcaaaagaaccgttctgcctctcaaccattcaaaatcttcatcgccctcctccgccatttccaactttcgagacttgtcatccatggcctccttccaagacttcattatcatcttctcctttcctctcaacttgaccatcagcttttccatcaaccgcggccttggcctactcttcagcttaggcgatgcaggtgtatatgtagttaggaaagggtttgagagattgtagccgaggtgaccgggagtggtatatggatgagcaagagtagcatggggtttgtactcagatgaacgcaagggatgatgacttctcggaaacctagagagcggtcatgaacgccgaacaagagatcaacgtctcgaacagaatttttgtgtaatgaaagagaacagcgagcagacgtacccccatataaggatgagactggtcccaatgagcaagaagaaaatgaaaatccgacggcgcgaagggtagataccaccaggtttcgtcggcggaggaacgggatatctaaccgaaggcaagttgatcgtcggtcggtttctatttttcaagcaaccgtcaagagaatcacatcaccgttcaagagaaagaggaaagagatccgtcagatcaagtgtttaaacctaaaggaaaacagatagatagaaaacagagacagaagaggaaatcaaagatcgaacctgttcgaagcgatagctgaatgtttagtcgtcatggctcaaaccgactgatacaaattacaatgaagagaggaatcgagtacgcaacactcctttcccaagttccgtctaatgatctgctttgtatgcttggtggaaaaaatccctccctagtcgaggatcttgctagttgatagtttaccaacatatttggtatggaccgacatatcaggatcattcgggttggaaatcaccgcgcagcgtctctagcgctggggccgaatgatggaccgccaagacatcgctacaacaaccgcacatgatactccaaaggatgttgccaaattgagtgcaaagatgtgaatttgacatgactcatgaagatacaaatatatataactagagaaggaggtcttgtctagaaatctctaattgcgctcaagccctacccttccccttcgcgtcttttctgctttcatcgtcaacctggttgtcaccaggactctgaaactgtttttgcacacgtctgtaatgctccatctccgtctctgagacactgggtatcagttctcgaagggccaaatcgaagtcttcttgagagacaagcacagcgatttcttcaggacgagccaattcggatagatagtactggggggagaggggatagggatgtggggagctctctggccgaggagccgcgttcatctcggctgtttcacgatgaaagccagagtgatcagtaaagagaacgaccgatgataagaaagagtttcccgcatctgattacttgctcgaacgatcacaaggatagagagtcacgcaccaatctttttatctacttcctctgcctttcttgacatcgcttttaacatcgcatccgaacaaagcgcataaaagtccgcacccgtatagttaaatggacaccgctcagctactcgatcaaggtccaggccagggtccattttgaactttctagtgagagccttgatgatgttcagctgggcttcatgtgtatcgctcacccccaaatagagcatacggtcgaatctgcatcatcacacaagtatgggcacaggttcagacacgagacagatcacaaagggaaaaggcaaccttaagaaatagggcgtaccttccaggtctcaataaagctggatccaacagatccggtcgattagttgctccaattacaaatacatcagatgaaccactcccttccgccgctccgtccaactctgccaagagttgactgacgatcctgtccatcactcctccagaatctccttgattaccacgtttgggtgctacactatccagttcatcgaagaagatgcagcatctgaagagatgaaaagagcgatgaaccgagacgagaactcttcttgatcagtactcgatcgcacaaaggcgcaataccacaaagtaaagaagataagaggatcttacggtttggcatccctagcacgttgaaacacccgacggacatttgcctctgactctccgatgtacatgttgagcaactctggtcctttgacagagaaaaagttcaaggagcaagaggtggcgacctgtagaaaagacgtggtacactaagtacgaacggaaattggtatgatgccagagactaaaggaacgtactgctttagctagtaacgtctttcctgttcctggaggtccataaagtaagatacctacgaacagaaaaaaagacgatcaatcttctcatcaacaaacataaagtcaagaaagaatgaagaagagatgtaacaacccaccggaacgtttcttcaacccttcggcaaataattcggggtgcttcaagggtaattctatcgtatccaaaatctctttcttcacactgatgagtccaccgacatcgtcccatccgacattgggaattttgggagcgcctatactttcagagtaggcagctcgagcttggtcaatcgcttgactaaagtcagacgatgttagggccaaaccagattgagcaaacgcgatcaatgggcaggatgttctcaaactagccgaatcagaaaaaatgagatatacaataatggcggcaggtaacttttctttagaatcaaaatcgaaattcgaagcgatcactaaaacgatgttaacatacctggattcactcgtccgtcccacagcagctgattttgctcgagcaaccaaggcgactagatcttgagcaacgagcgctgccgtttggactgcaaggttttttacatccacatcggccgctataggggtttcggcgatgatccttcgaagaatactcaatctttctttctcgtctggagcctttatgtagaaagaaatgattaagggttcagtagtcagcaagaaaaactgaccatcagatgaataaaacactcatacctggatggaaatctcctgcttgaaacaccccaacacacccgatggaactttatccccgtctgatgtcgttccaacaacgacaaccgggaagcctgttgtcttccagctagctgataaactctgtatgcaatcctgcagaacacccgcaatctgaggttctgtaggaagaataagtcaagcagaagagaccagactcagattatcaggagaagaacaaaacaagcaagcaaagaagaaagctatagccatcagaaagtgataaacgaacccttgccagtctcctgcgcttgacctttcctagcaagtgcctcgatgtgccgaaggagtaaaatacaaggcgaagatcctgccgctcgctcgaatcgcgctcgtaaaacaccttctgtctttgaatctgtgtctgcgacgagctcgaagcagttgatctattggcacgtgaattagaacatattcgaaaactgattaggagaacgaaaatatagaacaaacaatggaaaccaacctcaagcatgccgaaccctaaacgagcagccgcactcctcgttatcgttcgcttcccactccctcttgcccctttcaatagaatcgagagctggagtccgcactgacccatagatgaacctagcgaagatctcaagatctcatagagtgtcaagagcggagagggcggtgagatgcctgggctaggagccggaagaaggtttgctgtttgaacaacaattaagattaattcagcttttcaagcgtaactgatttgtgccggagtggaaggaaaggagaagaggaagaaaacgaacggatcccgagccagtctcccatggaacctccaacggcctgccgatgaacaagcccagcttgaacaagcactgtgacctctgggtcaactacataaccaaactcacccctgctggctcgtcgctcccaccttgtttctctcgttgtcgtaagggtcgatagctttttttgagcggtctctcctgagctagatactgaggaagccaatccgggcccctcaattttggacacctgaaaaaataccatagtcgtcgggatactcgacccctgggatgatcccaacagggagcgatctccatttttctcaccagcgtcatttctgctctctccactctcttcatcggcagacaagaactcatctacaccgacacccacgatatctcctactttgagcaccctccggttgcctgttcctggtccaccgaagaattcttggagctgaaatacgacctggggctggagtcgtttgctagttgaggccggactggcaaggcgagatagcacgagagaagcggctgtgggtataggaacaggcaaagctggagagaaagacgttgggtgaatttttagctgaggtggcgaagtagcgaggggtgcaagattgtgtaggattaatgggggcacatggattctaggtcgatgtcaagcacatgatcatgagataagaaaagaagttttagggctaacaatcaaacgtgcgcatttaaaacatgccaagattggaaaatctacgtacaaagttgagcgaggagaggaagacctagccgaaccggtctcttccaatgttcgaattcgaacgattctccagtctccaaacgtgtcctccggttgactgaaatttaattccgggatggcgcatacagcgaccttgttgtaagcccagaaaacagaaataatgtcaggtattaattcatcttctcagaaagagatatagacgtacccagtccccgtcaaatgcgcctatacgacctaggttaatggttcgagtccagatgaccgaatcctccaagcctgattcctcctttgatttgtccaggatcgcattcggcctctccatagaaacggtgtcgaaggcgtttggattggaacctgatgaattgccaggtagagagattagagaagaggataaagtggtgtctggggtcatgggagcgggagaagaggagaccatggaagacgacagaggtgatgaaaaagaggaagaattggatgacccgagaagagcttgttgaaggaaggcgggagatatttcaaaatcaggttcatcaaagtcatcatcgtcttcgctgttctcgtcctctacgtctttgctgtctgaccattcgggttcagagtgttgactgctagaaagggatggagacgtgtggccgtttggaacgacggttttgtctgaggagaccgatgacggagatgagtcggccgaggaagatgtaaaggagcgttcgtgggatagaggcggcatcagcgcttcgttgtccgtctcgttcggttgctgtgcccaaggcgcgaccaacacctgggtttcttcgtcttcttctccgtcttgcccttgttcttgctcttgttcgtcattgccatcatgttccaacccttctgcctgttcatcctctggcaaagactgaatgaactgtccgctgagtgtgggttctgtcataagtaccctgaaggctttgagatccgaatgagatccggtctggctggaaggaatggtaaggatatcggttgtacggacgacatgtgggatagcacgaagaagcttgtccggagatgaatgggcgaactgataggcatggagggaaagcggttggagtgtcagcgacgtaagcttcggaagctctgtatagtgggtattcgattgagagtgtgaagaagaaggcaggggaaagaacagcgacatgatggtgttgattgtctaccagttggttgcgagattggcggtgagttgtgagtaccaagagtgattgaagatcgtttgtccgagagccgggggaatgatacccgggtgaccggcgtgtaaccaggggctgtaactgggttgacgcacggacgtcttggttacagctgccagacccgatgccacgttccagcggatcggcgatcgaaaatctagacgtaccttatgacgtcaggtttattcagggcggtgacgctctctgtatgggtgcagcccatgcttaaaggaaacaggcacacactacggaatcgtccggaaacactacgaaagactagagaaatccttgagctttttcctgtttttttcccaatgtggtcatcaatcttgtcaactttgccttgaagaatgaaaaaaaaagaggcgggggatttttttgggtgcaatacaaatagcagccagctcatcccatcatcttgatccgcttctttcttcctttcaacaccacacgcattctttcaagccttctttcttcttcagctacactcactcgtcctacctacccacccaaacatctatcctagttagctaccatggccgagcgagtcgtcaaagagttccttgctacccacaacaagaccggttccaccgaggtctgctccgagattgggcctgaggtccttcaggagaccatcattccccacgttcacaccgaacaggcaaccggtgagctatccacctgtctatctatgactgctcagctcacagtcggaaactcattatatcttcttctctctcagccattgacagggagcgacacatcgtatgttccattcatctgattaattttctcagccccatctcttatctaacccatcatttcctttcatttcctctctcctttactgccatcccttcttacagcatcaccaccagcaccgagtccagcccatcgttgccaccgagcacttggctgaggagcacatcgtgcgttgcgttcccatgttctatcctttcttatcattcattccgctgcttgttctgacgtcttatgccttttttccatacacagactcaaattcagcctgccgttgtgcaggagcgacacgaggagatggccccggaaaagctcgagatgctcgagaagctgaagacccagcacaagaacaccagaaccatcgcgcccactgaggagaccgttgccgttttgggaacgaccgcctctgagcacgtccaccaccacgtgcacgagcacatcaccccggtcatccacaaggagacccaccagcacaagatcatccacaacgtgatccctattcacgaaaagattcacgagagccctatcgttcatgagtccaccgtgcttcctaccctcaccatggaagagttccgagcgaagatggcacaggctaagggacttcaccacggagagaaggagcactctcaccactactacgagggtcagccccgagtatccgaggacggatctcacccggttggaaccaagactgttgttcccgccaatggaacatcgcccgtggctgtcaagtcccctaagatctaagctgacttttgggctagtgtattttgcccttgttttcaatctccagctccattgtactggccggatacgtgtcatagctgatgcgtctaatctataatcttgatatcttcatcacttttctttcctccttctgcctatcgcatggtctcgtcaccgtttgtttgctagttattgctcttcgtatctttttatcatctcttgatggcttgctatgtatgaaatgtattttgtcgttctctacatatcgcatgcacaggtagtctcaaaggccgacgaatgtgacatggagaaaaacgaaggtagaaagtcctccgagctgcacgacagcagttggagtcaactagaaggctgactagcgtctatgaattccgtcacagttgattaaaagatctgtcgaggcgaatgcagcattttggtaagaagtacatcctaagaactcagcatcagagaacccatctggcagaacgaatgaaagcaaactgagtaaaccgccaggatgagccagaacagactgaagatggacgcgtgacgcgtctgacgcgttgattgaattcagaaccgacgcgacacgcgtgagacacgtctttttcctgtcatctgtctcattcaactcgagttcaccttcctttctcgactcatcactttatcccacacctttccttgttctcatcttttacgttcgtcaagatctgttcaccagataatattgtctgtggcacatacacattgtctgtctctccataccgtgccctcttccttgaggattgtctcttcttttaggtcgcgccttcttccttttgtcttcgttctttgttcgacgcgtctcgttcaagtctgcgattgtctctgtccgagtcgttctacctgtcaacccgagcggaggaaacaaacccctagttccagtccattcctgtcatcccatctctatcaagatcttcataaaatagacgtacatactcattagcagtctcggtaatcatctcacaatgcttactcgactggaaacgttcaacttcaagtatgtccctctccctttgtttcaaccccatcatcatcgttctcatttccgctgtagtagagaaacaaatgatctcttgagaaaaaaaattgaaacgatatatttgttcttatctgtctaggtcctaccgaggtcaccaaaccatcggtccattccttcctttctcatgtatcattggacccaatggatctggaaaatcaaacttgatggacgcgatctctttcgtgcttggtatcaagagttctcagcttcgaagtaaacaattgaaggatctgatatacagaggcagaaagcttgccagaggaggtagcacgatttccggtgctgatacgatagaagaagaagaggaggaagagagtgaagatgaggacgagggattgagcgaggaagaggggggaaagaaacagaagggcgatagaggcgagggaagtggcaagaaggcttgggttaaggctttctatcaggacgagacagaccgagaatgggtctttcagcgaacgtacgtttcttttcttgttctattccgttcctacctatctgtccgttctcaacctagtcaacgatctgacctatacatatgtacatctctcggatatcacagcgtctcgttatctggctcgagcgagtataaactagacggcacagttatcacgtactctcagtacaaccaggctttagcggaccacaatattctcgtcaaagcaaagaatttcctggtcttccaggtatgtcactcgcacctcaatacaacataccatcgaacaaggcacttcagtctgtctgtttccttgtgagagttctgctgaaacgtattcaaattgtcatcacagggtgatgtagaggctgttgctcgacaatctcctgcggatctctgccgattgatcgagcaaatctccgggtaagtccttcatctttttagatcttctcattctaaccaacacataaaaccttgtttactagcaacacatcttttctgactcttactttgatttctagatcactcgagttggcgcccgcctatgaaaaagccaaattggcactcgacaaagcgaccgcgctatcaaccgaaaactttcataataaaagagaaatcgcaaaagagttcaaggcttacaaggagcataaagtcgaggcaactaaactcaccaaacttcgacaacagaaggtttttgttcttcttttgttctcatcctgtatcccgtcaaggatagactaacacgggctggcttgttgaccgggttggatgtgatcaggaggaggtcatgattcagcacattctctggagactttatcacattcaacaagggattgacgatgcttctggaaacatcgttgccaagaatcaagaattggataggcttcgagcgaaccaggtatgtcttaccttctcttatcagcgtttttcatccccttcgtaaatgacataaactgacctcattttcttgcttttctgaccattccgtttctgaatttatctagagtacgaaagagaaagaaattctagatgctcgaagagaacagacgaggttgaagaatcagattggggatgaggagcgaaacatcaaacgtagagagaaaaacatcgatcaagaggtatgaatcctcttctttcgcgcagtaccgaccacttgtctagatcgacaaactaatctatttgttgatgtactcatcctatagaattctcgcctagtgacactcgaaacacagatcactcatgcggaaagaaaagctcaaaacgcagaatccttgggagtaaaagttgagaaagatgcacaacgtcagacagagagtttggggtctcttaggagggatcttgctcaggttgagagactggcccaggaagctgctggtttgttccgcctctctttaattcgtcttcttcttctcatacttcagttgaaccagtccaacatcacatattcgtttcgatgccatcaataacgaccctacagatgaacagcaaaggcttgccgagcgacaaggtcaggctctgagcgaagccgatttgaatgagtaccgtcagctgttcgtcaactctctcctttgctcttcacgttcctctcttcctctatcattcgaatcaagtgctcacaacatcattatttgaacgaacttttcgttcatgaaggaaagcacaagcaaatgctctccttcctcaagagcaccaacggttgagtgtccttcaaagacaacaaaagacacgaaaggaaggcttggctagtgatgaggagaagctgaacatcttgaagcgaaggagactcaagttagaggcggagattgatgatttgaaggaaaagaaggatacggtgcgttaccatttaccctctctgagtctcactcatgacaacgacagaatgtgataactcatgatttgtcaacgcattttctacaaccaaggctgaagagaaggaagcccagagcgagcaagatcgtaccaacgcacaggaagctctggagagactccaaagcgaacggactaggatcaggcatgtctcgtctcactctctcttttgtatcgacaatattcaaccctcaaaccgcgcgatgttgtgacatttctctaactttctcttcgtgtgaatttacttcactggtttcaacagtcaacttgagacggagacaaatgagaagctcacgaactgttatatgaagatcatgcgatcgagcgctgacaagaaggcttcagagaaagagatcagattgaaggagtctatagcgacgctgaaaaggattttcccaggtgttcacggacgagtcgtcgatctttgcaagccgaccgctacaaagtataacaccgcagtgggcgtcgtacttggtcggaacaacgactctgtggtagttgatcatgagaagactgctatcgaatgcatcaacgtatgtctcgctttcttgattctttgcgcataaatttttcacgtcatctctctgatatatctcttggtcttttagtatctccgaactcaacgtctcggccaagctaccttccttcctttggactctatccaagtcaagccaacaaatgacaagtatcgaaactttactagaggcgctcgtctcgccatcgatgtgatcgacttcaatcctcagtttgaaaaggcgatgcaacatgcttgcggcaattcgttgatctgtgataccctggagaccgctagatacgtttgttacgagaagaatcaggatgtaaaaggtttgtctttctcattgcgcgtattatccttgtttatatttttctctggctcgatgttgatatcggatcctggtcgtcaatcgttctatttgttttctgcgatagccgtctcgctcgatggtacggtgatccacaaatccggttcaataactggtggacacagccagcacgagaagagatcgttcgatgagaatgagctcactggtaagacatatgttccctcagaaaaatcatgttatcatctcctcagtctgaatttgaatccatcctatcttgttcttgcgaatctataacagctcttcatcaacagagagattctcttatggctcatctggctcaactggcaaaggaacgaccgaaagccaagtctgatgaacatcttgtagcggagatcactcggttggaatctgagctcgccatcgtcagggacgacctggtttgtttctgattttttggatttgctctgatttttgttgttatccttacgatctaacagctggagataagaaaagactgctgatctggaaactaacttctcacgctggttacgatcagagtgctatcaaccttcgattgaccggccttcaagatgagctgaggcacgccgagacggagagctcagagttatctacttcactcgacgaggttcatacttttctttttcttcacatgataacctaacgttttgaccaacgatctgacccctcctataattaaaccaaaacaaaaaaccacaacgacaaaaaagaaacgctcttctctatccgtgattgaagttgagatcttaggattacttcagacggtgaacgcatcagaggatgaagtattcgacgagttctgcgctcgaattgaggtcgctgatattcgagagtatgaggaggttcaactccgagtggcccaagctcagtctgaggctagggtcaaatacgaagctcagatcaatcgactacgacgccagtaaggttttcttctctgagggccctttcttccagaacgctagagctaatcaatattctcttggaattatttgatttcagatccgagttcgaagccgagcaactcgagcttacacagacccgactacgaagtttgactcgatccgccgcgaccgagcgcgccagtctcactcaattcgaagctgatagggacgaactcacaagaagcatcgatgagcacaagcaggagatccaagatctcctaacaggattgaaaaccttgcaagatcagttggacgacagaactcagaagtttgatgacatcaaacggaccgcgtccaaagcgacgaagactttggataaagctatcaaagagattggaacttgggtaagttttcaactgttgcttttctatatacatatggtctttaaatcaagctgacgcttttgttctcatttctttgtacagaacgacgtcattgagcgcttaggatctgaaagagcctcaatttaccgtcgggccaagttcgaagatatcgaccttcccttagagagtggttcacttaataatgttccgattgaagctgccgatgaagaagacgttcctgacgcgatgcacgtcgatggtgatgaggacgaaactcaaagaccccttcaagtcaaagattatggtattcaagtcgactttgatggtctcacagatgaagacaaagaggtgagctcttcgacatgcagaaagctcttccctctggatgaacaactgaccgtctttgagggttctctatcgtaaatcagaatggtgcggacgactatggggaagaacttgagaatgaagtcgccagactggacgtagaaattcttcgagtcgcccctaacgccaaagctgctgaaaagtgtgttttgtcttccgcccttgaaatttacatgtcggatcttgcatgctaatgaattctcaccgtttctctcgtaccaggatgggcggagtgcaggccaggcttaatgaaacggaaaaacaggtcgatcgatcccgaaaagagtctagcgctgctcgagagcagttcaacgccattcgaaagcagaggtgggttgtttgtgtatttgtctcgaggtgaattccaactgctaacgaacgtccattttccttcattctgattctgtttatcagaaccaacttgtttcagaaagcgtacactcatatctcggagcgaatcgattcagtatacaaggaccttaccaagggaaacgccgctccaatgggtggagttgcttatcttagtttggaagactctgaggtttgtctgcatttttctatgccctggttgtgtatttctttcctaacgccttttctgtcttgcaaacaattttctctttctgcaggaaccttacctggctggtatcaagtatcacgcgatgcctcctatgaaacgtttccgagatatggaccaactatctggtggagagcaaactgtagccgcgctcgcgcttctgtttgcgattcatagcttccaacctgccccgtttttcgtgttggatgaggtcgatgccgctttggacaacacgaatgtcactcgattggccaggtacttgcgagaacattcatcagagtctttccagtttatcgtcatcagtctcaaagagttcgttcttcgcgacatgcaatctctccgttctctattgtacttggtcctctttcaactcacatttcttttcttcctcttcgttctgatcgcgatacattcggtttccctgcagtgcgttgtacgagaaatcaaactctctagtcggaatttatagggatcaggaaatcaattcgtctcaatcattgacgttggatctccgttcggttcgttttcaatttcatccttttctttttcgctaccatctctgtttgctgccatagagagggcatttagtttgaaaatctagttctgacctatcgaattttctgtgcgcgtttatcagtacgaggagtaaactgtcactattctattccttatctcgtttgttccgtcttgtttctcttctcattttctttcatacatacacacacacacacatatatatatccatatctatctatctctccatttgtctggtcttactttagggtgagagaacgtgatcgcgttacggtgtccggtggatcatatccccgcctgttcttctctcatcaaccctccatttcgtcctccctcttctctttctttctttccttctctctgatgttttccttgtcgagtcctttgttttaatccgttgtaccataaacccgatccgatgatacatggtttcccctcagatcctcaaacagaaaatctcaagaatgggtgtttcttttctttgttcttcctccgtctattgtgtgtttaactccttgcgctctccccccccctccttctctcttcttcctccttatctctgttttcttcttgcggtttgcgtctccgtttttgtgctagttgacaaaaacaagacaagatgtgcgttctttgattatatccgtatttcgaaattcatattttctacccaactttgagcaagtcatatatgtatatgacattgtctcagctatgtaataagagttaatatagaaaaaagagaagatcaagatacttcggtcggaaatctagcataacaagatcgtgacatagacagacaaacggacagacagacaaacaagaaaacaaataaaaaacagaagaagcgtgtatgattggaaaagaagaaaagtaagcctggaactgaacaaggcaggaccgtttaggtggcggtcgaggtcgccacggccacagcatcagcagctcggctggcggcaatagcggccgcaccagggtaaaaccaagtgacgagggcgatgataaagtagacgacgatgaggattagaccttccatgtaattcgtcttatcgtcctggatagcgtagttgacgatcaacacggtgatgaacaaacaggagacctcgaaaagatcaaacttcatcgtcaacggttgaccgatcgcccaggcgagcaggaccaacgttgggatgacaaatagtgcaatctggatggacgagccgacggcaatggagagtgagaggtcaatcttatccttgatggacaccatcaccgcagaaacgtgttcggcagcgttaccgacaaggggcaacaagatcagggagacaaactctctgctgatgttccctgactgggtcattccgtcgatcgacccgactagccactcggcggtgacaccggtgatggcagtgacaaccaagagcatggccaaggcctgataggtcgtcagctttggaacttcaagcacctcttcttcctcttcattagcctcctcctccttgacggtggagatgtcattggaaccagcttctcggtcggcctcaccaccggcgtcggtatgaacggaaaccgaccctcgccgggctcgttcagcctggctacttgctatggacgaaccagaggacgagcttccgagagagggcacccaatgaggcctgggaaacacccggggaccaggaggaaggggacccttaagagcggagggcgcctgggactcgagcttccgtcgttggaaaggagtgaccgtcttgaagagatatgcatgggtatagagctggaaggtgaggtaaccggcatagacaatcaagagcagaaaggcggttcctcggctgatggagagaagctccttgagttctttgccctcgggatcggcaaaagtgtcctctccaagactgaagtggtaggcggtagggatgatgatagcagccatagagattcctaacagactgatattcaattgggcagctcggacgccgtagccttgttcatggaagcgaagaccaccggcaacgaaacaacagccaaggacgagtaaggtgttcgacagaatacttccgagcatcgagctgcggacgatgtcaagctccccctttacaagagccaggatggagatgagctggagaaaaagggtcaataaaagagacggagcaaaggtcaggtgttgatacagatgaaacgaaaggatagagaagtgatcaggcgtaccaattcgacagcatttccgaatgtggcgttcaagagaccacccaacgattggccaactcggagactgatctcctctgtggcaaatccaaggagggaggcgaggggtacgatggcgaggaaagaggtcacaaagacgagcgtatctgattgatgatgactgaacgcaaagtgacaggcccaagagacagggatgaagatcagctgtaggagagataacaaagacatatatcagtcatcgatcgactgcagacaagagacaaagaggatgaggagacgagctcaccataacattgagccaagaggcggtgatgatgttcttgcaggccaccttccaggtgaggccagcgtcactcgcccgtttcttttcaggcacgagcaatagctccctgataggcggtctgctggtctctgccggggtccgggcgcccgagggaagaggcagcccttgttcttccctaccaatcgagttaaatgaattgaacccgggatgatgggtgaggtcgtgtgggtactgattggaaaactgagcaaacccaccgggcttcatccctctcgcgcggacaaaggcagaagaatcgggagcggtgggagcttttctgatggccggatgaggctcatctgaggtggaaaactcttcgtacgtctcggggagcgactgattcgaccggacgagatgcaggccggtgagtccggcctgagacttttcgtcaaagccatagtcgtgtgaatggtcgtccgactgcttgttaggaggattggtgaacaaggagtgggggagcctcggtataggtggctcgagcgagtcttctccgagctctgtgctcggtgcactgggtccatgctgggcggatacattttgggtattagtagaagatgcggtcaaaggtgaagagtgatccatcggttttagggtctttgtttgggagtatgtaagaacgaaaagaagtgctgatacgactgaatgtgtgggagatggatctgaaatgggagttgagggagaattaacgaagtggcgatagcgaacaaagtcaagcacgagctcgatgggacacaggctaaagagggttggaactgagcgaggggcgatgcagggagcgccctgatgaatcggtcaggtccggcgcgcagtgttccttggcgagactgcggagtacactttacactgcacacatcgtgtagtatgttctagagtgtcgctatgtactttactatacgcgtgtgttgtattagcagatcggccttggtcgtgtgaggttatctttcaggttttgtccgggcgggtatgcatggttgtgtgtacgtgctgtagcattggcgaggttgttcagatctgagtgtgagtgaacacgagagttgacgggatgttgtatgttgtatgttatcatcatataggtgtgttcaggcatctctagatgtgtccatagctctgtgtcgggtgcccatatgggttttcgtgtgactgtgtgtgagtagaggtttgttgaaaatggtttgtgtatatctctatgttcatctgttgatagaggtgttcatctattggtactgtggccttgaggcctatgtgtctctggtagttctgtcggtctatcggccaagaagcgcgtgcattttatcgttggatgtggatgtatgtgtctatcactatgtattctgccaagacagttctgatgataacatttgggatataaagttacaggagacgtatatcgaacactcttgatcgactagcactacatcctgttcattcttgatgagctcgctcactcaaacactcgtcatatcactcactgtccgacatatatatcaacctgggcgttgatttcatgataaattcatatgtgtttggcccactgtattgatcgatcagattcttctcctatatacaaactctatctattcctcatagtatgcgttgtcttttgccagcatgggagttgcccttccgttatcaagattgcagcggtcgatcttcggagagacccccggaaggagtgatctcgttgaattagacatgccgggcatcgcgattagtcagcaatgactcctcccgccgatgacgctcatccttcaactcaccgatcgagcgaacaagcatacacccaaatcaactccttgtcctcactcctccatcctctctgtgtcctcagatccctgaaccctttatggcacagcatacactatcaccgcatagcacggcggccacggtgaacaacccggctatcgcagccgctgcagcgaccactacgctgtccactctgctctctggtgctccttcggggatcaccaaacatctgctcggcttccctttcggtcagtatcttcaatttttttccttccctttttgatctctgtagtttctcttgtcttacaaacgttcctcctcctctacttctgcctccttacagacacactcaagacggtgcttcagacaagctcttatcaagcttactctggtcggtttcccgcgatccaagcacttagacgaacggtctcccagcatgggatccccggcctttaccggggtggcagcttgccttgcctcgcctggaccgccacagatggaatgctctacagcgttctctgggaagctcgacggagactctttgcagatggtcactctgcatggacagaaccagcacgaaacggtgaaggtagaaggttaaacctccagggacaccttgtggcgggcagtatagctggtctatcagtgtgagtctcgactgtgtctgcctttctcacttacgatctatgaagatgttggctgtccgatttctttggctgaacgtcgatcgaatctttcttgtttttatcctccgaacagatctctgttcacccatcccgtcgatgtctgcaagggtaagattttctgtgcatacaatttagacttgcacttcttatctgacttatgtcgttgttatcgggccttccctctctttgttttccctagttaaactacagagccaactccgaatgacaccgaattcacccccgttcacattcaactctcatcagacatcgtccttggcgatatcaaaaaataaattgttcaccactaggctgcctgttgtccatccgccgtgccctccgtatcctcttcaatcccaaccggtccggtcgaccggaacagcccccggtttcggctcctcatctcttcgtcttccccttcgcccaatctttccgcccaaatcaccggtagaggttaagttcacatctccatgggactgttggtctcaagtcgtcaaggcgagaggcatcagaggcggactctacaaagggttcggatggacctgtctgatgagaacaggaatgggtggcatgttttgcacgtacgaagccttgctgagagcgactgagccgatcaaagttcccaacccagttaggactttcttctctggttctatagcagccctcatgttctggactgtgttcctccctggtatgtcatttttcataatagaatcttcctcccgttgcttcttcctgcttacaatcttaattctcccttctccatattcaaatacttgaaacagcggatgtaatgaagtccaagatgctcgcagactctcaccttcatccgaagtatcccacgtccgcacacgccatcaaaacggtttggctcgaaggcggaaagaaagtctctgcgttctggagaggcggaggagccgtcggattgagggccgccggagtgaatggtaagtgtgcccccagcgttctttctgacgagaatctattgtccttcacctattgacatcattaacttttcctttttcaaaaacgtcaacccaacaggtgtcgcgttgctcgtttgggagggagtcatgcgaatcaccggtaatgatacgttctcatagggactatatcttcatccgtagattatctgcatatgcttttgccagtgtacttttcttgtttctctcttccattcttgatccctcccttcttttagtgtcagcctctcaatagatctcaactttgttttccctatttcaacgtatactgtatcatcatcgtccaacatatctccgttatctttgaaccatctatctccgactttttccttatgtcaatttctgatattaattcccccctctcctctctctttctgtctcttcattttttcctctgtcttttctcatcggctatagatttatattcgttcatgcgtacgcattcacatccatccttttattcccttgatatttcagtctttgtctctacctctatctctaactcaccttaaactttgctgaatttgcctagcgctttctccattccctttctctcatcaagactgtatctatatcttggtctgtatttgtaatattcaatcaacaccaaaccaaacaattcaagctgtcctgtcctcttctttttagttattcatgcatctctatattgtctctcttcctcttgtccatctctaaatttataacctgaagtaagagaatagctatttgaaaagacgtaacggatgggaggtaaacaactcaaatctcgaattcgacagggatcccgtacactacaggagcagcacccgtcagatacttgagtttacacacatccctcgacgatccgaccgcttccgccaaggttcgtcctctcttcgctctcttctccttgttcttcgaggtttcgatcttgatctcgacagtatttgacttggtggttggcttcgatgattgcctcaaggaccgactcaaagttccgtttccgttcgtcaattcccccccgttgaccgcattatcggtatgtcctttcgaagacaggccggatgcagaagacggaggagaggaagaagattgaacgagggaaaggacgtgctcagagagacggtcgatgtctttgtctgtcacgtcccataaattgcctaccaccgttgggcttttttttgttttttgtttttttggaaagttgcattggaaaagaagccgttgttcgcaaagatcaataaaatgacaaacagcaagaaggaccgaaagaagggggaaaaagactcaggaggactcaccagccagccaacatatagttccagggcgtaccgttcctatcgaactctccgtaatccttcaactgaccagacgaacaaccccagagcatgacgctcgcgcaacgcttaagagacctaatcttatgtgatcggatatattgttcggctccgccatgtccaaagtagctaagggaacatcccaggtgcgtttggtttcaattttcagtatgaataacagagttaaaagggtaaaaggccaaagaagagagaatggtactcacacgacgatatccatcgtggagagcgcattgacgaacttcaactctgtaggcggtcttccaacaatacctctccacccaagtttatccatcttttgaatccaagatgagaagtaggattctgtctttcccaagtccccactcggattgagaatataaaatcctcgtttaccattcagcgggaacgagaactggtcaactccttctctttcgggttttgtctgcgatagtgaggagcaaggcgaggaggaaggcaatggttgtcgagtaaatttaggagttttcggcatcgccttgggaagatctaatgttaaagccttcattcccaacataggtgtcccatcttcgtcatcaacatcttcgtcgtcatcctcttctgaacttgatggaccttcgaaccgacgtttccgtaacaaaagtcgatcttggatgaacgccatcgacggaattcgactaacagatcgaccacgaagtgacttgatagattcccatggaagaggttgaacttttcggtccaacacgaggaacgtgtggtgtggtagcccattcggatcagaagacgaaaggctcttcggttgttcggctatctcgagaagttctcgtagtttgagaaccatctagttgtcaaaatgaataaatatgtaaatatttcgttcgatttatccctatcttgggacaaccaaaacaaagaaagagatgctctggaacacacctcatcaacatctaactctgcaacagcgacatctacgccatgaacctgataaagatccaagatgaagtaaaccaagtcttctaattcttcatcccgacttgctgaaggaagagtggcgaagcagagtagcagctcatcatcgatatggattttcgaagccttcttcttgtcagaagcggtatacatgcttccattgaaaattcgctccagtcccgcacggaacgtgtccagagcttctgaggtatgccgtccaggtggattgaaaattgactacagagtgcgcgcacatagacacacaagaatttattctcagtaaattagcgatctccaacgagttaatgttgagaacggtgaacaaaccttgaaggcacctagccagcaaaattctagattccctagaagctcttccattcgtttgtccagatctctcctcattgcccaccaagcggccctgccctctctctcttcaatctccttggcctgtttgccggtttccttgctctggttgacaatatcctccagttcttcaattgcatctgtgaacgaaaagtgttcttcctcgtcttctcgttttccgtgtcggtcaagtggaagtgaaaagacaagaggggaaaggccagtgcggtgtcgagtaacaaataatttcgtcaaatcttcagtcaccgagatattgatgacagaccaatttgtaggcaagggaattgacaagtctagctcatatagaggttcgtcttggtatcgcctagcgacttgagaccaatagatatcatcttcgtcttggaatggttcattcttggttttcaaagcggccgcggaagaagtcgagctttcgacaaacacaggccagacgagatcatctcgaggtgctttagatttggattgtatggcttcaagcaattcatgtcgaagcgtcgtagatgaattatggtctgtagttacaaaattcagacatcaaattttgaaattcagcatgttgacagaaaacatccacaagcttaccaagtagccaagcggtcttgattgttaacaaagatggatcctgtcccaacgaagtcttgtatgctcgtagcaaactcaacgacaaacaagcatccctggtctgttgagcccgggcatgagcaccgttattgaaaaggatttgctcatatgctttctctgccaaggtgatcacccggtcgacagtctttcggattttcgtatgaactgtagacccgctgctggacgtccccatcggcatggatatcactgaaataaatgaaactcagcattcagaacagattgaatcgggatttctgatgagctaatcaaaggagaaattgaaactcacaagactctgtcaacgaacacaacgccaggtcgttcttgaagtcttccaagactttcaagaacgcggttcgggcttgatagctatatcgatcgtactgtacatccaaacagagaggaaaaattgtcaaacacttttagaaacataatagatctaagtgagtcgcaagcttacttgggtctgcaatcgcggaggtagttgttctaactgaacttcaagctggcggacagagacaccttccactgttgtgggtgaagttttcagagtgatgactgatccaggtaaaaaactatttgtcagtcatctataaaatggtttgaccgtctgtacaccagactcactcttttggctaagtaatagctcaagtagtggtgcatggagtggctcatctttcctcgaaaccgaggaacgtcgacttcaagaatatattgacatcaacaacgttcgtgaatacgccagaaaacaagacaccatgcttacctggtctgaattggattctcctcgttgaataaattctcacaggcttgtaagacctcaagtcctgcatcatacgctgcgaggacatcttcaggttgatcttcaagctctcgaaggcgggcctcgatataagcaatctctgcatgatctgctccacatgtctatatcaatcatgatcagatcttagtttcagcctgattgtaccaacagtttattgaggacagatacaagtagaactcactgtcatagatcccaattgtgcttcatcaagcaaaagccgagcttggtttatctgtccgatataaagctgcacagcagcttttctaatcagtgcacgattagctaaacctttggagtcgacggccaaggaataattctgcgcttgctgtagcagaaactcggtatccctggatgtcccgcgttgaatggtggtcgacgagaaagtaaagagacagtcaagcaagccctagaaatatatccaaacatgtgaagaagttagcacctcattgttctttgtgaatattgttaactttgctgaatgctctcacttctgaaatcctccaggataaacttccgatctgcaaacgagacaatggcgcggattgggacgtcttcactcgtgaatctgccgaaggctgagatgctggatcgactggaatagccggcgtcgtaacccgaaacggattctccgtttcagtgctattggctggctccttggtcgtggtgacagcgtcgagcgctttgggtgagactcgtgcgatattatccgcagctctcgtccaaagacggtgcgattgagcaatacttgatatcgcggttgcaaagtcattcttgaaaggaaagaagacaataatgacatagacaggagaaatttagtcagggtcattacttggccttactgaaaccttgctcgcacggatcaaaacataccttggatttttgaatcgcggcggcaaccatgagtgcgacagccgcacgctctagtttcagtgacttatctcgaactctggctgacccagccttgtcctcgattatcatcatcgagtcgttcattgctttttgatatgtcaacagacttcattcacgaaacaacccacacaagtagttcggcttatcagcagaagttagatgcatttagactgtttagggttacaggagcttaccattctccttcatctccttcgtttatcaagaattgagcatatctcaagagaaaatcaactttcaccgctggggacatgattatctccgactcaagtacgttcatggaattgatcgtcgacgtaaaagttgttctcgctcgggagctcttccccagcttggtgtatgctgctccaagatgggcagatgcagcgacaaacactgtgaaattcacgtatcaagagaaattttgatctcagggtactgtcgaataaagaattcatcaacaacacttggaacggaccatcaagcttagaagcatctcccttcgtgatttgccgaataattttcaaatgctggatcttggtaagcgtgtgaccaagcattcctaacaaacttgatgtcatttcttcaagatattttgagtaagatgttaaatatcgtcagtcggaagcacagcaaacagatttgagcccggatgaacatgaggtaggacgtacctaagagagagataagttgatcaacttgatcgaatagcctcacttggacaggtccttctgcacaatcttttgctgaaacaacttgagcgacggccttagatcttgaaacaacacctacgaacagatatgacagaaaacatcggtcaataggtgctcttcaaaatttcgattctgagtatcaaagaatctaacttacgtcttgtcaaagcagctgcataccacgataggagattaatcagagacttcatcgcatggattcgagataaatatcatcatacttaccagggacttttttaggtggtgaagccactttgattttcttcatagcatttgcactggcctgtctggttcgaggctgtctcacagactctaccaatgtctgagtttgagcctgcgcttgtggttgctttggttgcttaatcgcatctgcgatcctttcttcggatgagaacaacgacttgagctgcttagcggcggtagatgcatgagaaaggaccagctggtcgcctgctcgagtacagtaagcgtagatgctagtccaaagatgataagtcgctcgatattggggagcaaacagcgcaagtttcgagtcttctttgaagttctgagtggtttcgcaaataagggggccagtaaagcagctgatgagataaagcatgtcggcttctctgcagtattccaatcactcacatctagttctgccagagcgtctacgtctttggttacagaatcaatgtcgcggccactagagacaaagcatccaacgtgagctacagctgcaagaactcttaaagtacaaatgagtcaatttagatcagcaaatgttttatgtagttgcactgtatgccagatatttggcgttctctcgttgaaagagattgaaagcgagatagagacagacctaagcctcctgatgggatgaatatctgcttcgtagatatttaatagatcatccaacacccttcctacaaccttgcccacctcttccgattctaaagatcccgtcatgattttcagctgccattctcccaaagcaccaagagcatcttcttctatcgatcctctcaaagcactgatgagggaaacttgttcagctggaagttgaaggtcaaatattgcttgaagagtgagacgatgtatcagattggcggaagctgttaattgtggaagcgtgaaaaattcagagatcggactggttttggcgaatgtggacaactccacaaagaacgaggttggaagggttcggacagcagatacaaaagcgctatttgcattctgcgaagttcaaagtcagggtgtatgtacggtcagtcatcgtgttcgaaaaaaagggaaaggaatacgtgaaggaagtaattgcacacagactttaagatccccattcttgtttcgacagcttccaagcaactcccactttcggctcatgccattcctcaatccagcccagacttcttcctctccaagaccgtcgagttttcccaccaaattcaacgcgtcttcccccgattggcaccccatttccgcaagtctaatcgcctgtgagccttctccaattttatacagcccaccggcgcaattataggctgtgccggagatacatctagatagattagcacattccaatagaagtggtttcgaggaagggagcgagtcgagtgtcgtgcgaagatggatggcgcggttcagtagatggagtgttgaggcatacgtggcactttcagctggagaaaagttcacacgtgcaagaacaagaagggtgtcgacagaggatgcaacaaagtcgatcagaatcttctggacagtctccttctctgacttgccatcttcactcctattctctgtcgaaggagccaggcaagcagaaacaagtctctctgcaccttcgacaagcttgagtaccgactcttcggccaaattcttcttatgtttggatcgggttatgaatgttatacattgtctgcggaatctctcggctgttttgtaagctctctcgagaattttgatgtcgtggtttctgcaaaggaccttgaacaaagctgatatggaagatgtcgatgaaaaaggctcgtttgaacatgtcgatgtggttgatggcgttctgggtcgagaatctgtgtgatttcaatgaggaaaagtctatcagtaatggaactcgaattacacccaggggaaaggattggtcgatagaaacgtactgtcgtcatctttgactagtttatcaataaggactgtttccttcatcatttctgccaataccctagtgatcaaaacactatcatcttcactcttaatttcctctacctcgacctgccctcctgagctctcaatgagggacatcctctcgatccccaatgtctcctcggatccatcattacccacacgatgcttcttcaacaggtcagcaatgatggtcaggctattgagatcgcccactttggcagcaatcttaccccaaagatcaaccaacctctcccattctttgcctacaaacccatcttccaacacccacaccccctgcaggtggctaatgagcttacggagctctttcagagacactttcataccttcctgaccttcaacgtccctcaggaagatctgcacacttcgaagtgcctgatcccaaacttttccctgtttaagagaaggtagtaactgaggcataagctcaagcgagattgtgcgcaggcggaaaagcgtttccgaagacgtcaagccatgagggtttggaggcgagaagagcacgttgagaagttgaagtatgtttgagtttgggataggagaggccttgagatgaacgaaaagagcctggtttgtttgaaggaagcacagtatcgcctatatcaaatttaatgcgcaataaaatggtttcaagattgattagtccttgggcttttgaaagaagatgctatacaatggagtgtcatcactcacgtcgagtgctcccgggtgagaagcttgacctgaaatcacgcctgctaaacttgtacatatccaagcggaaagcacgctcttcacggcgtcatccagttttttcgtagactcatcggcttgaggaaatgtaattgaccgcaatgtagccgccgaatcctgtgatttcttaatcatcggtgtgcacggcaagtctgaagaagcaggtatctttttagccgcagctgtggtcgttctagaagaaggagttcttctggcgattgtctgcgtctgagagagtttcggagtggaagtctcaagcttcggcagaggggcgtggggatacaggtcgatgataacggagtggaatgtctcgactattgaaacggacaggcgtgtctgtcataacaaaaaaggtaatcacgaagttcagcgagcacgttcgtttgtacgtcataattacaggcaaagagaagagaattcataccaagcctagcgcattagacctcgtcagtaatgacacaccagccttggcgagcgcgattttggcagtaacacatggaccttgacagactcgctcgagcgagatagctgcgcacatcactagagcctcgacttcatcttttgaagctaggtttgaacggctaggatttacagcaagtgctaccaccggcgtggaaataaccttggttgaagaagcggcatttcttccggccatcaccgattgagctggcttcctggctggtgttttgaacacagatggcgtagctttggaagctgccagacgagaagaagaagaggaaacgggagtcgaggatggagaggaagcagtttctttccatccggactgtaccattcgatgaagagtagcaagggaggcattaaccatccgcatcccgaaccgaactgcctcgtcggtcgggagaggctcaggaaggccacctgccttggtagatgtagatcttgatctggagaaggtcgttcgggctgacacactgggaggtattcttgatctaatagacgcaggagtagtagtggtgatggctgatttagagattgatagtattgaaaacgacgaagatcctaacaagatcactaaattgggcagaatatctgtaggagcaagaggtttgaaagcatcttcaacagatggaaaagccgtaaccgaggccagaatatgatccagggaaaagctcgaagggatcgaagaaccaaccgatggatcggtgatgtttggttcaggtggcattatggtttactccggcttttcggctgagttatccaacttgagagtcaattaggatcaacatcaactggagaaggaaacggaaaagaaagacagtcgcgtcggatgtagagctgtgctggcacgtgattttgtgccactcgtgggcttcattactcttcggacgcgcctgatttcctttcgcgttttgtttttctgaaccaacgggaaagaacacacgcactttcctgaggccagaccttctctccaacgccatactatcctcaagcaaacagtatgatcgagaatccagttcgtatatctggattggtttgccacgatgtttcctgagccactgtgttgcttttgctattcgtaacgctcacttgcacaacacttactctccatttaatctcatttctatagaccactacggcttcgcgtctacctgtcctcaatcgaccgccatcatcgcctgttcgggctcctgctgtatcatccagctcgggcatatccagctctgcttcgaatcatcttgctccgaaacgaaaaaacacatctgactctgctatttctatagccggtcaacccccatcgaaacggccggcccactcaactagaacttcctctgccccttcttccagatcggcttcatcgataacaacgacgacaactaaccgatctgcctatgtcacccggaagcccctctccagtgtaagcactacttccaacaaaccgggagcaacgactcggtcagcagccgctgctgctaccagtacatctgccgtgggaagaagggcacccgccgcatcgagcaactcgggtacgcctcaagtggggaccagcaggtccatcagttcgaccggttcagcagggtctattagatcctcaagctccgtgagcagggggctgaccgcaaatagagttccaagtggaggtcgaagtggaacagtttcgccggattttattgttcgtcttaccaagatatcatcttactcattgtcgtcgggtggatgcaattcgctggtgttgaacgttcagtcttgtttttttttctctcgttatgtcatcaggaaacaaacggacgactggcaacagtagagaagcagatgttcaacatgaatgagctgctcgctttagagaaatcaaaaagtaagtgtcaacaatgtcaggcctgctgattcatcctatactcaagagtatctctgcatcgatttggatcagttatcaatctggaaaccgcgcaatcaacacttcaatctcaacttgcccagaagtctaccgaagcggctactgcccggtctctttctctcttgaacgaagagctcctacgcgacaaagctgcccgagagcgcgatctggcttgtcttgaaagagaacgagaagaaaatagtcgtcttcatgaagaactcagaaagagcagagaagaggtgagaaagatcacaggagaactaaaggatattgaggatgagaagaagagggagttgaatagaatggaaagtcgggtgagggatctagaagaagaccttgagacggaacgaaagggacgaaagagagagaatgttgagttggaacagacgaaggttcgtttaaaatacgtttttctagctcaggaatctgtctgggaagaagacaactttcttaacttatacacctatacttctcaatgcgtagaactcactgtcggatatcactacacgatccttaacggtcaactctcaattgactttcttccaaaccgagtcttccacgctcaagaacgaagtgactcaactccaatcggctttgactgaaagaatagaatttaccacacgtgagatcgaggctgccgcgcagagagtcaaatcggccgaaagaaagatgagggagggcgagacggagagaagaaaattgcacaacatcattcaagaattgaaaggaaacatcagagtattctgtagagttcggccgcctatcggttggttttgcttgcgtcactctgcctcctacccaatgattaaaaaaaactgactgtattactctggattcgtgcgttcttcttctagtggccgatggtcaagtagcatcaatagcttatccagaccgagacggaaagcaaattgtggtcacttcgtctcaggatgcagcaatcggaggaacacgagagcaaatcatccccttcgcattcgataaagtgagctcaaatgaatgcttacatcgttggtttagagatagcgcacagctgatttgtaaaaatatcatcgctcgcataggttttccaacctcactctacacaaagcgatgtgtttgaagaaatttctggattgacacaatcagtacttgatggctataactgctgtatttttgcttatggttagctttttttttgaaacaccttacgcttctttatcatattgtaacttgacagcgctccttctgcaaactgctcataggtcaaactggagccggaaaaagtttcactatggagggtggttcggtaagctcttccttctcttgtgctgtatcaatttggacccttggcgcctcttactgatatctgcataaaattgatttgatcttaaaatgacagaccccggaatcaatgggtatgatacccagggcaatcctccagatattcgaagtgacagagtatctaaaggaacaaggttggaagtatgagcttgaaggccaatttcttgaaattgtacgtctttctttcgtcatcaaatataagagtttcgagaggaaacaagttgctgataccaaggaacttgcaataatacgaacaaaaagtacaacgagacattgaatgatctattggggaatagcaattttgataataacaagctcgagatcaaacatgagaaagtcggaaagacgaccagaacgactgttacagatgctacaacaggtaggttcctccattttacgactgatcttcttttcattcgaatgtaactgattgtgtaatcattctgcttacttgctcttcttgatattttctaacagttcggttgacatcacctaatcaagttcagggtctattggaacgagcgagaagcagaagggcggtagctgcaacgttgatgaacgagcggtcttctcgatctcattccgtgttctcgctccgagtaacgggatccaacgccgtcaccggtgaatcgtgcgaggttcgttagttgaaatgaatcatcctcttcgtgtcttttttctcaagtctctcgcacgctgcaagatgcattaaggctcaatatctctctacctcttttacccttccagggagtattgaacctagttgatctcgctggctcagaacgacttgcgagtagtggagctggcgcagacaaggatcgactgaaggaaacaatcaacatcaacaaaagtctgagtgcgttggctgatgtgatcggtgcgctcgggtcgacttcttctggacaagcttcgcatgtaccgtataggaactcgtaagcgtcaaatcttcttctttcttatctgaacgcaacagattgctgacctttagacaaaaacatatgatcgtcatttcatttgtctatgtgactgataaaactgaagtaaactcacataccttctccaaacttcgctctcaggccaggttagtcaatatcttacaaagacgtgctttgatgaagtattgctttgaaacttaatggtctcacttatgtgattcatcgaaacgatccgtttgaagagcaagactttgatggtcctcaacttatcgcctctggcggtgcatctcaatgagtctttatgttcgcttcgatttgcgaccaaggttcgtctccaacatttttgtatctcagtggatcatcgtctcaacaagatccgttaaaatatatgtactgaaagttatgtgcgcgttcttcgtatttttatcatctttgttctgtttgactttgcaggtcaactcgactcaaatcggatctgctaagaagcaacaaggtgcacgatagctgattccaacagttcagccagacagcgaatgaaaacctacggctttgctgatatgcagccatacgtacatatcaaggctgtgaggcaaaacggtatttcgttcgatgtatttcactatcatctgatctttgaaacaatattcttcattattgttccactttcttcttccactattttccgttcgttttgcttcgtggccgaggatgtctcatttgtgaacttccttagttccactctctttaaaggttttcttatgcctccttcactctcttcttaatcttcctttggtttttcagacttttctttatacatcagttcgcttcgatttgccttttcgctcctcatatctacaacacgctcacttgatcgtgaattcttttcattctttcgctttccgtaggaattcctacgagaatcatttgtgtctcattatgatcataagactgctggtaaaacatataatgaacatgagcctgtacagacatactctttcccaatccttctaggtctaaagtccagccttcctctcttcacccttgtcgtccaaaagaacgttcctctgttccaacccgtgtacccggatccattctgctgatctagaaattccttcttccgtcaactcatgtccacaatcgtactccacgttttctaaccgaccagtcgtgccgacgttgagtttttcaagaaacgcgctagtgtgggggacatggggtacaacttttataagcgtaggttggcaaccaaaaggaagggttcacagtggttagcctacatagacctttactgccagaaagccagacatgaagactcacgtctatcttttcttccagaaagcaccaaaattttctttccgataaaagggttttcctttgcgctttccgcttggaacgagcagttcacaggatcacgctgtttgatcaaagctcggaaggtgtccgggatgatcggcggttcgaacttgagattctgagaggccaatcgggcggtcataagagaggcgaaatctgggcaaccgatgatactgcaagacaggattgaataaaagtcaattatgaatatcgggctcatttcagacttgaagatgacttacggaataccgatctccactcggggctctgttatttatgatagtcgataaacaaatacagaaacgcatttagtcctcggcactgttcagcttttttttcaaaccagatagagtgattatcaaataccatgtcgaaggacagtccaagcagcatgtccacctagactgactccggcaaccatgaattcttcgattgttttgtcaccttccgggaatagaagcgccggtaggaagtcaatcaagaaagacacgtcctgagcagtcccacctgttcacgcaagcagggcatgtgggtgttagttttcacgctcaagaacgagatcttgagacaacagtaagatgtccaaaacgtactgtagacggcatacatatccaaactgtttatcaagaaccgacagacacaacataatccatgagctggagaagaagtcctgataaagtgtgacaccggaagaatgctcacgcgtgcataggatttccctgatcatcccctttcgatttgaagcttctgttgttgagttcgtcaaccattcgatgcccgtggttacgttgatcctgatggattcctcccacaaatagcacaaatacatacagacatgcccggatgatcagctagatgcagaagcaagcacggcgggcagtatgaatctgtgaggatgaccattgacctacaaagttgatgattatgagctcccgatcattggatttcctctttgatttctccagtacaacctcacaaaaatgatgcatgctagacttctcactcaatcttccatgaagagcgaactaaacaagaactaatttgtgaacattgtctaattcttaaggggaaagtggatacatatgagtgctcaccaacacggctattctgtccgatcgcaactgatccaaaccataaacatcgagagaaagaccggccgcatttattgtcttaattgccattgtatcgtgagtggatcgatagattggtatgctatctatagatggaatgagatggagatggacgaagagacgaaatctatccgtacctgattttcattagacagtttgtccgaattttgtgatgaaaacatttcgattcttgtattgcttctgcttccttctccactctttggcccccatccgattgcgtccctgccggtttgctttcctcacaacagttgcttgtttgtgtttactatctacgttggtcattcataatatatcttactcgctcatcggaacagcctagatacccttacggtactcgttagtccgtgtctttgaattcgtcatattgtgtgtgtgtgtgtgtgtttatgttggctgacctcatggttattgtttcgaggcagacagttcgttgcttggcgcatacttctcctacacccaaggcctttcttgggttaccgtatctcttctgtcctgttctaaggcattttctctagatgagtagtcctcgaacgtcagcctctggtcaatcattctcggccgtactccctccactggttcctcttgatgtacccatccaacactcttgcaacgtctggcgttctgatcttcgagctctatttgaaaaggcaaaggacagatttggcgacgtcatttgggatgttggaacatcaactcaggatgaaaaacctcgtggaattgaaagtttggaagagagtgacgagaacgatttgacaacgaggttgttagctagatcgcttaagaccgacacgcaagaggtaatagagacggtgtggggtcataaaggtttgtcgttcttgttctcccttcatatagttactgagtctgttctccttctagcgcaaagccactatcggtgaagagaactctgacgcatagcttggactctgatattatctacttcatactaaaacggggatcatttcacaatagccatcatatacgcccgtgctcctcccgcctttcagtatcgctattttccgcgaactgttgatcgctcgtccacccctggctttcggtcatcatcagcggcttacctcgctttaccaaactcagaaccaaatacaatcaggaccacctcacctcttagggttccgtctcaagcctccgttcattcaactgcctcgacataccggcatactcccactcgaatcagagtaggcgtaacgcctcagatgttcaaagctgagcttgagtggttgtacactggcgaagggatgggcgatgtggcagaatggctcaaccaaaatacatcacttcatgttcagtcaagtgtagatgaccatttagaggcacatcaaggtctctttgggttaggtttggggttggcgctcgagaatggagttgctggtgtagatgatattcagaagattgaaggtcgggaaggcgagaagagagagagtctcagaaacgttcgtcagattctttgcaatctttcttcttgcaaacataaacttatcccgaaagactctatttgtgttgcactcggacatatcttcttctaggatctagtatacatgtggcgctcgaaactgtattcggatgtcaagattgtacttccgtgcgagtcacttcacacttcgtcaggatcttcaaccataaaacgaaactcatttatagacagcaatctatcagacgattcatcatcgtccacatgtgccgttttctccacacacaaatttatcctggcctccaggtcaccttattttgcttcgttgctactcaacacgtcaggcttccggtcaggagactgggaggaaacaaacgagatcgagcttctatcacctcctttcactcctgctagcgttcatttttgtttgggatacatgtatgtcacacaacagtaggtcttcgacaggttacaatcgagccgactgactgacgtcagctatcatctttctctctgccatctgttcaaacattacgatcactctaggtacgctggaacattagctttctcaaaccgaacgtacgacctcacaacagcattcgaaattcaccgttctgccacgtatctcctgatggactctctgcgcgctgaggtagaatccagaatcattcatgagatgtgcgatggccttgacctttccctatcgccgggtccatcaaaactctgcgctcgacgcgttcctcgtgtctggcgatttgctggtgcttcggatgtgggtgctctagatttagaatcaagaacgagagcatgggtcgtgcggcattgggcaagttgttgggggaaagagattggtgacgcagaagagcacgagcgtaaagctttgttgactaaggttaccgaaggcttgaattcccaaagtgtttgtcgctatcttagaggagtcaaatcagtcaaatcgaagacggactcagagctaaggacaacaacaggccttcctcgaggtttcaaacagagtacttgggcagagaacttgatcgggatggtctcggagatagaaacgcaggctaaagaaatttggattgtccaatttggggatgttgtgcgttcaaaaggatttactgagcttctgagtggaaaagggtttggaatggacctattggaagaacttatgaccgatgtggtcaactcggccgctgatgtgaagggatgtaagcactccggaaaaaattatcaggtaactagttcttcgttggtctcaagcaaccctgttaggaggagaacaagacatctcaagagaaacttttgtcgatcaatttcaaacagaatctagtcaagtcgattctttctcccaccagaccggacacaaatgagcctgtactcagtcctggttcagccgtcagaactatcatagagaacagtcggaccaaggttttggaacatctcagacgaagatggctgcaagtccgtgaacattccggattcgttggtcttgaatcttgggcattacaggaaattagtgatggtatgtcttttcctgagtatgctgtcattctatgtcgtatcaagattgcaaaatcggatttgttcttggactctatgactaacttattacatggcttgacgacagaaatcggtcagccggtagaggaacttgttgctccgcccctttcacctttcgtcccccctactcgtgctcctccaatactttcaagctcggtttctcgagtagtcagtggctcgaaggagtctgtttcctcaaattctatcaacaggtccccatccgctcgacgacttgatgtagatctgaagtcagtgaaaaacactgaagctggaactatgtccagtcgatcgacgatatccagtcgaacagtagctaaacctcaatcagctaccattccagcgagatcgactgtcacaacctcagccgtttcaaaatcatcgtcttctcctcgtccaccaccaggtgcattgacgactacgcgcccaacgtctgaaaaggcgccactttctaactcaacctcgtcagtatctctttcaggaagaaggtcagtaggtggtgcaacagtatcagctcgttcatcaccggtggcagcggcgacggcggctaggcctgttttctcaagtacactacgcaatccaccaacaaccgcttctagaacatctacaatctcttcatcaacatcttcctcttcccggaccagacttacgtcttcgggcaagtccgcacctgcgtcgactcccagctcatctattatcatttcctcctctactatcacaccttctcttcttaccacctcaccctcaacaaaatcagtgaacggtatctcagaaattactcataagcctaggccatcaaactcggtatcaaattccatgtcgccgtcaagcaacatgtcgactcaatcgactctgtctaatggctcttccaaaccgagagtgtcaaacattcgacaatcaccttccacaacttcgttttcaaggttgtcatcaccgacatcaacgaacactctctccaagatggctgtcacaccaaagacctcttcaatttcggctcagaagacccctgttcctggttcgagagaccggttgagctcaaccacgtcaagcatgagcattcgatcgtctgccggatcttctcgaacttccagcttattgacttcctctaaatctgctaccactgctaccactactgctggtaatcgaacgaggacaacgacgtctccatctatgagatcattgacatcatctttgtccacaacgccgactggagctaaagccactaggcagagaatgcatacatcccccgatataccaattaaagctgctccagtttcaacaaattcctatacacgctcatcaggcactacttcttcagtgggcctgatgtctgtcactcctccgctttcttcattgaaaaggactgtttctgctgtgaagttatccactgcatctagagaaacttccaagcaggatgttctcaacaaaaaactgacagtgtcgaccaaaccgattccgcggtcggaatctgcgctgtcgagcaaaagctcgttacttaactcaaaagctgcctcggtggcctctctaaagacgatcaaaccatcggtttcctctcattcgatcaagcggtcagatccggctccccagattcaaccgggacaggaagttcgatcacctttgaagccaaagcagactcaaacttccactccaacgacatcttcgatctcactcgggcctcccgtacacacccagtccccatcagctccttcggtctcttctcttctctctcctgctatcgtcaaacgcactcgatctcatccagcctctgcgttcgatcctcctaagcgtcttccactgcctcggaaacaactgaccctggatgaattcagcattcactctttgaccactggcgaggcgatcgagccttcgcctgggataagtctacatgtaggaatcccatgcattgtttctatccgagcgacaggaatgggttcagcaactagaggaaagaaggttcgctgtaaggcttgggcaagatatataggaagcttggttggacgagagggcgcctgggttggggtagagctagcggaagatattgatgggaaccagcagcaagaggaagagattggctgttggaacggagtaaggtattataaggcagatgaccttgggctaggcgatgaatgggagagctcggaaggagggacaaccaagaagcgaagaagcttaatgacagatagcgcgaaggatgaaatcctgagacggagagggatgttcctagctccggaagacgtggtatgttcttatgtttcacctgatctccctatgaaaaagcaaacgtggttcatgatgatatgccaatatctaagctgaccgggttttgcttctgtgctgtaggtttgggtcaagggagcatgaagtgatgctgttcctccttgatgattctcctctgccttccatttattacgcattttcttcgctttgcttgtgacgacactgatgaactataatatatacccttccatatcccaacctctctttattctatcttgtcacatccataaagacctcacggcgtgtgatgaaaggaagagttgtccagctatcgctcttgacaccatgcccgtaaatagattcgtttccttgtatattgaaatagagaagtcacaaatgttgaaacagggattttcagagtattctgttttctctccaacatccatctaaccatcatcttgccctttgtttcttttttacttttcttctctctcgcctctctttgtcatatatggcagctctacaacactctcagtcgaagtctgagccatctgacgagacaatggaaagcccaatatacacaatctcaactcccgccccttttgatcgagtcgccccttcccctttccctgtagacgagctgcaatccttccaacaaacttcttcacaacacgtctctctcggctcaatctcagcggagcctcaatcaattacaactgctcatccattaagggaacagctatctggttctcctcctggatatgcgtttctctcatcccaagacgatctatcgctgtcagataaatcgattccaccgggttacgacgatcagtctccatcgacattttgtacggccaggccaaaacacacaccatcaggctctccttctagacagctttcttataattccgaccaagaaatcagctcggaaaagaaggaactgaaaccagatccaaaaacttgggcgattgatcgtttttcggctgtggattcttgtgtggatgatcagaaaactgacgccgaatcttcaaagttgatagaaatggacttggctaagatgataggcaggggtaggatgcatgatcaatcttccgagtttttagcgggcaaggggaaggagagatccatagccaacgaagagttggatggagaggtcaagaacagagagttgttggatatctgggagaagattgagagggctcatggaactaggctagacgatcaatcctttgctctactggatagtcagctcacggaagcaaggcctgaaccatcgattcggcgaattcatggctcaccaagtttggagaaagatccatccgaaatgatcactgccgaccagtttattcaagaaagtaagttcgtttccttagatcagaagctcgcctcatctggccgatgttcctgacgttctgattttcccattcatcatgtgctctctcattctatcatctagagaattcatctcgctctaccagtccagctacgaagagctcgttcctgcccatgggatccagcgcagagcgaccgcttctattgaaaacaaactcggtcagttcgaaaatagccggtttgttcggtagaaaggagagcttgccgagttgagcgatcagcctgaaaggtcgattgtttgaattcgttgagagttgtatcagatttgttccttttccttctgtttgtctttctttcctcgatcattagtagcgcaaaccctgttctcgagtctttagttctcttcatctgttcgtcgttcttcaaatccggtctctgactgcaatcatgattttgcggctcagaagccatatcctatttatagcatttttttcgtctgtaacagtaaggcgacttgcctagataccatcaacaacaacaccataccatcatctcgtagtttatcaagctaatcaagctagcgctcagaatcttgtctcttatcattatattatcattcatatctttcttctgtacttttcgccattcgttttctcgctccaactggcctgcatgtcttattgcctctggtctattcaaactctactttccatggtctctcctctccattcttttcttgtttcactcaacaattgtatcctttcggtttgctgacatctcttatcttttcctctctggcatgccaaatagaaccataacgaagacagtctttcagaacctcgctatagccttgttgccgaacatcaggcaagcatcaatatcatacagctcactctccttgtcgaatatctcgagtcattcccatctacgtcgtcacccacctacgaactcaagatcccatcgagcaacccttctctaggttatatcagagatctttcctcgcaacgccggttatggacctttcaacttcctgctccttctcgtcaatctgatgatagcttagtcttcactcgctctcactcatcatcaaaccctcaaacatacaccctccgacttccatctgcgacttcaacgcgctccgaatcccatcaacatgtgcaacctttatctattcactcgcttcgaacttctcgttccaaatcactcaactgctctgaatgcagcgccaagatcatcgatttctcagatactgccagggaagattttcacgagctaccctcagaacactgggaagaactgatcgaaagctggctgtgttgttcatctatggagttggatctcggcagcggcaaagctggagagcagaaggagggcaaagatgcagagaaaatattctggcccaaagcaaaggagattctgggaggagagggctacttattggtcgaacaagagatggtcagagaaggggtatgggccgtgagacacggaggctcggtatgtcattctgcccgcattttatttcctgttctttctttctctttcttctttctttaaactttcatcaattggaccataaagaaagccgcccccatgtgtactcattcacatcccctaccggagttttctctcgcgcgcttgacctacattcttgtctctccgtcttttgcctgttatcattctcacatgtttttgttctcgatttttcatctctcacacgtctatcaattcgaattgaggtttcatcgcgaaaaacaatgtctgtgaaaaatcccatagtagggtttatcacatatgtttttttttccttcaaatgagacctttggctcgaatgctgaggcatgaagaagatggggattagctcaaaaacaattactgagggtcgatacgggtagaggcagacagactaggatgaggaatagtgtctccgaaagagactgggaggaaggtttcgtccctctgctatcttcgggtaggggagggcgaaaatttccttttgggtggttgatacatcgtctgtcctacaatcatccaaactcgagagtatgaattgaagagatgtgctcgtcatgtctttttgcttgttctctcaagctgggtttccttcttcaaacctttgggctttttaagctttgtgggcttcttcgcaagggctacacgagggaaaacaacacttttttttattttcttctctttctttcttctttcctttttcccccaaataactgttaactctagcaaacgtcatattcacttttgccttaaccaacccgtttggatccttgctattccatctgatcgaaattagactgagatatggcaaccgatcgtctgctctatctgctctttccctctcggtcgacgattcattcactctccccaaagcagcactttcaaatttactaaatacagtcttgctctcactgagtccgaacaaggtcttggcagtatccacgccggtcgtggtaacggccagaaacacggctggttgcagcaattcgtggcggcggagatgagagcattggcggacgcccatcgatgctatcatttcgttcttctggatgaagaacaacaacaggaaggagcgttcacccagaatgaaggcatccctcgaatattagtatgtttcagattctgctctgtcttctacgatatcttccagctacaatattgatatttgattgatgtcttttttatcctttcctttgcctcctcaaagatctggatgctgaatgcgaaccttgacttgacagttcggtcgtttggacctatccaaggaacacatcccgaggaccaacctgagagtgttcctcacaaagcgatcaaagttctctatctaccgcttactccaacttcgttcgttatctctctgctcggctttctcacttcctgtcacgatatgtcacttcttaacaagcactgcttggaacttttgcagagcaataccctcgacattcccgttgtcaaaagccgaatacttgccgtacccaaagattatttgtgataggctcgaagcagcgttggatcgctcatggaacttttatccaagggaggctagggagatgatgggtcttcggatgagctggctcgagagaacttgaacaggacgtgatctcaagatgcatgtgttcaatcgagagagaatgacgaaagagatcgaggacctttttatatgtttacatcaaatcagatgaagaaaataagcgaaagagacagatcgaacatgagagaaaacaaaaggatagatcaaaaggggtatgggataggggataaaccagctagcagacagatcttgctcagcttgccctcctttttagttttgctttaacgacaggaagagtcaaagcgaggttgtataaaatctacatcccttcgaggaagaggggagttataagagaaaaaaggtgaagtctagataaacactagatgaacgagattggattgatcggctctgctcttgcttcagaaaagtcaaagcttgcttctaagtccgggtcaagctccgctatgagagcactggatgggcaattggtcaaacgaaaagaggagccagataagaagaggaaggtgaacggatagatgatcagtcctttgtcgaacacaaaacggtttcagctcgacgagtgtcgttcagcccaaatgtatctgctccagctcagatgataaagaccggagaccaggagagtacagcagtttcattaagacaacaaagattttaacacgcacatattgtctcctctaatcatgtacagacctagcggaacgagctcgactggttcatcagtcgagaatagtcgttccacagagttggacaagatgatgttcgtatgcgggtcgtgtcctttgaagttgccctgatagagagggttccgcaaaaatcaacaaaagaaaacacgccacagaccagagaaacaccgtgttagctttgaggagacaaacaagacgatacggaagaggcgaatggaaagggtagaggagaaagaggacacggactgatattaatcttccatcatagaggagaacaaggacgtcgactgaagaaagttgagagagaagaaatagtgtgagctaaccaccgaggatccctctaatccatcaactgcactttataaaaagctagctagcttgctcaaataaagggactgacgattgatgtatctttctagactgcccatgatgacgggcgttggatgacggctgctgatggtgatggttaaagactaatcgaaatttccttcaacgacaacttttcctttgttttcaccttctcgctatcgtacgtttgccgtttctatattgatgttagctgcgatggatggaggaccacaatggagatgcctgcttgggctgatcctgatctgtcacgatcacttattgatcgcctcaagtttcaggcctcttgtttcattgtattctctcttctcccggctagctctgtgtagctaggtagccagtcagccttcgatggcatttacatctcccctggatatactcatacctggaccactttcgccaacgctatccaccctgtttctcggcatatctccgctctttatttgtggactcttggctcatctctcactccgagaaagtacttggatcataagattggcaattgcgcctgtgcagagttggatgttatggagattgatgggaggtgtcgcgttctctagtacgagtgttgattctcctttgatggtcctctcgaacgttgaatctgcaggcctgatccatcatatggtctgctaatgaaaatcatcagatccattgctgttctggatgaacaacgtctttggatttgtctgtgtgcttgcaagtcctgatacttcagatgttcacccttcccgtcactctgactgaccgcgcatcccggtcaatacagctatcgttatctctgcctcgatgtcttctgcctcagccataccggttcaaagctccttataccggcccttcctttctctcagggtatcagttgatcaccaacgttcttggtgattacttttatcctattcctccatactttgttccttctagtccattccctccatcttcccatacctctctgtcagccaggataccccagattgttcaatatgtgctctgttatgtaccgccggtcgctgccttagcaatcgccatcatctgtataccaagcacagtcgaggacgacttttccgtcttacgttctggatggttagggcttggattcacgttctcggcgggcatgatggtgtggtgtctcctaacagctgactggtgcctcaacaactggttgcaacaggcagccgggaacggaattactcagcccagaggaaatatattgaacagtccatggagatcgacaagtgtgcatgagttttggagtggtcgctggcacccacttttgacacctacaatcatgttttacaaagcgttgttgcttccgcctcgagatcatccgtcgggattgaagagacagttgacaaaacttgggactccgtttttgggattccttactactgctttagttcatgagaatctcatctatcctgtacggttttgtttttttttcttcgcaaacccgtccctttggaaaccgtcttgcatgtgactctgcatgcctgactctctgtgcttattcaattctggacttagatggccaacacaaatcgccccagtctaggctatctatctctcttcttcctgctccaaccacttgcccttctcctcgaacgcgccttccttcatctatctggaggaaggaaagtcagcggaccagcaggttgggtatggacattcatctggttagggttcacaggaagatatctggcagaggggtatgtgaggatggggttgctacgtcaactcaagtctgtcacggaatatcttggagccagtttgggtttatgattgatatcttatagtcactactcagaggctcgaatatagattgtttatagagatagaacgaaatgatctttgtctttactcaagctcccttggctgaatctccccaggaagcgacgacgtgctccgagggtaaatcatccggatacaactaatcgagcgaaagggaaaaaagaggttagcgagtgagttcaccaaaaaagacaatatatctgagaagagtatgtacctttccagggttccttttagatcgtgttcatccgatgaatacaacgtcaaatacggcgtcaatcacttgtcttgcagtataggcaacgtagaaagggaacagtgcagaaaagaatgagaagagggagataacgcacatgattccaagcgggtcgatcgcattcttgacggtcttcatcagattgaccgtacctaagccaagctcggatatcaggtattccttctttcctactccgactctatattttgcgcattgttcggcgcatgcaagacgaagttgataaatgaagaagtcagagactgtactagatagaaggctgttcgacgacgatagtgaaatgaagtgaaagatctaacccgtgctcgccagtacatgttccttcgagagcgatagcacgctcaaccattcgatgaacagctccatccgcaatctcatactctttctggttctcgaacaactgattgagataaaacatcgtaagaatgaaagatttagtatgtggcatgctgatcatgaatctgagatgatcctcacaattccggtgtggaagtttccatcaccaacatgtctgttgatgtgaacaaaaagtgaatcagcactggactacaaaactctcctaaaatcctgatgcacgcatgatgagagatcaagaagaacaacaaattgcttacccaagtacagcagctgtcaatccgcattctttcaagtcctcctgagtagtcttgataagctccgggagcttgctgacagggatacctatatcattccaactcgcagaactagtcagtttttctgaatcatgtttatatcgttcttcgcgcgatcaagctagaaagagtatgaacgtacagacgtcggtggaccaggatttagcgcctgggttaagcgccatgatcgaccaatgggcaacctatcaccaagcaatataaataaacacagataaccccgaccaaattcctctacatatcagcttgcatgaagatggaaggaagggtaaacaaagacaaaggatgaaggaatttacctttcgaccccgccaaatttcatcgctctcttctttcgaagcagccgctcgaaggtcttgtcctccatatttaggaacaatctcgctaaccatggagtacgcttcatccatcatctaaaaccacatgcgctcattgattaataccgttgcgcacatgtactctcaagacatgatgaggaggacaagggagtaagaatgaaggaaaacaacagaccttttcactaccctgaaacttgaagaagatggaatccctcatgggaaacttctcgtttgtgagggaggcttgattgatggctttcatcatgatggtatcacataattctacacattggatcggtacaccagcgttcaagatcttttgttgtcgtttttttagggtactatgttagtattacgcataagaatcaaacacccgagaagcagaaaagagaaggaagaaacagacctcatatacagcctccgaggcctgcttgacgtcagggaaagagcaaatcgcaactcgagtgggaagaagaggtgctagcctcaaagtagctgtcaaattatacgattcaatacaaatcaggtaagtttacagagaaaccgtgaatatgaaacaaccacgatagcagagatatatgagcaacacataccttccctttgatagataggatgtggttaagaaacatcacagtgtcaatataatagaggttagtcgataggaggtgggggactggacctacgtgacaatacccagcgtaccctctgcgccaataaaaatctttgtgacatcgaagccagcagacgattttctatccatcggtttgttcacaacatttgaaacaagtgctaaaagagatgagttcaaaaaaaggcattttcactgaagagaacatagactgaagcttgaacaaagataccttgctcgactccgggttttgatgacttctccactaggaagcacaacggtagcgttgaggaaccactcggctttagcagtcccatatctaacggcattagttcccgagcaacctgtggcactgttagtttaaaataaagcataagacagactgttatcactcatgatctttggtcgatcgataccggcgactatacagaacggacatcattcctccgatagtggctcctggtccaggatcaagctgtgcagtgtaacaaaacaaccgaaaaaggttcacatcaatattacggttccagatcaattgtttttatgtataccagaaacaacaagattcatacggggaagaaaagcttgatgccttgttcggccaggtgctcgttgatgacctgccattctacaccactctggactttgatatccgagttaggcacggacaactcaagaatcttgtccattctactcaaatcaacagagattcctccgtaaggctgatgggcaattcaataagacatgatcagtacaaagttgatcaacgctctcgattgacactcgcaattaggaggacacggacgtacagctgtgatatgtccttcgagactggttccgcctgaccatggaacaactggaactttatatttggacgcgattttcatcactcggacgacgtcttcattactctcaactgtaggttgagtgatatatgaatcgatgaatcagctaaattcggattctcatgcgcgcagtttgcctgtcgagggcaatcaatatgagaaacaagagggtcgcgcaccatatacgatcaccgctgggactcggggagcatgataagtattaggtgagaatccatggcccagcagatcatggggctctgttgacacctgatccgtaccgcttccctccttctcaaacacctgtttgatctcttccactgctgcttcaaagtctttggcgcttccaaatcttggatctatgaagggaggttcgggtatcgggttgaacacatctaaaagtagttgaggaggtccgttggtgattaggtatgtacctactgatgcggcgagtgctgttatcgcaatggtgaatagtctgtttcctctgatctgtgaagatccttggttcgtgctctgaaaacgtttagaaacagacgcggtcgtccgagggctgatcggtgttcgcccgagcgaacaacgtggacctcccaggagagctcttgcactttgttgtatcctaacagcagacatgatgagtgattatgtgagtacctgtgtgctttcagcgcaacgagaacactgatgtagttgaagaagagatggaaaaaagaatggttccccatactttttatccatacctggcacgccatcaagacgaccaggcggtccgccggcggcggatcgggccgacgctgccgaaccgctaaataccatcaaatcacgtgatatgacctgatcgtgtggcgttttgaatcacttgatgcacgttgcacaaaagaatgcacagcagacctgtaaccttaatgaaacgtgcgtcattcgtcgtaaccacagcctttctgggtagtattctcccattctcagttgtcactataacctcttcatcctcactttcactttcgttctttatcgttctttcacctctctgcttgttttacaaattcaaaggttatatcgagaatgtctgcgagtagaccatctagttcgggaccttcacttggagcgaaaactaccgtaccaggtcgtcggcctcaggctcaacaactccctggtctaccctcttcacttcggtctgcttctgcctcatcctcttcagccgcatcgacacctgcatcaacctcgttccctcaaatatctgctctccctgctcacctactccctcggactcgtcaagatctctctcgtaatccagtgtctcctcaaccagcgttctcatcttcgcttggtgcttccaaccaaatgagtcaacctactgggtctggttcaaacggtctctctagacctatgggcaagggaacaccctctggaaagggactcgagaaactctcacttccggctcgaacatccaagactggaaaaaaattggtgttccttcctgaggaagttcagaatcagcctttgccggtcattcctggtggggccaggccattggcacatccaccaaaagcggacggtcaggtggaggaaggcgagagggatcagggcagggttgacgacaggagtgaagcagagcgaatgaacaaggaagaacgagagcggaatgggtttggtagacttactgcatatgccactgcagagtcgtataggttaaggtcagagcctttcctctttttcgtggtcttctcctgaacgttgaatttacatcttagacatatacgaggttgaagtattgattccttctctaattcttctcttcgaacgatagaaatcttgctgtatttttaaagagagaacacggagccgaagtgaggatatttgatgaagcaatatatgccgtgtatgtttgcatcttttgcttgcttagcagtgtccatcttccgcgcacctaggctgagttgtttggtgcttttcttgttcacccttagatacaccttacccctccttcctggatacggaccaaatgtccgtctccgaagttccgtagccgtcaagtcacctggttcgtacagtttttcaatgaattctcattcctttggctatcatcagttgactctgaatattcttcaatccttctatttatcactctcccaggtggaggctcgattttgaacgctatggacaaagctgaagaaagcggttaccagggctcttactttcctattgagccgaccgacccggaagcgaacccgaatccgaatccaaattctgcttccacgactgacctcacctcgcttgaccaacctgaggacactgttcttcctgatccttcctcgccctcagggatccttgcccttccatcaccctcggactcatttcctcccgtttcgacttcaccgcctctgaaccgtcattctgcctcgagaggaggattcgattcgtcaatccttactcgttccaaacaagaacccaagttggctgaagcaatctttttcgattatggtgttagcgtgttcattgggttttctgaagcaagggagaaggatatcttgagtgactgtgaaagtggtggaagctggatcggagcatttggtgctgaaggggagagcgcagaggagaggggttgggagatggaggaatgtcattttgtggtgggttcttcccccgtaaatctctccagttgagacaaagaccaatcgattaacagcttgcgatcaaactccgttacatttgttcttacagtacgatccgacggctgcttaccctcggattttcaacggtacgttcttcacttaagatatttaccgttctttttcccttcactcacgcatatgcaactctgtcactccgaagatcttttcacgttcaaatctccatcacatctgcttaaactctcactctcccatgcgctggcccaatcaactaaattgtcctattacgagtccgccgtgcaaaacacgacagcagaaacggcgtacatcccgaaagagcttgctctcacaggtggtttgacgatcgataggagggacgcggtcaagttgacaggcaaactgttcaagttgaaggtcgaggtgaacctggtcagcaacgtgctaggtatgccctttttatcttgatacgaatgttcaaattcaagctaatgacctgttggaccgctttccatgcatccttctctttcttgcaccttgtctatcagatactcccgagtaagttaatttcttctcatgatgctgacacatacatcaattgaacgaaacaaaactttctttctcatattcagactgttttggagtgaagcctcgcttcagccgctgtacgaggcagttagggagtaccttgagattgatggtcgagttcaggttctgaatgaacgcctaggcgtcgctggtgatctcgtcagtctccggtcttatgtttatcacatcttcagtctgtgtgacagttgaattccattgagaaacactagttttttctgatacgcctttcttcttttctctcacggcgcgagcagttggacatgatccatgagcatgtggataatgctgggatgcactatgttacttgggttatcatttggttcgttctagtattctgtattcgtccaggtatgtgggacgaaagctgattctaacttttcattcggccgaatctcttccctctgcaggttgattgtcgtcgcttgtctggttgagtttggagaggtaagtttcttcttatcttctcttccacaccactaggagcaaatcctacataaattaaatctgtttgtcttgaacatgatcgaaactgtcttctttactaggtcctcgcgagattagtcgtgaaggcaaccgagcctgagttgcttatgtccggtcggacaggcataaagctgatcggacagaagatgatatcatctacgttcaagtgaagatggttggaagggaaggattggcgtgtctcgttctatgtttgaatacgactagaggtatcttatacattacatattcccctttttctctttctcatgatgagaagttacattcatttcatcatgaaacacataccctatcctcaatttaagttctcacaagcagcatgcctctgtctcagacgatcatcaattccagcttatccaaataatatatcagatcttaaaacccacttaacacctgacttaacgacagacccttcgtgcaacaaacaatcctttccatgccgatgaagcatggccgaacccgagactgggttgacgctaagagtcttcttcccatttgaattcctgtttccagggagatgaaagatagtttcacccccaatgagaggcgttgtaggagcggaaagatagatgagcaacgtccattcagtatggagcattggattcaattgggatcgttgggattcgtcgtagtgagaggcctagtgcgttcgagacagcgaccgaggttgagcgtgaggtgttatgtaccggtagaagaaagcacacgcaaagtagaagaagatttaggatcagaatgaatactataattgacagacagaggtagactaggagtatacgtacaaagtattgaccttccgtgtatgagtaaacccttatgttttccaacaaacctctagctttcatggaactacccgaattcttcaagtttgaaggtcgagctggccaatcatgcacgatatctattagacccgtagattcatacaaatgagctgcaaattcgggagatattgtcgaaaacctatctgaattcgcaggttttcggaatgggattcatttcgtcaggtctgctccaaagggaagtagatagtcaaattgaagaaaagatcaaccgtttgtcctttgagcttcaccacgtttggcaggaggagaatgtgtcatttggagtgtctcaaagaaacggatgaaatctttgacttcttgttggttgaatacatccttaaaagatggttcgagcatatggacttcaagcatcagctcatttgaaagcttgtcagatcgataataacgaagagagaacaaacatgaacgagaacaacttgatcttctagtagcgtttctacctttagatttttccgaaatttctttgagatcttaggaaacactattatgggcgaggaaggttctgttttcttgtctggtgtctgtttagatgtcgttgctgatcctgatgtatgtgaagaagttttgcgtgccatggctgacggtcgagtgaagtaagtggttgagcatccagttgacgatgacgttcattcattaaccgctgctgatccacctaacatcaatcaacaaccaaccaaccttccatcattcacacaggtcatcttctcttaagacatcgaacgagataaatgaaattgttcaatgaaacctaaccttcttctttcttcgctgtcgttttcgtacgttatatcatgtctacgttgtttcttcatgtgcgtcatgcgattctcatcccactttttcgcccggcagtccccaaacgtctgggccacttagtcgggccgggtatcttagaatacatgaccttcagggtattcagccagaagatttagctaaggtatggactgtgtctcttccgtacgcacaatatacggaactagactaacacgtcaagtggcgatgacacgatcggatatacatctgctaggataccgggctgactctcacagaggctcaagacgtgatccgtaccgctctaggggatcctacacccaatggtttgtcttttgtactcaggatcctatatgaaccgatctttttcctgattccaccttcatgattgattctgatcaccgtcaccgtccctgattggaaccgctctctgacctgccacagatatgctccaccaggtctcctctcaaacggcttctcagctcttggacctctcatccagacttccatcctattcgttccaatccaaatctatcgattccttgtttccagatggtatcaaaccagggatgatcatcgaggtgtctgggccacctggcataggaaagacatgcgcgcttgtggggatcgtgatggatatgcgaataaagaacctgaaggaggttgaaaaacacggggaaaaggcaagaaggagagaggttttagtagttggttcgtatcccttgtctatgtttggccttctatcccggtaatttagaatagctcaacctcattttgaactgactttttgtgagatagacacagaagcctcgatctcgcccgatcggttggcccaggcagctgagaatcaggccacgagagagtcaggccaaagtaagcgacgagtactgttctctgagaacgacccaaaactgattgcgatgcaatcgtttgggttgacgtagagttatcatcggaggatatacttgaagggatccgtcttttgcgactgcatactttgtcacagtttgtatctttcttcaagacgctggacacatatctagatgagcatcctgaagttagttcctgttgtttcaccttgacttccccgtcctactttcaactgagaacaattcacgctttctatccatgatcacagattaaatcaatcgtaatcgatacactgtcttaccatctgaggtcaccctcaataccccctgatgcaggctcgagatcgaggatcgtagcgctcatcaaacaagagctacagcgatgctcaaccagatatgagtgcacagtatgttttctctcgattttttgaaaccctcttttttgtctccatctctgatctcatcggatcgtcatgctgttagtttgtggtaagcgttcagatggcgacaaagttctcggacgtgggagagggaaatctcgatgaaccactatcaagagacgaacgagcatttctgatgcctcaactaggtaaagcaacatagacctctctttctgaggtttcacggcctttaaactcccggtatatagttcaactgatcctctaatttcctgcttgtccttcggattgttggatttattctcggggaaaaggtgtttcatggatcccgatgaaaacgaaaagattgatgtttttctatggaggaggtatggtaggtcatcgacaagtcaaacggtaagttctgtgtctttctttgtttctcttttctccttttaactttgagcgtcacggaatttacttgtttcttctcttgaactgatttgccggtcctctcggggctctctacactgttgaatagattcgcgaccatcattcccgtcctccctcccaattcttctcattcggcttatccaagctctcagaaccaaaacggcaatgcaaacggcaccaacagtgggatgtggggcaacgcacagccctctcagaaagaaataggtctgggatcaggaatcgatagggttgagtatcggatctctgtacgtagttttatttttttactctcctgctttctgatccactaagtagccgcgctttaaattcacgatggtttcttcttgcgcatgttttggttcgggatggggtcggtcattggtgtcagtctgaaggaatgttggccgatatatgatcgtcagatgaccatcgtatatgaaggaagagaaaaaagtacaacagaatatcggatgaaatactcgtctctacaaagcaaacagataaaaaaggggaagtagaagaaaagatgcgagagtgaatagcaaaaagggagatcaagtcaattgattccagatagcccatttttggacatgagtgccctctccagacttggcttgcagatcgtcttctgtgaagggtgtcgacgggggaattgaagaactaatgcggattcgatagagaaagtcaatcgggtcagtccaagaaagtttttgggttctgtttgatggatgaaaagagacaagaagaaagaagttcggatgttgaggggaaaggagcttacttccatagattttgactacctggtttgatctttgggttcacgatgaacgggtgtgcctctattgattgttgtccgaaatccaattcggacgattcgcatatcagtacccttcgaaccgaccagaaaaccacgaccgtctatgacaggtgaaagaacgaagaccaagagagaggtacacaccggtgttcaggacataatcgtctaacgaaagccaatcaggttcagattgcaagagatagtgatacttcagcgtttctgccagcgcaaagctgttacaaagaacgattatcggccgtcgggtttcgatcatcagtatcaaatagacgcaaatggttgatcaaatgaggaaaggcaaggtagacgaacgattccatgttgtccagtcgactatgggatcattttgaattcccgacaatatcgaactcattgatgtcagcctgctacaatcattgtttaccagactcatcgattgaaaggggtggatggaaacgaaccttatgacaggatttctaacgtctctgacgcttgaaaatccagcatccgctaaagagttgttcatcctttttgtttgcaaattgcgtttattgatatgtacctgtcagcccttgaccagcgatagaatagaaagaagagagtaaagataacaggattaccaagagctgaacattctccatcctttatcctaatgaatcccataagaatggaaccagcgattagttggatttgttttttgatatgtgaagatccgtgaagagtaccagattaagggagaaatcagaaaggacttacttgccaaaccttatctccggctgagaggaaatgtcgattcaagaaaacaacattgacattcaaattatgcatccaagaaggttctccttttgcggacggcacagagaaaatcgaggcttactcagtctgtacatataaaataccgatctaccaagttcaaagttcccacatcagtcaactacacctcgatcaaactttgaaaattcaaggcagcaagtagagaagaactaaaacctcactcgatggtctctggcctattgatgtactttgactcgaccttcttaaatccgaccggtcttcccgctggcttcttccacagtatctcacccttggaatcgacgatgtctatccatcgcccaggagatttcggactgtagaactcaactttctcagcttgaagtccagaagatgtcattgctcccttttgcaccgaacattgcgcaccaggttagaatatgaaggtcagttcaaggaagataattgaggaaaggaagataaggaggagggaaacgaaagtaactgacagtataataacaagtctgggtgaaacgtttagccatttccaaatcttttggcctattcaaaagctttgatcctaggcccatcatcgctctaccggaaggaaagcacggcaaggtaagaagctctgcctctcaatgagtatgaatgagataccaagcccgaaagaagcacaaacccggcgaaacaagtcaggtgttccaacgtcgtcctgaacgtccctctttcgatttctcctattgtctgtgttgccagatgagaaaaggttttttttttcgttaaaaagccatggtttcccctcagctgatgagagaatagagttggagcactaaaatcagacgtactagtaacgatttaccagggatggtcgttatctctctgaccagaactttggaagctttgtccatcgcttgttcatactgaactccatttgtcatgaacaaaggagagagtcaataaaatcgtccgagaccacggtggaatgatgccaattgaaggggaaaaaatcaccatcctagcgtattgaggtagagatccgcccaagagttgatgcatcttgatcagatactcatagtacgaatccgctatatgaaataaaaccccatcaagacatctttcagtacccgcgctcagagacgaaagagatcgagaacgaaccttgaccgccgaatgagaacattccatccaagtcatctgctgactcgggatcaaatatcgtcggtaataacggtggccagagtgatcgtctggtgaggacggtatcaatgtaatctgttactttttgaacctattgggttttgccaacagaaagatcaaggaaattaagctcaaatagagcgtgacacaaggaaagacgaggagagcgacggacgtgatggaagtaggtgatatttccggtcaactgccaaagcctcgtgagttcgagcgtcattgaccccgctgtaaaaaattgataggatcgcacacttgcacgcaaagtcaggtcgattccaatgaaatctcttccgacataaaaagaagaaggcctgaccttcagctaaacatgcctctgatggcgagccgaacgctcttggtcttccaggttggatagcagcgtaaggaatccctgtgggtgtatcgaacgcggggatcctgcacagatggcaatcgcattgcgatgagtgagtctttttaaagtctccatccaagtgtacagaggagacagaaaataagaggagttaaacaaacaagatctgcgcaagctcttccgcgcgctccaacatcaattgatcgctcgtctacaaaagtaaacgttgttgcttagttcgattcactagtgaaactctgatgcaagagaaccagaagctgctaagacccaccaaatcataagccgagatcaaacctccgaggtacctgatcgtcgtttcaaacacggccaaccaagggtagggtgattttcccggttcataatccttgtttcgtccaaatcggatcccttttctccagtgtttaccagagatgattccaaagtcgagttgacgaacatgctctctggcgagagaatactcctcgggaaggcccaatagaagcagagtgtcgagggagctggaaaggggtttgattggaaattaaatgatgcgcatgcatacataaaagatgctcgaaagaagacagacagagaggaacctactcgatgatggtcgctccccaaccagcgaacggatcagatgtcgactttgtcaacggtttgacctgtgagtgtgagagagacgcgtcgaaagaaaaacttgtcagatctgttcgtgtttcacgacaaacgcttgcgctcgtgctcgcgttcataactcacctcgtcatgtccccacgcgttttgcttatacccctcccaagcccagatgaacgcgtttcttaccaactcctttctctccagtctcttttttttctcagctggtgtctctaaagggaatgatgactgatctagttggactttgttcaatccggccagtggtctaggaggaatctttggagggacccaatctctgccgaacctgtcaagctttgcttgtttggcttcgtcgagctcgggccgggtgaagattggccttgtggctgggtagagatctttttccatactgtttggaaacactggacttccaccaggagcacccgaagctggcctggttgacaacaaagcgtgccattcggtatcatccgtcaacagggacgacggggatggatcgtctgggggaagaagggtcgaccagtctggagaagtctctccaggtttgacgactgccgtacccggtctcataccgacgcctccaaataactttcctggctttcttgtctcggatggaggtggcagatcttcaggatctgaaaattgaatgtctgattgtacggaatttgactggtcgaggtaagtaagcccaaggaggaggaaggtagacagagtagccacagtaaggaagaacgtggcgagggatgagcgaaggaatatcctaagaacatgacgatagatcgtcttggtcggcgatccggtgctcatcctttgtctgtctttgcaatattccgagagaaggaaggtgatggataggatgggataggtgtgaaggaggagcaaggaatgtatggacccagcatcttgacgccgaccggcctggttacatcatcatccgtcgtttgttcgtaacaaggcggttgaccagccagccagccagccagcatgcattcgcaatgtatacatgcgctctctcgatcaaacacatctggagggataaacaatatgtatcggttccgtatatgtatgcgcggagtgataatataggaacgcactcagacgtatgggtagtcatgtcattttgagagataagagagtcgagatcaaaagataggatgatctgccattcagattacatcaagcgggtgtggactacagcatatggcagtccacaccatctgcagaagcaaactatctgggatgaattcttagtccggcgaggaagtcagagatacatgtcgcacatataggtgtagagaagatattcacaatgtcactaacaccatatacacgatggaaatacatatggccaaacatgtgaacgccttgctctacattcgcgttgacgaacgagcagccgtcactcctctagctccactctgtcttcctcctgttctctcctcaacgtacaacatctctcttttcgccctgctgtccatgtccatgcacaatgtcgatagcgacagaacaggcgataagaacgactacagacgcactagagaggaacgtagggaagcgggccaacacgtgacttttacccttgttgagacataaaaccctcgatcctgcatcgaaccctcaagccgaccaatgagcgtgcggccgatggaaagccgagcgatctttttctcgttttccatccagactcactttgggctttgaccttgaacatcgacaacactcatctctcgctcgtcaatcctttctgcctcatctcagtcatatactatgcagtccatgtttacctcgatcgcccgaccttccacctcgagggcccttcttgctgcttcttctagaagagctttccacaccggtcagtccttgggttctcgtgcttgtttctcgttcctcttcgctctccttttcttctctttgcttttttacatctgtcttttagttgtgtagtgatgaacgactgctaacgtggttttttaccttgtctatatgttccgcctgctgtcgatctcgatgttactctataatccaattgcttccatgcacatgtacacacacaacatcaggcaagccctctgctgctgccgtcgtcgctgacaagaccgctcagattcacgagtatgttcccggaggtcgtgagtatttgtttcctaggatttctcgcttcttgttgaatccctagaaaacggctatcgcgaaatcgatcaagatcgagtagatgattctgtccataaaggttgctcgtaggagaaggagcgagattggttttgctagctggccattggtccattcatctttccttccactttgcgtccggctcatcctgatctgagcaggcgatcaacagagcttcaatttcgatcggtcgactcaaactgatttacttatactccctctgtgtctttcctcagccgtccttcgaggaggtgtgaacgatgcccacaagtttcctgaaccccacaagtcccacggttcttaccactggcagttcgagcgacttctttctgtcgctttgatccctatcacgtaagtttctcccttctttcatcttctcctcccttctcgttccgttctgctcttcacatctcctctaaccattcaaagctatctggactcttctccttgtttgcttctcttctactcgcctgttcgatagtatctccaccttcgccgttgctccctctgcccacccgattcttgacggtgtccttggcgcgtccctcatcattcactcccacatcggatttgattcctgcttggttgactaccttcacgagcgaaagttcccgagagtcggaccggccgctagttgggctttgagagctgccaccgttggtgcactcttcggcgtctacgagttcaacacgaacgacgttggattgaccgagctcatccgaaagacttggaacgcttaaacatctggcctttcatttctcctcctcgtttccctctacttttccttatcgttggcttctcatcatccatcttggcgctcttcggccatacttctttccatatccgtttttcttttttctttttcctccctatcccgattcttgttgacggctttcttgatagttacgttaatatgtgtttttaccacctcatgagtattctttccctcctatcattcacactcccttcttgtccttgatcttgaaacagacagacaacaaagtcataagaacagagtaaggctttgagaggagtttaaaaaagaagtcggccgggacggaatgagacaagacgagcaaggcccgatatgagctgcctttttacgctttctcttgtttctggtctctaggttgtatcgtggtgtctgttctactgtgtctctcgcgttcaaaagaagcgcaccaagaaagacgtatctgaggtttatttataatgaagatacgatggcgggataaaagggagaaaggtatgatggcaggcgggtggaagtttatgattaaaagaaggaaaaaagaacaagcaagaaaacacaaggttgaaaagtgtataagaaggatagcaaagcggagatggaatggaagaggagggttgaaaattatgatggtggaaagatcaaagagcaaaggaaagaaaagaagagggaaaagaagaaaaaaaagtcctatctgaccatcaagacggcctttttgttaaagttttccctccttgctttcctttttggtttttttacttgttctacttctgtccctgtccctgcccacctcgctttccacctctcaaaccctgaccgctgatgaacccacctctgccacccctctgagcgtttccaccctgtccgccttgtcccttctcgccctgcccaccctgcttacctccgctctgctgtcctccaccgagggatccaccccgagagttgttgttgtggttgctgttgctgtttcccggtcgctcgttcttctccttcctgacctcgacagtgacctttccctgtccgttgatgctcacaccaccctcaccaccctgggagacaggcaaggaagcgagaatagctcgtctggcggaaacgacagactcgaaatccaagaaagcgcaagccttggccttgacgatctcgagctccctgatctttccaaactgggactcgagtgccgtcttgagcacgtcggcatccaggtcggctcccccacccgcagcccagttggcgagcttgacgaagcactgaggcgttcggatgttgttcaccgcctcggcatggctggacaacggcttgccgccctgggcgggagtagagacagcctgcttgggagccggagaagtggcagcggcagcaggagcaggggcagaggtggctggcgcagcagacggaggaggagccttaccccaagcgcccttcgcaccggacgcggcattctgagcggccaaagcggcccatgacttgggggcagcaggcttgacaggagcagcgggggcagcagcaggagcagtagagacagaaggcgaggcaggagcaggagcaggagcaggcgcagcggccttctcctcagcaggagcagcaggtgtgggagcagtcttcttcttctcgacctcctcaacagcagcaggagcaggtgcaggtgcagactcctccgtcacggccttctccggctcggcttccttggtctcctcggaagcgaccgacttgttagcctcaacggtctgcttggcctcatcgacagccggggcggcaggctcttctttcttctcttctacaactggctcttccttcttatcctcctcaacgggcgcactgacctcgggctcgggagtggcctccttggcctcgacctgtggaacagcctcttcggaagaaacagcttcaggctcatcctgctgctgctgctcatcagcaaccggctcaggagcatcttcctccagagcgtagtcctcatcgtaagactcctccttgaggaatcggaagatgtcgttcaagacaaagtaaccgttgggctgctcggccaagaagaacgtctgagcaaacttcttccacggtccggcgtcgttcgacatctctccgatgacttgaataagaattcctccgccgtaagagggctatatgcgttgatgaaaccattcagttaatgagtatcgcgcaagggtgctgaactcttctcttcgtttttggatggcataaaactcacttgagaatcgacagaatgaatgaaaaccttgcagttgttgaagccaatcgacatgatcttttcgttgatctcctataaaggtgtaatggagaagatgtattatgagcggagtgctgcgatgcaagaaagaaccgtctcttccggtcccgatttcttttcttgcaatgaagagtatcaagaaatcgcttacctgctgaccaacgcagggggtcccgtcctcaccctcggtgccgtggatgaaggtcgagtttttggtatagaagcaatggagacgttgaggatgtttgtttacaaagttactgttttgaatataataaaaaaaaccaagttgaagaaagatcagatgctgagtgtgagaggagaagaggtcgtctgaacgccccgagacagtgacatgaagagatggacgtgtgtgtgtgtgtgtgtgtgtgtgtgtgtgtgtgtgtgtggcaaacgagtgaagagactggcaaataggagttctgccacaatgtcgtcatttgagaactgagatgttggcaagtcctttgccgatgctctcatcagcataactcggttgatgctcgtcaacaaagacaattctcatccaaggctgctccgagctcggtctgaatatgacgatttttgcacgcgacatgaacaaagagggctccaaagacttactagtattggggaacaaactgccaaccgacttctgcactggtgatagctgacggcttggtagaggtagaagcggtggtaccggtaggaggagtcgaggacgagccgttaggcgccgttgtggaagatgaagcagacatggtgatgctacagtgcagctttgggtaaggaaaagaagagatcgaatgttaggagatgctcgatcggtttggtagagaacaggaagcagaagatgaacaggatagacagagaggtcacggcatttggacaaggagtactgagcaagcacaagatgccgaacgacggctttccaaggtagcaaagacacagaggtgaagaagcagaagagtaaagacagaaaaaaaggcaaggaaggaaaaagaaaagaagaagaaagggaaaaaaaagaggaaaaggaaaaggaaaaggaaaaggacagggcaagaacactaagcagacacgaaactcacttttttgaaatgacagtcaagggatcagagataagaaagctgtaagatagatgaacaaaaaccgatcctttagatgggctggagcaagagaacggaagatgtgagagaaggtgagagaagcgaaagatgttgttgttgatgggcactggcgagagagccgacgggggaaggaaaaaaataaccctaacttttttatcgttcaccttctcttcgtatcgaccgacgagcatctcttcgaggcatcgagtgttggtagagttataggatagatacacacagatgaaggcggtagtaactaaggtaatcaatgcgtcagtcactggttcgtcttgtcaattttcgtggtggagggaaagtgttgtcgtcggttggtcaagagaagagatcttttacctgtatcttactcgttactcgtcatccgggaaggacagtcgataacaaggtcatctctcagatcaacaacggtcttcttgctctcattggaatctccaaaggtatgtctgtagagccaacgtctaaattcaggccagtcaacttatgtgttttcgatggtctccttctagatgacaccccggccgatctcaagttactcgtcgcaaagcttttatctcttcggatctttgagtcacccgacggtcagatgtggaaagcttcagtgaaagatgtcggaggagaaattctatgtggtatctctctttctgcttccttgtcgttctgtgcgcgcgtacacatgctcaagtgatatgttgctcttctgatgaaaccggtacgatctaaatcgcacagtgtcccagttcacgcttcaagctcgcactcaaagaggaacaaaacctgatttccatatggcaatggtatgtgcgccgtttcccttcatattcctcaacctcaacattcgacattcccctgaactacgtcctcttcttggaacagaacccggcggacgcacaaaagatgtatgatgattgtctggcggctttaggcaagaactatgatcccagcaagatcaaaggtagctccttttcatacctcttcatcactcactctttcttgatccttgccttttgctcttcttcttctcgttcatctctgtaagagctgactgacctgaatactggcttacgtgtcttttcatagacggcgcattcggggcaatgatgcaagtggcttctataaacgatggtccgatcaccatcatccttgataccaaagctacccaggtctcttcctctgcttcatccagtcagaccagaacgccaaacgaagcaggaacgccgaacggacagatacaagacagcccaggtttatagggagctacgttcgacttgatacaaaaagggtggtcttagtggagcatggatcaggagaagcctgttcagaatgtaaactgatgctcaattgtaataaaccagtatgcaaaaagtggaagttttcctaagatgactatatgggaacagactagaatagatattgtattgagcattgtatattatcaacaatgagctgatggttatgagtatagagattgaagcatatcaaacatttaaaattcaaagacaggaactaagggtgacatctatagataacagcgtgataaacatattcttgttatgaacaaataaacatatagaaaacgaatcgaacaaagggcgaagatgccaaggaatgaagtgaatgaataaaaccgatagaattcaaaagagattcaaagatattgatggaagataaagttggattgtaaggatggtattggtaggtacttttggaaatgggcaagagcaaaggcaaagcgagatttgtatcactcgcaagattgcatggcatctgtcaccaagacacagatgaaagaatccgattagccattcagttcgagatcgtcaagaagcgacttagaaagatgaactaccttcgacaagtgcccaaagctctgtaaatcgaacaggtttgacaagatagcctatccagcagtgtatgaaagatgaattccatcagttgggttcataaaagaagtagagagaagaacagacagaccattcatcccaacttcgacactgttttttctcgattctgatgaagaagaccctgtgagcgcacatattgtcactggccggatacctgccatcaagttcgctgccatcctttctttttcgatctttcgaatccctgagaattttcaatccgtaaaccacgataagaacgatgatgggattgcgataaaaaaaaagaaagggaaaaagcgaagagaagtggaaaagagaacaaaaaccaacctctagcagagtccaagccgtccatcacaggcatttgtaggtccattgcgacgaatgcgaagaaaccaggtggatgggattcgaacatgttgacaccgtgctgtccatcgtatgcttctttgtatagtatttttttcttatgaaagtatgcccggaaaatactgcggtttattctgaattcaaaaatgtgcaaccaaagaactagatcagaaaatcacatgagtggattaccataaagtgaatttttggggcgcacggattatcttcgacgatgaggacatgtgacttgaaagcagattgatatgaaagctggtcaactttctctttcgagcgccgcacgcgggatgtagggacgggaagtgcttgtgccaattcagccatcgggatattaggagtttcttctgaggaaatcggtacagagagtagtgtttgcagtgtcgatcgtaatttcctttgcaacaggaaagaatgtcagcgaacagttcgcacatctgtagaccaagccggcgtggcagctgatccattgtaaatccagcacacgtacccaggaccaagcgcatcgacaagaactaaatgatgagacattggctgcgaatcattctgtctcaggttttcgaacaatcttacaaccctatagcctgtggcatacgattttgcgcaagcctcgtcgaccaaattgccgagtataatgatatccttcttcagagcgacgggcgaagtgtcgatattgaacttccatctcgacaagtagatagaaagaagttggacgctcgagtttgatagtcccatgatgtggacagtatgaccttggcctaaatattcagatggaggtgggtttgcgataggcagtcgcttgatgcgaggaacgacgtcaagtggtaaagtcactctgaaagtcgagcctttattctcgacagactgtacatcaatctgaccatccatggaacgaatgattctgcgaaaaaaggtagtgcatacatcagtattgatgccgacaaggcagcaagaccgtccaaagaacgacagcactcactcgtttgtgattgacaagcctagaacgagtgaagatgacgcatgaaggtccaaataacctcagtttaaaaaaaaagatttcctgagcaaacgtggacagcacccacctagccctgctcctggatgagaagctatctcttgtgaaaactaagatatagaagtagacgggatcttttattaattgttacatcgtaagccaaagctcaatatgatagactcacaggtgaaaacaaaccatcctttagacagagagaagcaaagaacagtgataagagaatgttgtatgagtctcagaatcctcctatcttagatcatgatttgaaaactactgactttgagaaaagcgcgactcataccggttcctgtatctatcacagaaatcgatatagatcgacggctcgagtcaagaacctctgaccggacaaggactctgattgttcctcttttcgtgtattttagcgcattcgtcatctgtacatcgaagtatgcaagaagcagaggacatcagtctatcgatgagaagagaatcaaagcgcgtcgagaaagagaagaggcccctacaagattatagatcactcttctcaatccagtctcatcaacggcaatctgcatatcctccatattctcctcaaaatctaataggacctccactccacccttctcatctcttctctgagctttctcgatcgatgtgttggcatcatacaagcttcctacagaattggcagccctaaactgttgaagcacggcaaatcgatagcttaaacatacgctagatacagattcctcgacgaaatccgatatgtttaagctattcgagttggaagatagaaaattagtcaaatctagtagaaagaagtgactgagaataagagcaaaagaagaacacacaagaaaaagaaagaaaactgcttacattgtcatttcgggtggtgtagagttccgacgtttctcgccccatatattggccgccgatttctgcgacaaattggaatagcgcgaaattacgtggtcatctttaccacaaagtccaacggactggaagctcgaatgacgatagttatataaactcacggtataatccagcacgtggttgaccgtatctagaagattgctaccgcatatcttgacggtgttcacatatgctagctgctctttgctgagaggggtatcagataagaggtctgcattcgctaagataccatgaaggctggttgttgtaagcagggacaatcagtgaccacgatcagaatttataaggagagagagaacaagtgccgagagcagtgtgacttacggggttctcaactaattgttgagaggtaaagggcaccgaatgattagcactcactcagaaaccaaaaagcataaagagaggaacctacttcatggctcatatttgaaatgaacgcaaactttgcatgatccgccccctgtatgctctttaaaatcgaactcgacatcagcaccccctctatagtcctgacaaactgacattcaatatccagaaattctctaaggtcccctccacaagaccaaacacatatcaacgctagcgctgatcgatttatgctcagcactggtatgatcagtacgttctgaacatccggtgaaaaagaatatcctatccatgttgggatctcatcagcattgaatagtttgcctgatgggtgattgtctaagaatcttcccagtcgctcagagtcgtattttctgagggtagtggcggcgacagaggacagagaaacagagggtttcaaggttgaggagaatgtagacgtgggcccgattggacttttcggaggggacagatcggcagaaagcgtggatttggattcagatatgatcggtagaggtcgcaaagcttcaaggggatcgaggatttggtagttgatcgaagatgtatcgagaactcgtactgcagagaaacgagatatgtcaaggatggaacaacctccgttgaggtcgagtgtattgtgtatacgttccgcagcaagagcgtaaacctgttttaatgtatcatggtttgttaagaggttcagtacggggaagtatagatgttgagcttgagactttcgttaagagtctgtatcgaataaacgagatgaccttttgtagattggtttcctcggctaaatccccaatagcagaaacctctcggttaaagtggtcgatgactatgtttacaaagagatcagaactgttgccaattggctgtccgtagaagaatgaagtaaatggacttgccggctgataaatgggaagctcgcgctagatgcgactgtgtcatcgatctctcgatttcctatggtatcaaaacattacagaagaacgttaggctttcgggatctggcggccaagcaaaggtgagaaaaagaaattgctcacgttcatcacgagctttccaaagtcaactaagagctctttgtccgctgctgtgaattgctcgtgaggcttatcgtcgattaggcataatgttcccaacgcaaagccgtcctggttgcgaagctgagtaccagcatagaagcgcatctgaacgaagtcgtgacatgtttcaaaaggtcgataagtagtgagaattgagagctagaaacagaacttcattctcttaccggggcttctgtggatgtataaggctacaatggtaatacatggacgagttggatcgttctttgatcaaataacgttgccgagagggatttggtatagatgaagttgagataaataaaacactgacgtgaagattagtgaaccgaaagtctttgaatgcgtctaggatgatatgtggtgctccgagaaggatgctatgaccgcacatcgagctctctctgacgtaaactggtgctcgatatcccactaatatgatgccggacgtaaagtgggggtcaggaaatgtcttactcaattcgctctcaagtcttgattctattcaagacatagtcacctgaggccaacacaggtagtttgtctttgtcaaccaacaaagcgaccacagctggaacgtcgaaaaccttttgtgccatccggacgatcttgttcaaagtgggatttctatccattcctcccgggttgtccggatctgaggtcaagatcccatatcggtagagggctttgattcgttcaacctcgtctgggggtagaggaggagggagccagcctagttttcggaagtgtgcttcttcagaagagtagtccgaacttggcgattcggtgtctgaatagactaatgttgatgatatcgactctggagatcctgagattggtagttcgggaacttcacctccagcttcaaaaacatcattgtaaaaaaccacaaggtgaagtcaaatagtgaacaagctgatttcacggtctctttctaaagatccttgttatacaaaaagagttttgcaaagatgaataggccacttacgtgcatgtagccctctggcgtatccatggagccattccctaagaccaagcttattttgatggggtgtttccgggaacgattgaactgagcaggagagcgagctggtgtaagcgtcggacatgatgtagattgtgaattgcacgttatctgtttctgtatgtacaatctcagacctcagctgagtaggcagacgaccgggcaacctactcagtggagcatgtacaagatgaagagagaaaaatctgttctctgtatataaaaattattgcagatgtctggatatatcgattcatccggatgcaaatgatgcgtgggtaagcaattcaggctcaaattgtccaagaccgaaatactcctatcgctaccgcctttgtcatctaagtgttcccatgggcatgtatcaagaaactctacttgttcgtctcttacgtcgcaaactgcactacacccctatattgtccaaaaggtagagatgcggctggaagcattatcagtgcgacgcgcgctttatagcctagctttctgattctagcaatacagcatgttcggcgacaaatgaagtatagttcagattgtgttgaagattcaggttgtgtgtgtgtgacttgaatgataacagagtagacaatgatacttagtgccatcagtcacttctttcgtaatcacgacaagttatcaacatgtctgacgttgtctttagcagtcaagatctctcagtattcgatctaaaagcgcgtgcaagttctcgatgtctttggaggcttggtgccggtgttgcgaatgatcatggcaagaaggaacacatctcgtcattatttgtctcggacaatatgataaactcctctgagatgttgggtttctaagccttcaatgatgtatcctccgatgtagatcatcaattctctaccagtcttcaaagaattcactcgggcgtagatggctaggcaaccgcccggatggatcacgttctgtattgatgatcacgtgttaactcattgccacacttgtatcatcctcccactcttcagctctgtcctatctcacttcattcgacccccaacagccatcatttaggactgatcatcatgttttctggaccaactaggggaggaactagaggaggagctggtatgttcaagtctctccttcgctattgccaaactgatctggatatctgactatctttcttacatcacagccgaattcaaatggagtgatgtcaaagaagacaaggatcgaggtgggccctcctgatgcacattggacgtggattcatctatacgcgcgtcttccaactaaaatatatcatcattcttcatcgggctggttgaatcgatatttacagaacattaccttggtcactcggtcatggctgctgctggttcgtctctcttcctttgtatctagttcgcgcacttcagaccgaccgattacgatcatggcctccttgatctgtcctactgattgtgaataggtcgatggcagaaggtaatatatacattcattctctcagagttccacaacagtctatactaaagttcatatccatgtccctctcagaatcaagacattcactggtactcgcgggatcaggaaaccgcggatgaagccgctcgaaaaaaggcggaagagattagaaaagtcaaagaagctgaagaggatgcattagcactggctttgtcagttggtttcttgccgtatgtcctcagttttccaatcactgactgcttattttgtctggtcaacccacagaggattcgctccggcagttagaaagacagacgaagagaaagaggtggagcgaattttgaaggagcagcagaagcaagagaaagctctgcgtaaagcgtctgtgtctcttccacttattttcatcctcaccgaggaagttctgatcggtctttattcatctaatggcgtacagtgagcgccacgccgaaaaactcatcaaagccgaaatcaaagcaaatatcaaggccgaacgaaaagctctcaaagcgacctcccatgtgtccgaagatggtcgatcgcccagagcggtcgataaggaaaagcaaagagacagaggagaggacgaaggtcgggatcgccatgctcctcgtcgaagagacgatgaccgttcatcaaggcatagggacgaagaaagggtcggaggacgggagtatgcttcgagaacaaatcgtgaaccaaaaaatgagagagatacgtatggagatcgcgagggtgagagagaaagagatgggcgccgtggacacgactcgggaacggagagaacagaacgttacaggacaagaagtcgaagtccgaaaagaagaagtgaagaacacagaagggatagaagtcccgttaatcgagatgagcgtataatcgacaggtaagtccgcttatctcccgaatcactcattgtgagcatcacccaaacgggaagttgtgaaaactctgaaccgatttattccaacattttgctgctgttttcctatgggtttactcaacgtcaggccatacaatccgcgggatagagatgatgagagggaaagagagagacattggtcatatcaccgaggatcaagtagacactagggttgacttcaggcacttttgagccctttcgaacttataccttctcgatgatgataatttctctcactcgttttattacacacacctgctcacagcatgatactcatcaatgagatacactaactctgtccgacactgatagagctacagcttgtgatgttgatcgaatggttctcttctcaggcacgagaagttcctgtctaaccgttgttgttgttgttgttgttgttgttattgtctgtttgtttccctgcgttgggtcactagccttctgcttggctcgtgcctatgtctgttcctgagttctaagtctccgattgaccgccactcttctcttggttcttccttccacagactgatctcctctccattgcgcttcctccttcgattcctaacattctccaatccatacgatatcacatctctctttctctttactgaatccgcaatcatccagatctttctctgcgccttttcatcacactgttctttttttctctttcagctcttcggctttaaatatgcccttcacattcaattcacttcgacttccaaaacaagcccggccgtgcgacgggcctcttgatcatcccaatgcttcaaccacctctttggcagataaaagattatcatcggggtttcccctagcacggactaagagcttcctatcgaggctgggaatttcatccagtgagacccgcggagaccttcagtcaaaaagagaaacagtagtaagttctagagttttgattaaacaggccccgaaaccgtcttaatagcgtgttcgtgatttgcggtatagaatctttccacttcggaaagactcatgcatcgatctagatcagcgacaccttcctttcgacgttcccgatcgtccatcgtttcatctcctcctcctttaaacacactttcgtcaatcataatggagtctgaccttgagactcgagcgatcaacagtatgcaactcgcccggtctttatggagacacgagaggattcagacttggcggatgtcctgtacgtacttcttgggttcgtgtgtccgggacgagtacgaggtggttatcttgactctaatctatgtgataatttgatgctaaacaaataaaaatcgaaacagccgcgagcctttctgccccttattcagataaagacgggctcacacctttcaaaggtctagacccctcccctgccgaagcaccatctttgcctcctactaaagacgaagagcaagagcaggggaagtccgtcacattagcagcattgtatgaagcagcagacgctttactcaaatgtctggcggttgatatagaaataccctctggtaacacgccctccctccggttaaccgaaaacaccaaagtcgaggtccgtctggagatatgtgtgagcgaaccaattgtttgcgcagaggattcttctcggccagcaccacctgccgtctttctcacgacctgcgaacatcctgaatcaaatatctccgctggagtaaacgtccgacccctggctactactcgaaaaggatcccttcaacgtcgaacaggcggaggatcatccaaaaatcgatacttgactcaacttgtcgctcgctcatcgagtcgaattcgaaccaaaagaacgtccattcaagatcgaggaggaagctatgactgtttattaactccgccagaatcaactttgatcgtctacaatccctcaattaccaactcttgcactagcatcaacttcaaagccgatgacttctggataaaaacggtgaacaacgaggatcacacaaaccgaataatgaattccagttcagtatcaatcattcatgacgccttcagggagacacttcctgggtttcatgagcctcttaccacttccgtttcggtcttccctcaacattttaactctctgagaaacacgatgaaatcgtcccaaacgactgcagattttttgactgtagacgcttgctattttgatggccgtgatgtgccggcgagggtcaatttagacgaaggaggaaatttgatgaagatcaaatcctattcttcagatcagataaacgagaagcgcgaacggagatcgaggagacgcaggtccttgggattcaacggcgactcatggccaaatgttagagatggcttgggattgatggatgatgtggtgtaagctttcaccctcaagggggattgagcgtggagttccttgttgattgaggttggctttccttcttgtctaaatgtactcatcacgttctcctccgacttgtacgttccagccatggttcttgtataccagcattcttttcttgcctctgtacacttgatccaaccatttacatgatgaaacacatgtcttttgtcaaaagacaacacacacacagagctcaatagttgattatacatgataatcctacaagctagccctgtgaagggtatttaaattaacaaatgacacaatcttctttcagacttaacgagtacatggcgttatcctggtttgtttatttgtttgtttttttccgccgtaggaacagttagcatgtgttcttgcattgaagaggtgatgaaacaaagacgagatcaacgtactactgtcttctcgatttgtttccaatctgctcgacgttggataaactcgtatacactagttaaatatgtagaaagtcggtcgaacttggaatcagcattctcatacaagatgcacaacccatacagatgaaatctaagtttcactaactcctctggtctaaatgaccctccatatcgtgtcacgtctcgaacaatctgcgctagatctttggcgtcttccacgatgaaaacatgaccaaccatcttgagatttgagaaatcttcagtcaccctacaaagaccgtccgttgagagacaatcagttaaccggtatcacttgtgacatagaaaaagcacaacaaagacagagagagagaaaggaaatgacggaccactgttgtttgagggaggcaacgaaggcatgatatgcgttgaggtcggcgatgatctggaagcctccattgagagagatgatctgccttttgagatgtttttgtaggatgctgcaaaacggaaggagacaatgataaactttgagtggatctgacgagatggttcctctccagagatagacttacttttgcaaacgaattccaacctcctggaagaagacctccaatacatccttcgacgtgctccccttcaatagatcacaatgcatttgaagactcgcgatggcctccttacagcctttcgtcggtcccaaatccatttcggctccttcttcagggtagtattccctaggaccagtccggctgataatgatatgctcggcctggttcatcaagacttcaattccagcgtttagtccagaagcaacagcttcgtcgaggacgttttcgaatcgcttcttttcacgaacaactccgttcaaaaagtcggttcgatcaatatgaggggcctgtcgtttcctaaaataatcagcaaattccaaactaaagtgataaagaaaactagagaagaacgaaccatttctttgtcgaaatatacctggaccatgctttgcacggtatctccgatatgaactaactcaaagaactgcaacaacggcgctacacttttgttatcttcatggtcacccggtttgtatgtcttcatctgttctgtcgcaatcttaaacccaggtgcgatatgcctgtcactcaatgcttgaagaagtagaatgaagacctcctcgatcgtttccttgacacgagagcccattctgccaggatattcctggaaagtctccactcgtttcagggcttctcgatctgtttgaataagctcaagcgcaacatcgagcgaaatgagaagttgaagggactcgaacgtttgagatggaggtaggggcgtagtcgaacgcgatgttggacgagaagatgtagatgactcggtggggaagttgttgacagaaagtgatgagttgtttgtcgagatgctcgacggaacagacagtcctgataacacagcaaagatggtaggtaagtctgttttcaagaacatgagaagcaaaaagaggagagacacccacgattagtcgattttgcgttcttttctgattggtgttcatcctcgtcctcgcctagttcgaaaacaaccccgtgatcaaccttttctgatcctttcagaggtgttaccgcacccgaccccgtccatttatttggatttaacattgaaagcccgctcatggctgctgaggagccagcaacaacgtatgatgccgtctttggaatgatggtcaccggaaggaggagaacgtctcggaaaccggcaaggacgtttcgtttgacttgagcaggattttcagacgtgaggaacgttgtcggtgccggggagtctttggaggtcaggaccattgaagaatcaatttttagctggaggaacatcaggcgagaaatcagcttcgggacgattataaattggacataagggaacaaagacgagcttaccttgccatcccagtctttgcatatcacctccatggactccctgatgtagtccatctcttcgtccagatattcgtccatgttaaactcaaacatcgagaatctatttgaacggaaagcacatgatctttagcatgaaagttcgcggcagcgttcgacaatggaaggagaggaaaaggatactgacatcatgctcaaaacttccttgcggttgatcagcccgccacttgagggatcttctccctctggcgtccctgtcttgagaatgacatctaccatcttttccaccatcgcgaacactcctgccgaagctctgagaaacaggcctctccctgttgacgcgccgacatctcttgcgcgttgaaggagcggttgaatgtactgctctccgacgacctcgccaaggatccggtcgataaaagtgtgaagcaccttggatggaggaggaaacaccctggtggcttgagacccagattggacaattatacttgttaggtgcgcgatgaaaggttccatcggagtgaagtctaatcgtggtacagatgactcgggaggaccaatgatgtttttggatgggttccactttccaccccctccttcatagaagattgccatgcgctccatccagactcttcctagctcccattcctctactctgatggttcttcctcggcctgaatctttgcctcgtccgttaacttcccaccaaacctcccaacctgctttcgcccattgcttcatctcagcctcgtcctctctctcgtctgcgccttcgaatccggcgaggcagaccgcatcaaacctatcggcagcggccagtatgagatatctgatagattcccaccgactcataggctgtatctgagcggaaagaaactgcagtagagtgaggagcactttggactgaacgtctgagcttggtccagaggagctgtcgactaaggaactgaacaaaagagagaggatctgagagggggcaggagaggacggtgaagataagagaggtgacaatgtcgagagctgttttgtgtgatgagtcttgtagatctcccgccaaggagttttgcgttctgaagcctgggacgaagaagggagtgatgaagaggtagaaggttgggatgaaggattaggtttggctggtgagaatgcgaagaatccggtggtccgtcccccggtctggcttgccctgctaggaagcggagcagagatgttgtcaaagtccatcaagtctgtctcctttgatattccgaaaggatcagccggaataggaacgtccacaaagtctccaaactcatcttcggtctcgacggcggcttttgccgagccggctgaaaacgagatggactgttgggttggacgcgacttggagagagatgtcagcaaagggacctccttcgagctcttcctggttggtgtggatgaaactagagagagcgtccaggtgtgtgggtgtatgtgtatgtgtatgtgtatatatgagcaaatatgcgagtattgactctgtgatattacctgagcgacacttaccttgggaagaatgagaggcagatttcgtagactctgttgtgtcatctttcaacccaagatccagacatctcgctttccatgcctggtcttcgctgaccagcctgccaaaggcttttgagagtcgagcgagctttgggagctcgtagactggcaagaaggagatgacgagtaaatgaagggtttctggcagaggacctatccatgcgcccagttgaggcggtggcagcttggccgctaagggatgagattgatgggatatcgcatgagggaaaagggacgaagagacgatggatgaggctctgtctcccggctttgatggcttaagaggagcccaacgatccattttgtggcaacagaataggtgatgatgatgatgatgatgaggagtgataaacagatgatgggagtgaactcgaaccgccgacgcttcctttcccactccggacggtcaacgccaatcctgttatcctctctcctgttgtcgcggtagcatgatctgattctatttgcgtgtatgctgacaacaagctgatcaccatcggattacaaactgactcgactgtgggacttatcatcgtgctctcctactcactgggctcctcgctgggttttggccgctctactgacgttccttcttgccttgctgccaaggttccttctctttagtgcactcaaccttcgccactgctgttgttgttgttgttgttgttatttccgttctctctcctacacgtcctggaccctgaaagagagaaaacatcttaagagacttcctgtttgtgttgtccgtgttttctttcagccaacatccatatctcatcatgctctcccaagtcctccccactatcgtcagctcaatcattcgttcttttcaatctttgtccagtccagactctcgtctgctgccctcaaatcctgccctctccctttctgtcgacagtcactcccaattgctcccacaattcgccagcttccatcttgttccgttcttcaacttggtcttgacggtcgtcgtgtttctgtacctgatcgatgagcagtatgtcttcgacttcctcaagccacgctctcttcctcttttcttgaaaggccagacagtctggtcttttgagctgaaacacaagcagggagattgattgcgaatgatgattcgtcactttctttcaggacacatgcagacattagtcgttgtgtggacacgctgacgggaaacaaatacaactgttccgttgacatcgagcgggatccgtcatatgtcacaaacgagaaaggactccctgtgtatatgacaccttcgaacgcctcaagtacggccaggatgtctgacaaggagcaggctgtcttgactgggttggttgcaggatgcctcctcagtatgatgtttcagtgagtcgttctctcagatctcacgtgtgatcgcgcaagctctggtctacaaaaaccagctctaacatcttgatcttatgaaccctcgggaaaacagctccgactcagtactagacgtctttgcatccactatccacatccactctgaacacttccgtatggtctttctccggtcagccgtgctctactttgcatttacagtgatgagcgcttttctctttgtatgtgtctatcatcgtttttatcctctctatactatatggccaaagttctcgagtagttttctaacttctatctccctgttctccttttgaatcaagaccgccttggtgatgacatctctgagctcgatccgctcaacgtacctccctcctctccttttcctcttgtgccccatccttctttcatccaccatcaccaacagattcctcctcgcctgtaccacatttgatctcacctcttcccctcatctggcgctcttgataggagaaccaatcgtgttgatctcggtgcttagctggatggcctttgggcccgggggaacgagtgttcgtttggcttgattttcttctcatcttatatacaagttagggttacctttgcgtaaaacttaataaacacacacatctctgtctcttaattatcaacgaaacttcattgcgatatgtctgaaagggtatcaacgaacgatgaatgtcaatgaggaacagtatagtacggtacagcagattggatatataatattcaagaaaagaaaaagaaaggaaaattaagaaggaaaaagcgcttgttgaattaagggtagatcgtctagaaatcatcctcgtcctcatcctcctcagactgaaccacacgtttctttcgtgctagaagatgaagaattgtaaatgaatatcaccacacatcagtcagtcgatcaagaacaagtgagtctgagcatgcataacacccacaagctttgacaggagcagtctgtttcttcttcctatggacctcttcttcttcctcctcttcttcttcttcatcctcagactcgacaacctgcttctttcgcgctatagcgtgtgagatttagaatgatagtgagaaggcgccttcggatggaactcaagttttaatgggccaaagttcgaaaattcaaataagacttacgtgttcgtccaggaacaggcttcttgctgcccttcgaccgagggacaggctcctcttcctcctcttcctcctcttcttcaatattttcttcagcttccggcccctcgtcctctccttcgtcttgcgtgacatcagacatctcttcgtcttcatcttctgtcgccttctttcggctacggtctgtggtagataagaagagaataagcaaagtatgtcaaccggcaaatctgagtcggcagcttcgctaaactctgggtaaatagacgtactactctttctagatggaagagccaatccagctttgtccttcttggcaagggcggtttttcgtttagctgacgcgatggtcttcttggcgacctcagagtctagctcttgaccttcctctcctgccttcttgtggtttccaaggatctggatgagaataaatcgggcgagataacaggttgctcagcatggaaattaggtggagaatgaaacgtaatagtcttaccgcttcgaattcgttcagctcagcatcaggcttatttgtttgcttgtttgctctagcctataatgatgtagcacggagaagatgaatgagaaacacttatgaacagagaacgttcaggtacaaggattaaatcagtctgactgaccttggaaaggatctctgtgaatcgcttgaagaccttctcttcatagagcttgtcctgatagaatggcaaactacatagagggaaacggtctttagatgaagagaagtacatcaagataaatgcgaaaatagctcacccgtcaataagcttcttgacagaccgctccgacttgtatggcaatagagataagcagaacgcgatgtcacgccactgtcgctcgtcgctggccaaacggaatcgctggcaaagcttctcgatgatactctccgcttgcttgtcctattgtcatcaagcatcagtgtcgtcagattcttatttccaagcccgtcaaagggtgtggagagatcacgatagatgaaccggacagaccttctcaatgaacgtaaagatatatttcatcgtcttttcaaaggtttcttcgtccactgcgtgcttgcctaacgacagatgagagatgacgtcctgcaagttgttgtacagcgcgttctccttgcttgagagttctttgaagaacagcttggcaagatcccgaacccgttgatcgtcgtcttcgatgcattttgccatttcgccaagttgacctttgactttgatcattccgttgaggatcaagtgggtaagcaccatgagtgtgtgtctcttgacagtcagattctcatccgataacccaaggtagagtcggtcactgagggacaaagaaagaaatataacgttccatccatcagaaagagattctgtgataacgaatatataaatagacgtatgaacgcacctgttttcgtcaatcatgttactaaagcagacagcgatatctccaagcgcaatgacgatgttacttctgatgataggatcggacgtggtctcgaacactcggaacaacagagggagttgggtctcgcagaactgagagctgacacacatgagcttcgacagagccaacaccgctggggtttgaagcgatgaatcctaattgaggttacgcgcccagaaacaagatcaaaattggtatatatattgggtaatctgagagaaaaggggcgcaaacgagggtacgtactctgtatcgccctgggttcgcgcagacgtcagaaatcaaagggccatagaccgcaagcaacgagtcctctccgtaaagaatttcgtgctcccggatgaacgtcatgttctctccgatatcatcctctgcgtttccagagacttgatcaagatcgttgtcattcttggggtccttgttggccggggcgccagctgtcttggctagacgatactcaagaacatgacggttagtcagaacttcttgggaaacgcaaacaagacagaactcgtatatgatagatcgaccaaccttcagtagctttttgctccttccgtctcttgagttctcgttcgaccagctcgagatatacgatatgtttgagcgctacgtgccctaccaaaaaaattagttggcctagttcgaatgaattcaccaaatatttgggattatccgaagaggacatgacagtatctcctgaaggcgaggtaggtaaagccgcatctacctctatttcagcctcgagatcgacatcggcgctgttatcctctgatcctgatgtctcggattcagtaagattaagcttgccaatctctcgagtgatatcgggcgcgtcagaatcaagaatgtctgaaggaacgggtgcgtcaaatacacggtaggtgaatgatttgattatctctgcagctaacacgtcgggttgctcgccgagtaggtagagagcgttgatagcttgctcggcaacaccaaacctgtcgttgatttcgaattcacgagtaccagacgtggtagtgttcgtcagaacaaatccggatgcatactaaatcccaaaaaagacatggttcgagactgaccattgtaccgagtcagtaggcgtcttgacgagttcctccaactgctgaaagattgggttctccatagggagtcgattcgacttgtccgttagtgatcctgaaaacgttatcagattcgaacagtcagttgtcaacagcaagaacacgcgcatcttggttgcgagttcagatttttgttgtagagctgatatatgaatatctaactgctcaccttttatcttcttggcgcttccgctgatcctttgcagagcgacacatgtatatcgagccaacgtaaggtccgcctatgatcgacaaggacaggtcaagacggtcagtcttcctgatttcgacataggagaagagaacgggacaaacttttccaagtgggcccagaccgatccgaagcaggacgtcaactctgtctacgataatttctttctttgcgatcgccaacattccaaggatgatgattgctcctctcctctgaggtcgagggatatcctgatctgcgtctgttcgtttcattccattggccatacgtagatgcgaagggaaaaaagcaggaaataattgtaagagataaattcttctaattgtaggtctggctcgaataattaggaacaaaaagaacgtactgtagacctgccagagctttgcgatgacatccgggtggattgcatcctcaagcatcaaatttcgcatcaattcttctaatgaagtgatctctgctaacgttgctccgtaagtcaatctgccgatcccaccgaagcccaaatgcaacaaagatgtcaggatactcttctactcggagcgaaaagactcctcattgaacaacgaagagaacaaactaactggatcatatttttggcgatcctgctgatctgctgcttggccgtcatatcggggtcggcagatgcttcaaaatagagccctttgtagcattcgataacccttgctcggatgcctttaagttctttaccgtcctcgacaaccgcactgttgtcttttgtccagatcaagtgaagcatcgccttcaaaccaacctgtttggttccaaaagccagaccccgagtatccatgttagtggcaactcttcgagcttgagttgagaccaatcaaaatgccttaccgaggcagattcaaactcgtactcgtgagccaacttgaagaagtccattgcttccaaaacctcagcccgacctgtcgatacgagtaaatctttcaatttcggcatagccaattcgatctgtcggataaacttgagagcatcgacgtggtactttttcatcaaccgaagttgggttaattgagccgtctcagccatcgtcatcggcgccgccggcgcgctagaagtcagagaagctttcttggacttgatcggcttctcgtcctccttctcgttctcgtcctcctctggttcctcagcttcctctccattttcctcgtcgattccctccaagccttcaggaagattctccagctctcgttgctctagaaccttcaatcttgcaactacgctctcatatctttcgatccatttttgcatgttgaggtctcctccgtgcaacataccgaacggatgagtcatgatgagtttactcaatagcgcgatagcgtatcgtctgaccgacgcggatttatcttcaaggtggcgaattgcgagctcggcaaggatcggtcgttgctttgtgaacttgacttccatgctatttggtcgttttcagaacaagggatcctacattcagcccatgattgatgcaaagagggagacgacgacgacaaagaagaaaggcatgaaattaggagggagagaaaactcactccatcaatttggtaactgtttgaatgactttcattctcacccaactggtaacgtccaagaatcgatcagtcaagatcgcccaaaagttgtcaacctgtttcttcttattggcttcttcgtattcctccgaaagggcgaggtgtcgaaccagagtcccgatgacttcaaccattgccattctcatcgagtaagactagatgatataacgattaaagctgtctttcagaaaaattctgtaccaaacagcgcgtctcgcttgtccgaagaaaggtaacaaaaaaggcgaccaacctcgctattcagatgagttaaaagcagactgatctgtttcatcacgaccctgggcgtaagttccgcgatcttgagtaggaatctagagaatgacctaggtccttttgtgtcctgggcgttgaatgtctttgtagaaatgtctcggaggacttcctccgtgagctgagtgaagtctagttctttagtcaaaatagacaggagctcagccatgggttccgatagatgctcgaaatactgcaaggcctgaatgatagacgtctgggcgcctatgggccgatgtaaagagaagaaaagaagatgaaattagttcagctctagatgaaccctagacgcatgattagagagagagacaaaagaaatatccaacactaaccaaaggaatggccatggaatttgacggaaaagcagattactttatacattcccatcttaatctcgggaatcttcatgtaggcttcgttttccgcgatgtgatataccggacgggtaaagcaactaccagacaacaagtaagcatagaaaaatcagaccggactcagatactccacggaagtaacgaaatcgaataactcacttgatatatgcatctctttcttgggtggttgtccagatcctctcggtgttcatcctaagggcctttctcatgaagtccaacgtgtttggcaactgagcttcccaggaccatttttctcctttcttcccactgctcgtcactttccctccgcgtttctgtaggccggtcgagtgggtaagcgcaaagacagttgttcacatacgatagtcgcatcggaacgatgttgatagaaagcacgaaccttttttccactggccgtgttgttttcatcttcttttcctgccgccttttccgcgccagacatgaaccactgcaacaagaatgcatacatctcgagcggcgtcttgtgctccaagtgagcggatggatcattcgaggcgagtgatcttgtggcagcctctatctcggattgaagagctggtatgacgaatgtcgaacattcagccgaggtttcttacgaccaatagaacggttttctttttctggtagaggaacactcaccagagagaatgatatccagtaacttagatcgaacgatggacgtcagttgaatttggtacctacagccgtcagatgtttgaaagtatattaggaaattggtaccgcaagctgtctgactgagctagcgttcgacttgatcaacatacttcagaagactttggaagatatcaaatacttctgggtagagaatagcttgaggagaatccgttacagcatcgatagcgcctgaaatgtagattgagggttggctttagtaccgataggcctcgaaagctgattcagagagaaagcaaaacagagagagaaagtgtgaagcgatacgaacgttccaacacggccatcacctccttttcgctcaaatttggcacatctacctcactctcgatagaaatcacatcgtccggatcctgtaagatcaggacggattcctgtaggttgaaggcggctgccatagagagagatgatgtctctgtagattcgagtgatgttcagaagtccaaaacagcagctttgttgagactcgagagaggcgacgataaatcaaacgcgtcgacgcgtaacacacgcgtaaccagacgcgtcaagaggcaacccgtccgttaggagtgaggattgacttgcaccgtctgtccagccgacgatgagtctggctgagtgtgggagatacggagatcaggagaaacaaaggagtacaagactctctatctctgctggttcttcgattcaattgggtagatgatgttagcttctcggtcatgttggcgcactccgtacatactctacaaacggacttgagacacagaatgggagaggatcgactagcagtctcatatgattgaacctttttctccatcaagcgaccctcttgtattcaccttctgtgttgtttctgatctcagcacaaattaccggacagagattgttcatgacgatgggtctgttttcttggcggttatggtgggttgtaaaaatctgagttagggttaatctcccaaatcggctgccactcgtcgtcattccgtcctcgatcttacattgactcacttgcctaacctttatttctctacttgacttctatcacttgcttatacgttcatattcacctgatatcatctgtctagaatggctgttggttcttttcccgatcaagcatacgatccttctaaggcgactcccactggtaaccagttctatccacctcaaaatgacccaaacgtcaccgtcctcccgcccaagagagcagaattgacaaccgccaatctctgggaagctatcaaggtaaggctctgtcagctgtttacctctgtttctctcgatgaaatatgtctgatatggagtagtgttattcgtgatatacgtacctggtcgattgtttctaaccaactcgtctgtttcgttctctttttaccgatcttcacgtcccttgatcgtacctttttcttaccgctttactctagatgaccaagctagaagatctctctccttccaagctcggtcagattccgtgtatgcgaacgtcgatgcttcagggtatcggaggtggtgtgggattcgcaatcattcgattactgaccggaaagccaggttcgttcatacctcgtttttccaaggtggaggggcgaagagataactttttccctggctgtgacgacaaaatcgatctttgtcctcgacaactgtatcaaaagccttattcatccacctgcttatatgcatttgggatcaagatgaagagcaatcatcttaatcttctctctgagccgtcatcattttttcaagcccctctcatcgatacctctgatttttctttagcttatctatgaaacatgctgacattagctctgctgtggtgctcaatatcgacgtggtccatgtgattcataggtatctcaacggtgttttctgcgttcggttggttcagtgtcgcttttaccggtatcggaggagcagctaagtttgtccctatttctctctctgacctcgactgttcttgatctttctgaacacgtatccttttctaattctttctatccacccagcttgtactgcaataagaaacgaacggaagagatcgagatgatgcgactcattcacgaacgattccctgaacggagtctcgcgaacgctcgtaaacgacgagaacaagccgagcgcgaaaacgtccaggtggcagatcttccaccgccacccaaggtagaggtcagccagccgagttacatcagcgtgagcgactcggatggaaacttcctaggaaagatgacaccggcgatggcggagctcgcaaagtcgagaggtgcgaatgaaacgttcaccgaggtcaaagctggaagcgcaggttcgtcagcggtggctccagtggcgactggtttgccatcaaatgaagatggtcagccagagaagaaatcatggaagactctgtggatgtgatagagatgagatgattctggaccataaaggattttgagcaggcagattgaacgaagta

SEQ ID NO: 1290 - DNA, 3333 bp, Xanthophyllomyces dendrorhous
atctataggaagacgtctcatatttagaagcttaggtaagcgcgattgagagataatgaattttcgactggcaactttccaaacacattcacgtagacatccatagacatcccttcctcgaccatcatcatctagatatgccatcccctgccccttcctctgccacatcctcaaagggaaagtctaagatgacagtagcagtcaaggccgtaactgtaaagccgaaaccaaaagtgtcttccaactgggctgctctaaaatcaactatagctccttcgacctcggctagctcctcatcatcaggtattgcaggcaagaagcgaaaacgggcgggagggggagagatatctggggtcggaaaatatgtgggtgagctaggtggccgagtcgagagaaaagaagaaagcttcaaaaggtatggatatgctttccgcctctccttcctctcgcttgattcgttccggctcgaatgtacgaagcgcgtcaaaggtggttttcgatctaacggacgtatgagctttgattctgtatgtgcatacttgagaatctatcagaggtcgagaaaacaattctccgccaccgtcaacaagtactgcgatctcggagtcgtcgacacctgagacgacttattcgcctcttatccaggaacttaggtcaatggtgctcgggacttcgcccgctatcgaaacaaagacagagtgcgcattcctcgtgtttatcttccgtcagtatctttgatcaaacctctaactctcgtttttatcatcctctcctcttctagaccaggcaaatatctctgcatcgattgcgagatggtgggtgtcggtgccctgggcgaacaaagttctctgggtagagtgtcaatcgtgaactatcacggagcggtcgtttacgatacctttgtcaggccaaaggaacgtgtagttgactacagaacgtgggtctctggtgttagtgcagcggacttgattaatggtacggttgtgtctctcattatcatgttgaaacctctcttatcggtagagcgcatgttcagcaaatgtgtgcatatacgatctctactgcaactcatcacttccttcgaatttaatatacagcaccgacattcgaagaagtcattgtcaaagtagcccaggtgatcaaggggaaagttcttattgggcatgctattcagaacgatttctctgttcgtcccttcttctctctctctctctctttctctgtgcagctttcttaggacgcagcgcgatctaacagtgtatttcttcactcccctttggtggtattttacacccacacgcacacatcaacaaaggcaatgttactctctcacccagccccgtttacaagagatactcagaaatgtccagaactccgaaagatcgcgggctcgagactacccggattgaagaagttgacaaagctggttttgggtttggagattcaggaggcttctcatagttccgtaagtcatcagattcactccatcatccttccatccttccatgcttctttttcgctttctttcttatcgttaacttctggatatcaatctgtgtgtgtgtgtgtgtgtgtttcttgttctgttctgtccaccaggtgaccgatgctcgggccaccatggctctctaccgaacgatcaaagacacttgggaacccaccttctccgtcgccatggtccgacatgagcaaaagactaaaccgaaatctaagactgctccggccgaatctttccccggtggaggtagacggggtgttagttcggggttggaatcgatcgttagtagtaagacgaagggagtgactaagaaagggaaaggccctggggtgggcagagtcgaggacgacgacagggatgatgatggcgataactggtgggatgaatgaaacctttttttctttctttccacactcggacaatctctttctcgcacgaagccaggattatatcggacaaatacctttgagaacgcaaacttgcagctattgaccgagtctgatgtgacaagctgtgttagcgagaagacatccaccactcctgttcatccttgtggtcgtgatgggacgtgggtcatgcatagatacaaacgcgcgcgctctctctctctctctttctcttctcatttactcacccagccgagtcttgtgccccatgtgcgccacatccgattcacgactatctgcttgatctccgtagacacaaatgggtcttccaaatcgagcagatcctgcataaattcctgcacatttccattttcagatgaaccaacccgaacgttagtttttcccaacatcagcttcgttcaatcctgtaaacattgtttgacaaaggaaaacaaaaagaaaaaagagtggaagggaagggagaggaagacattaaaaagaagaagaaacgaacctgcttttgtgcagtctcgctgcgcttgaactctcgcttagccatttccctcagactgccaatcgagatgagaatcaaaccttgggtgtcgtaaccaccgatggtaccagcatgtccgcttccagtctcaggcacgtctggctctaggtgtatcaacagtcgttcgatccgtctgatgattgccagcgcatcgcccataaatatttcggtcagacgggcgtgggaccaccttctttcgacggtctttggaacgaacgaagaaaggatgaggaactcaccgaataccttcccaactggcccttcgcctttcgcgtctgtttgctccaaagcttagcccgccggcactggtcaggaatgatttgagccagcctccaagaagatagacaatcaggaacgatggggcgactcccacaaaggcgaaagtaagttcctgtgatcggagcaatcggtctattccagatagagccaaatcaacatcgacctgagcgaaaacagatgggcagagagaaacatgagtacaaagattcgaacagaaggcaagtcaagttaggaggggatatgagaagcagaaggaggcacctttgtcttctggacttgaatgagaagcgatcggacgagggagccagcaattgcgttcttgagcggagactatcacaacagagacgccagaataagcacagcatatcttgcggcacatatccaatccatctgaggatgagaaaactaaccttcatgtcctcttcatagagtttcaacacgtccgaaagatcaccttctctgactcgtcgagataggctgactaactcaacctcagtgtacgccttcttctctctggccaagtcaatgaccatcctctccaatgacttgagacccccggagttttgtcaaagagtaacatctgtcaacttgaagtcttccagaaccatccgcaagag

SEQ ID NO: 1291 - DNA, 5440 bp, Xanthophyllomyces dendrorhous
agaaaaaaaaaaggagagacccacgtccatgtcgctcttcatgccttctttgctcatcagtcctccactaggatggccagtttcatctccgcttccgtgtctgacggtctcaatgatgcccattgctggttcgacaacccatcccttccagaagccgatcgatgtctccttcagatccctcaacagcgccttgacgactggaattcggggcgcgatgagtggaatgagtagtggaagaagcaacagcggtggccatagtctggtgagggcggtcggtcgagtcaacgatgaaggaacggtagtgtatcgacgaacaggcttgtcgaagagagcggtaagggttggaaggacactggatactataggaggtccggatcgtaaggtccctatcgagtatgcgctctgtagcctttccttatctcgctggtagtcttccaatcgctcctcaaagtctgggtcaccaggatggctttgaggcggctctccgggcgaaccaggaatcacatcaaccatgacgtcgagtattcgtttcactatcctgatcatatccctcatgtcccacggtttcctgtcaataagatcctgttcgtcccaacttggcccctcgattatcagttggcctagcctgcaagccaaccaatctcttccagcttcgagctctgtgatccgacgacggacttcaagccgggttaaccgtatcagcgtacggaacccgaacagactcggtgtcgaccggggaacggccgtcgtggggaacaaggaggacagaagataggtcggagtgaatgaggcgaggcgacgaggaggctgagcgtacagagagtgcgtcagagatgccaatcgatgtgggaaggctagttcaaaagaaagaatgacgatatcaaaatgagaccgactacatgagatcatacgactgatcgatccgagtaagagagaaggaagaaagaacactcggtcgatacgaactcatcagcagataccctccgatcccaccccatgcgtactttccatttctatccagtttcttccaccaagcgatctcttcctcccattgttccgcccaagcggcatgctgttcgatctcgaggccatacagactgaatacaatcctggccaacacagtccattcgaggatttcttcctccttttcttctgctgttcgccctcttctacccaacgtgttgacaggcgatctggattcgttcgaaagaagaacctgaagaacggaatagatgtctgaccgttcaggctcagagggaaggttaaggagacaatgttgtagagtgctcgcccgatcgctcggtctggacggggacgatagacgggctgtagacgtgtctacggcagaatgggggtattctagcaggtccaaccgttgtgctagaccagatattctttgggccatgaaagtacccatggtgtggtgagaggtctgcgaccagatgagactgttctgtgttgatggtagagaaagacgatcaagatggatagaggtcttgggcgacgtgatggttgatgatggagaggcttgatgaaaatccagtgtcactcattcctatcttctttcctcctccgaactatctcgtcttctttttttcttgtgagctcttgatctttcttttttctcacacacacacacacacacacacacacacacacacacacgccatcagtttcaatctgatatcttggtcttgcctgtgtgtgcatctccactcgactgatcagcacagtggctaaaacttctgctggagatatagctttgggttattggataaaactgtacattgaccattcatcgatggttgatttagatagagaaacggaacagaaaaggctagagagaagaattgtgaacgaatggagaaactgcctttcctcctgcatccagtcaggtagatttttttttgggggggaaggggggtcaaacagtgacgacaacaaagagtcgaaagtttttgagaagaacgaggaaaggcgagatctagagagagtggtggaaagaatagagatatagaatctactccatcgacgagtcctggtccttggagacggcatcctttgcttctcgaatgtataacacattgttgcatctgatttgttgaggtgatggttgaagagagagccaagggtcagcctttagcaatcaacgcgtcccagaagaagcacactgatgaatagaagacgaatgagaagacgaaccgaacgaagacctctcccaacgctccggtggagactcccttctcaatctcctcggcattggcgagctgcagtatgcgtacgatgagagtcgcaagagagacacgccaaaagtcccaaggtcagtccatcattgcttgtgttcgatctgacctctccgatatcacggctcttctatctttcatggccaacgttgggcactcaaaaaagcagagaagcctctgtatggtacgaatcaagtacatacctggacgttcatatagctatcggttgagacgagataacccttgtactccacgccccacttgagcttgacatacacgacctttccggtcatctcctggaggaacggcttggggttaacgggagcctgtttgaagagaccaaccttgtcagccagccagccaaccgacagcacacacctacacacagaccaacagctccctgggagtcatacgcacgacagacatagcggatatagaaagatggcaagtaggacaagatggctgatggacgtcaaggctaaggggaaaaaaggaaagacggggggggaagaaagcctggctgaggtgaaccttaggtaagatgggttattcaaatatattcatatataccttatctaagactcttccgcctcgtcttgttttctcctcttattctatccgacacacaaccaacaccatacatccaacactcacccactcacccccgccaccttttattccccttgccaatgtcagacgacgaagggcatacctcaggcagtagatctggtggaggaggaggagggccacccggtggacttattgacgatgatctcacccttcccaaggcgacggtgcagaagctgatcaacggtgcgtctggaatgctctctttcctgctcttgttctttctgatgtccttggcttactttcgacgcgtttgtttcttgttcttccttctgttgttgggacctttgcgaatgataccttgttctgatccggcccaaccgtcagaaatcatgccggaccacatgtcttgcccaaaggactctcgggatttcgtgaccgcctgttgcgtcggtgcgttcaaatatcgttgcttctctatctgtcttgtcgtttccttgctgatgtttagcacgtctaccaaccctaaacccatcagagttcattcatttgatctcctccgaggcaaatgacgcgtgcgagaaagaccaaaagaagacaatctctccagaacacgtcgtctccgcactcaagtcgcttggctttgatgactatattgaggaggtagaaggcgtccttgatgaacacaaagagcaccagaaagtatgtctgttcctcctcacacttcttaactccttttttttattttaaaaaataggtctttcgccatctgactgtggacctatctgtttcacccaacggaaccaaaggtccgacagacaaaacagtcagcctcgtcaaaaaagaacattggtgtttcccaggaagaacttctcgcccaacaggagcttctctttgccgccagtcgagctcgttatgaagcaggtggtagcacttaggagggcggttcatcttgatcttgcctctgtctccatcgtttctctccatccatcacgcgtaaaagcagaaagagaagaagggcgtgatggcaacagggcaggcttgttcaggccaatcctctgacgtcaacctttctcctcgatcctatcctcatcctttccggtgctcttggccatgatccattctcctccactctgtctagtttacattgctcctctcatcttgttcccatctttcacgcttcgtggtcgtcttcgtcaactcccccctaccgttccctctacagaccctctaaaaacggcccccttcctatccatcaaagcaggattgttgtacaaatatccacttacctcactatcaccaccacctccttccttacatgcagttttcgaaatcacatatacgtacatccgcacttttttctttctctctatttgcaatctctggttattcatacctgtgctccgagtcgtgtgattccctccccgtactctcacatctcgtcacaaagccaacttgacattctcgcatgcacttcgaagacattgccaagtcaatcgttacattgacctccacaaagaaaactaaaaaggacacattcatcctagatccctctacttccgatcactactccacgctttctcgagtccaaagtaacctgcagagcctattctcggtctaccgcctggcgatctcacttctccatctaacggtcttgaggccgaatgaggcgagctataaccagtgggcagtccttcgcctgaaggagacgttgaagcagagtaaagtcccggtgtgggcccatgcccggaaccgaagagagcggatgtattcgatggtggtgtagagggcgtagaggggggtgcacccgaagagacctctttcaacagatattcgacaaacagttgggagaacgactgtgggtgaacgggccagttcaaacaagcgccgggcatcagttcacttttcttcatctgtcatgaacggacatcagtgcaagtcgacaaacctcgtttgctggttcagccttctccaaactcttcccactctgtctcagctgagcacctccgtttcctctcttggctcctgcccctccgaccgttgaccgttgtagccctgcggtttccctctcggcctcgtcccatgagagaatagaggacagaagtgaaagcatctcgaactttttcgggtccgcacggggagatgataggaaggcgagcagaatattggttacaaggcggctagaagagttagagtagaagaatccgaaaagggtgggtaattagagatcttgacaagatggaaaggatagcgtaaaaaaagacaaaccgatccacgttggtgtccgaagtgttctttcgtaaccgacgaagtgcctctgtcaggtgttcgttcatgattacatctagaaaagaggtcatagaaaaattgaatgttgagcaggcgatctcaacgcgcaaggggagggcaaaagtaaaaagaagaagaaaaaactgactctcgtgtctaagcttgcctatgagcaagtttttctcttttacctccttctcaaacgtctgcgctctcattgcgttcgtgtttagctcatctacctgggtctatcgttcagacgttttttttttaaagacagtagtcaaataagaagaatgatctagggttagacttgtatccgaagaattttcgctcgaaag

SEQ ID NO: 1292 - DNA, 4174 bp, Xanthophyllomyces dendrorhous
tgatagtatttctcagatgcatttctaactctgaaactgccgagttcaactctgcctctttagctatggtattgcgtgaaccaagggaaaaaaggaagaaaaaaaaacacatcaggatgagtacttctagctttatatgcgtagacaaccttaatgaagataaggagaaacaggcgaaccagcttgaaattcttcgagcacactctgcaggttatccgctcgttctctctccctctttgctttgatctcctccttcttcttctcttcctccgctcttctccagcgggcctcttcctccatccccttccgctcttcgtcctcggcacgctccttttccctaccggcggctacctcccactcttccttctccaagcgaagggcctccatctctgcttgaagttctctaagatccctggttcgaaggagagcctcattcgaggcagagctcgaatgttgtcggacctgagagagttcagccgaaagcgcggaagtctcttggttgagagatcgaagttctatttggagtgtttgcacggtcgattgaagcgtttggatggtcgattgggaggtctcttgatcggactgcaaggtcgagagttccgaggagagtgtggtgatttgggcttctcggcgatcgagctcctcctatagtaattaacagaaagaaaaaaaagggaagaggggagggaaggagagggaagcatcaaacgaccggtccaggaagattacaacaccatcagttctcttcaacgcctttctatgctctttgatcgtagaaacgacgcgtctatcagtttgaatgcacgagacaagaataacttactgcatcctctctcaactttttacccaaggtatctctcatgttaccaaccttggccaccaaggatttgtactgtttttccagctgttccttctctgctcttgtcttgtccaactttttcttcaataattcgacttcttcaactccattggtagtactgttagtaccaccaccaccaccggtgatgacgctggttccggctggttctcctatcggagacaatccagttgatgtaggattcaacggtcggacgatatcgatcgacgacttgggtgtcccggtctcgatggaggttagagagtcaagcgtggccgtcgcttccctcaccgctgtctgttcgctcggtttgatcaccggcggttcagatggttctgttggagcagacgtcgggaccgggggttcatctttttcagttgaactcaagggtggtacaggagcaactgctgctgctgctgctgttgttgttgttgttgttgttgttgttgatgaagatgataatgaatccgaagctggtattgatgatggcgacgttgccgtcgctttcgttgtttctgtttctgttgatgaaggtaatacagtcgttgtctgaaccaaaggagatgatgaatccgaaagaacgactggtttcacatctgacgaaggaccttcgttcaacggaaccgattcgggcccgagagcagcgacaggctctgtgggttcttttactggaacagagggagagacagcagtcgaaggtgaaggtgaaggcgaaggatctcttgatgcttgtttagacgaagctgccgagctcgtcgtcaatgtcggtgtttgagcctgagcctgagcctgagcctgagcctgggaggaggatttcttgtgtgatttcttgcccatgcttcaagagattcttcaaaggatcagacagacgagtaaaaaaaagaaagagaagaggaaagaagaagctgaagaaacgaagagagagagagagtgattgttgatgatgatcgaggccagggtagtagtgagatggctaaaaccgagggtgatcgtcaaccgggcctgctccctccgcagcggacgcgactttcgagcttcgtcttgacggccgacatcttctttgatggtcttgtacaacttgagaaacgtcccatgtatcgccggttaggaatgtatgtttcgagagtatgggaggaagataagatcgaacaataaaagtaggacaagcagcttccaaagaatattgaacaagaacaaagagcgcatgacggggtgaagagatcgatttgatcggggagggggtataaatatgtatacgtattgaggatctttgtattcggtcagcctgacgagagaagaatgaaataagaagaagataaaggacacagagatatagcacgacaagaaaacatatatgtgtaactaagccagaggtcatgaatgatacgtgagcggtgtcatgacctcatggaagatcatctctatcatcagcacatcggaccggaacgagagacgacatggtgaatacttggaattagcatattggcagaagaagaagctctaagatacaagaggatacgaacgtttgagagtttctctgcttagagtttcttgtgaattgtcaaagtcaaagaagctactaggaagaggtgcagccgacggttcgtcctgaggatcatgatatggctggattcaggcgtagacgtaaggaggaagggatgaacatcagacctctaaacagtacatagaacatgagacaaaggacgtgaggacgtacctctagataaggatgcgtcaacgcttcttccactgtaatcctctttttcggactgaacgtcagacaacgcctcagtagatcgaccgccatcgggttagtcggcttgccgttgcctccgacgatctcgtgaaaatctcgtcgccttcggaatggtaacgcccgcagataatcttttgatcgagtcgaggtgatctcatagaaatcatccatctgtagagataagcgctgagtcagaggacaaagatggcaaaagaagaagaaaaaaaggatagaggaacacgagagaaaaggcgaactgttggagttccgagaatatctaatatcaacgaaagctggtggtggtaatcctgaattggtagtagaaagaaatgcgcgctcagtcggcgaccaatcaggttcttggagaaacactaagacagacggaacatactctcccaggaaataaaggtcttccggtaagcatctctgccaatatgcatccgacggaccaaatgtcgattgctcgggtatactctttgaaagctgttcgtttgtttgtttatttgtttatttgttttcagagagcggttgaccagattagccgtcgagtgagaagtaaaatatatatatatatataaataaagtagcaggagagaacgtactgagcatgacctcgggcgctcgataccacctagaaagaacggatgttgagatcagaagactggtcagaatttgacaactttgtggcacactcaaagaggaaagatcatcgaacgcaaacagaaaaggggagagggaatgaacatacctagtggctacatactcggtcatgaaaccggctcctccgttcggtcccgcatccggaggaggaagcgcggctgacctggccaaaccaaaatcgcaaatctgaaagaatggaaggagagcgcgaaaatatgttggttatttgttttgctggatcaaaagccagagaaatagagctcgtacctttagatcacagttggcgttcagaagcaaattagaaggcttgaggtctcgatgcaggacgtttgccgtgtgaagcgctttcagccctcgaagtgtctgcaaccagaatgttttcaacaagaaaaagaggacagatgtacacatcagtgttccgtgagggagttggccaagccaggccagtgagggaaacaacacgaaatggatgcagagaaaacgcttgaagagaacgaacttgatagataaagtattggcagtgatcatcgctgagctcctgggtccggatgaccctatgcatatctgtttccattaactcctgatctcatccgcgcgcgttttcagagatgatgttgaaaggaagaaaaaagttgcttaacgagatgagacgacagagtttcgcttgatcactggcaaaggaaagatagatggatgaacaacttgaacgaacctggatcaggtagacttcggtgaacagctcaaacgtcagcggacggacgatatcgaggatggcgatgatgttttcgtgtctggttccggttagcgtcggagaacaaaacaagcatacgcctgtcagcgtttggaccgagaacaaggacaaaggcgtagagaaagaagaagagaagggcaggggagggaag

SEQ ID NO: 1293 - DNA, 19873 bp, Xanthophyllomyces dendrorhous
gaaaggaagggaaaggaaaggaagggaaaggaaaggaaaagagctcgagtaatacgatattgaaggagacaactaacctgaaatgccggagaagcttgatttctctcaacgtcctcaaacagaacatggaatgatcgaacggagtgatccgcttgatggcaacctttgtacctgaggggagatgtgtggccgacacgctttgattggaattcacaacgacaagagaagatttgtgagctttggggatgattgagaccgtgtttaggatgagagctcttcttcttttcttctgcacacggaacgccatctagagtcccttcaaactctgcattctgggttggtcgagctgcgaagagaagaagaagaagaagagaaacagaggaagagtgtgtgtgagagagagagagagagagtgagacgcacaccatgccgtaggcaccttctccgaccggttcgatcacctggtacgatggtccgacgtgaaaggcctccatgaggttggtgtatgtcttgcagaagggttgcctaaggagagttcttctgagatgggctgatctggggcgagactagactagactagaccgaggaaaggacgaggactatgaacgagaagagaccccaaggtgatgtagctgatgcgaggccttgatggatagcctcccacaaccgggactgggacagaaaggagtgaaggatttttgttcttttttctttctctctctctctctctatccactgaaagaacagagacactgatcagagatgatctatgcaacagaggcaatacgtatggaacggtgagcgttgtctagatagcagtcgacggatgaagcaagacagttgaagaaaggatgagtgtgcgtgtgtgttgtgtctggatgaacgatcacgaatgtctcacagtccggaaagagaagaaagagaaaaatgaagacaacatagaaaggagatgttcttgggatctcttgtagtcctttctttgttctcatgactctgcttggaaacagttctcactttgttcccttgtgcgccatccggtctacgctccgttcccatccggtctatcagctcggttcccatcagagacaaaagagcaagcaggacaaaaggattctgttaaggatcatgaatgtgagacatggccggagatttccgttagggttaatctagattgctgcctagacatatgcctttgttcttcggtggcatcggtgtgttgagaagagagcgcgctctcgcccgggacaaagaagaagaagagagttgttcggtgatatgtgttttgttgtggggaacgtctctgaagaaatgtttgtgttttgaagaagtaggagagcacaaccacagacatgggcggacaaggtggtttcgagagcagcacagacatatataggatgattgcattttctgccaacaagaactagtcctgattccacacatactatccactgggttgctcgctgaacgttgctcggtcaagagagggtgtttctctatctgaggagccaacagatgttgaacgattgaggatctttaagaaccggtcttaccgtttggaacacaaccagcggtggcggcggcggcggcggccgatcgtcccggccgtgatcttctcccttcttcctttttgcttgatctactttatctgctctctcaatcatcctcgttcgtttcaaattaaacactcatactctcataaagatgaacacacctcaatcagttgtatgttcagatagcttctgtggtgcttgtgctttgaagatgagaagctgatgtcctttttgttactcgttgattttcttgttctctcactcaggccttgggatggggagtccttcttgtcggtaggatgcacctctttgtttgattcgaacactcttatggctttcagatcttccgtcctgacatcattcctggtcaactcttatctcgttccaatttttaattttttttctttgggtttctcttttgtgtgaacgacatcaacagccgcctcggcatcgtactactacgcgaaatcagatattgatgcccgacgactcgaccaacaacgaaaagggttgagacagacccaggtcttgacttgttcgtccctcttgattcaatcctctctgtgtccttgttttttcctttttctttttctttctgttctgacatgaatcgattggatcggaactttctgaaggggaagaacgtctgaagctagacgagcaagcagccgcggcaggtttgcctccacctcctaaaccggtgacgggcggaccgactcctgcgaacccagtatcggattcagcaaaagttatccccccaccagtagggaaataaaagacgatatgaatctgtgctctcgtataattcacgtatccaaatatcccaatgatagttgactttgtcgtcaagagcttcccttgacggtcagtttggaatttggatgtggatggggtggggatatgttgaggtttgggtaaggtgtctggtccaacgcgcatgtacaaacgctctttttccttgttcgacaaaacaggagctcgttcgctctggctgcaatatacacagcacacatcgcacctcttgaagagaaaatatataggagaaacgcgtacgtttgagaaagaaaataaggggagattgagtagtggtatagaggcaaaagaaagaaaagggagagagggaagataactttcgaggctgctcggaaaataaacaaacacactccccttccacctcctcattcaacattggctccgtccgttctgtctagacaggaagggaagggagagaagaaagaaaggtgcagtcgatcccgcgatcttaaagatcgacaaaggtcttgacgttctcgagccaagagacgtactcctatgttgacccgctcagccgataaagagctcgagtcagacccatgttcgttaagaaaagcgagagaaatgaaaaggaccaaccttctgctccttgtggcgctggtactcgcccaactcggatgcaaactcctcgtcgattcctcgggaggtcaagaaggaagcgaattgctgtaaacggtttggtttttgatattaagaaaagaaaaaagaaaaaagaaaagaaaaaagaaatgacaaaacgttcagatccatatgtacttttctttttctttacccaaatcacattgcaaacaggaaggaaaccataaaagacttacgtcctgaacttcagggtcaaggttctcaaagcctaacggacagaacagagaaaggcaaagacagatttttagcgtaaacactttcaaggcgcccaacaacagggagaagagagagaactaactgggtccgtcgtagacacctcgcttcttgaactcggcctcggcagtctcctcggtctgaagtttggagtccttgtaaagcgagacccgctcgatggtgaagtcaccgtcctgaatagtggtctggaacacaagggcctgggcgttctccttgggcttgaacgtgggagaaaggatgggatccagatagtgaaaaggttttagatgcaaaagactagaaaggatatgatccaaagcaaagaaagggtgcaaagagaatgaaagatacataccttggtgatcgaaactgtcacaatagttccaggcatgtcatcaaactcgtcggcctcgacgtcctcctcctcttccacgggcttctcctcgggaaggtcagaagcggcgatagtgaccttgatgctgttacgaccgaatgagtcaaagagggatagattcgaggtgagaacaggatgagaatcgaacattatagcaaaaacatactgacacctcgttctcgatcgtctttgtgaaagtgacctcctcatttccaggcttgtcggtaatctaggtgtcatatgttcaagattagctacacgacgtcgtccggcacgccgtagcgcgcaaacaagagtagggacaaggaaagaaagatgagacgtacttcccaacctcgagtcttcaagttctcggtcgtagtggccagatcatcctgggcaatgttctcgttctcgaacgtgatttcctggctaagagcggaaaccaaggcgatgtcgtctaacgaagggaacagggtctcgacaaagagtcaaagacacaaagagacgtttgtgatgagccaagataacgggaaacgatgaaaggaaacgacctaccctgtcggctagctctctggaaagcagagagagagaacgatcgggtggccacagggatgacggcccggagggaggacacggcggaggacctggcgatgagggagggagcggcagctcgggagacaagagttctgagagttcgggaagccattctggtagcagtgatgatgaagatgaagtgtgtagttgtgagaagaaaggatgtaaggaaacacggaacgaggacaacagttgatggcaaaagggttcaaacaatgtggagagcgtcttgaccaaaaagaaggagaaagaaagagatagaagccgatgggcgggaattattttgaggcacgtgtgagcacagctgtgcaagacatatgcttagtcataccgtcaggtacaccgacgcttgtcagtcttgtccctgagttcttgtgcctgacacgcagtcacacaaacggttacacccacggctacacccacggttacagatcccaccctttttccccgtctttcttcccttctcttttcgaccaaccagatcgagcgtatcccgttaggtcgtttttttccatccttccttctattcatcatcatctacattctttcctccctatccatccacacagagagcatctatttcgctcttgactacatccgtctacacgtactcttctatacactcacccagacataaaatgcgtgttacactcaatcctacagcgttcgctaggctcgtcccttccgccgtcgccaccggtcgttcagctcatcctgcctttcgttcggttggcacaccttctcctgtggcttcttcttccagattgttcctctcgtccaaccgatcaatttccttttcctcatccttctctgctcccggtttcgcatacaacaactatccttcgccgtcgtctcctcttgcctcgtttcctcctgatttccacaccaacccagagttactcgctctaggagttcctccatccacccaacagccaggatcaaacaagggcaaaggcaagcaggtcgatacccagcacactgctgaaggtggtgaagtcatcaagaagccaaagagagtgttgcgagcaaagaaggctgccatcaccatggtgcgttcatacttttctccgtttaacctagtcatcagactcggtgctcttggctgatcatccgtcttcctattggctacaccggtatcaatctcgatcttgaccttttcgtctctctccgctccatcactcccggcccgtcatccgcttgtcgttccccttcacttgaaccaatcgtctgtttgcttgtctgcgtcgttctctactctactcttttttcgtttctgcttctgtaacgacccctccatagaccccagcggctgtggcccaccttcgcacgctttcccctttcgcatcctccgcaccggcctccgctgaacagacattactccggataggcattagaactaagggctgtgccgggatggcataccatctcgagtatgtcaacgctccaggaaagtttgatgaagtggtcgagcaggatggagtcaaagtgttgatcgacagcaaggcattaatgtccattctcggaagcgagatggattgggtcgaagacagactaaggcaagttcctcttctacattctcacctttcttcctgtcgacccggtttgcttatctctgacatatcttgtatacacttttacagtgccaagtttgtgtttcacaacccaaatatcgtcgacgcttgtggttgtggagagtccttcaacgtggctgcctcgtcgtagattccatagaactgatcttgtcgttcacgtcaggatgagccatcctgcatcactcatcccacttgtacattatacacttggacctattcggttcactcttccacactttctcccatctacacagggtttctcttttcgatctcgttcgctcttcactacttttctcccttctccgccggcccttcttggtttttgttacaatagatctttattctttttcgatcttttcttcctcgctcctaatgcctgtccattttattccctcttgttcagaaacatatccactgtcgatcatgatactgtctcgttttctttgctttaacctaggggtacgttagaaacacatggtgataaaacatagagcagataacagatatgtgaggatggatacagtggtacatgataattataccaagcctctcaatcacgtagacaacaagaggtaaaaagatcaagtgacagagtcgtgttcgtacccagaaaactattgactggtagagtctcgattgggattcgaagatgagccagtgctctgatagccatcgccccttgctttaccctttagtgacttggatgttccaaacgaaccgaacgtcggtcgaccgattcctgcaaaccaggccagactgttccgtgcaaaaggtaatcaagagttacttcgatattactgcctgacacgttccagaagagaggagaaagaatgtaagaaatgaaaagatcaaacccaccgaacgaaagcgggcagagctgtacccaacacgtttccccagagcataatcgtccatttttcaaatggagccgtcctcacttcagccggcatgagcgccaagatgacggaaatatggagcgcgtccccaatggagaaagcagcaaagtaccgtgtaaggattgtctcgtgagattgaggatccttctgaagggtggcttgaagagcaggtatgacgaggaatgataacagtccaaggattgccatgcctaagttgaacaaacaatagttgtgcacacgtccctccaatcaatttcatgcctggcccacatctgaagaacacagaggaaaagactatacacacagcttcccatcccaccggccaccaagatccctctgggtccacctccacccccactgacgagtgaaccggccaagacacccgcgtcttccggtcgcaagaaccactcgaagaatcggttcggaaagaagattgcgtacgctcccgcgcctagcattcccaacggctcgccgatcgcgagtgcataatagtatggtttaggaagtggactagctctcgggaagatcattctgtacgtggctaactatgtgaacgtcaattgagaggatggagaagagatgatcgagagacgacaacgagagaaacgatcgagggatcccctcaaaggcaagtcggggagagcaatgacgacggagggtttcattcagcacgtgggggcacagctttcgtcacaagttgtaaccacttgcttttttgaatcaagattattgtaccagaaaaatatacagccagaatatacacctcttcttcatcatagtgaggacgcaagtttgaacatatccacgtatacgcctacgcctacacctactcatctcaagctctacagatgtccaactcggcagctctcaagctgctcacgctgatcaacgtatcggccgctcggtcgactgcccgaccacgctcaatccctgcttccaaagttgaggacactactgccgagtctggtcctcctaaggcaaagaaacggaagactgtcatcttcggagaagagctcatcggtggtcccagtggcagcggaagtccagtggttgctaccggaaatagcaaaggaaagtcatcaaaaaaggccaaggtcgagatcgacagtgcgccagccgaagcggcggttagaaaatcaggtggaaaggatattgagctcgacaagggagactctgacgacgaggatggggatggcgaggggaagggagaatctaccagttagcacttttattctttctgtctgaagtcaaaagaaccgattgaacgatgaactcatttaaaaaatctcgcttctcctaacctagctgcatcttccatgaagaccgacgcgttccacacccactttgggccgtcctcttcggcctcttatttcacaccctctacaattgcgtctgctgctgaaggcaagtggactcagtccaagctctccgacactagcctcggtaaacttgttcaatcggttccggaaggaatcgacgcttcttctcttgacggaacgaaagccaagattatcgagtctctcattgaacagttcgataatcttccctcgagttcagacggtcaaatggacgatttccagacttcgatcttgtccctcattggcggctacaaagatctcttcctctccagcttggagttgaaccagcgagagagaacaagggatgtcgtccttctgcatgcgcttaaccatgtgctcaagtgcgtgtcaatctttggttttgattctattcatacacaaacagagagctgatcatcgtctcaatctacttctttttgccgtaacagaactcgacgacggatcttgaagatgaatgagaaactcgcccacgaagctgctgccgctgctgatgccaaggctgcttccgccacctctgccccacaccctacccctacttcatctgcctctacttctgaccccagagatcaagggttcaccagacccaaggttctcatccttctccccttccgatccagcgcactccaatgggtgacctctcttctagcactcttccctcctgccactcaatcacaaaccgagaacaaatctaggttcttttcagagttttcgcttccgcctggtgtatcagaccgattggtagagaaggcgagcgagtggccgaaggatcacgtcgatacattcaagggaaacgtagacgataacttcagggtcggaatcaagattaccaggaagagcgtcaagttgtttggaggattctacggaagtgacatcatcgtggctagtcctctgggtttgaggatgagcatagaaaaggaaaagtacgtctccttttcccatatcctccttatttcaacatcttgttctctgtggaacacaaactgatcgcatcaagccttcgtctgtcaaacataggagttctgatttcttatcatcgatagaagtcgtagtcgctgaccaactggatgccatgtcgatgcaaaactgggagcacgttcaggttagtatttgattctatcttatgggaacgtgatttcggcgcaggcgaatcatgacacaacatgtcactgacattttgtacttggcgagcagtttatcttctccaaaatgaacgccttgcccacggattctcacggatgtgacttctcacgagtcaagccatggtacctggagggacagtgagtattcccgtgcatcctgtgaatcttgacggctagatctcatctctccaatctcttttctgttatttgcaatctacaaaagggcgcaataccttcgtcaaaccatccttctttcgtcctatgagactccagagatgcggtcactctataacaaaagtctgacaaacctggctggaaagattcgaacagaacagcggttcgagggagagcagatgaagattcggagaggtgtcaagcaggttcgtcaagttttcctccaccagagtctaaagcattgttgttctttctgacataagtttatgttaccctcctcacttctagacgttcacccgatttgagtctgttgatcccaactcggaagcagacatccgattcgatacgttcaccaagcaagtcatgccctctgtgctcaaatcggcggtcatgtctcagaacactatcatagtcgtgccgagttactttgatttcgtccgagtgcaaagttggatgaggaagcagcctgacctaagcttcgccgccatttccgagtgaggctttcttcaatttgcctcctatcggtatcattgataaatcaatgtagctaactgatcactctctgtcttgtcgattcattcatctaggtactcttccaacccggagatctctcgggcgcgaacatccttcttcaagggctcaaagaacctccttctcatcaccgagcgtttccacttttaccgaagataccgactccgaggagccaagacctttatcttctaccaactccccgatcactcaatcttctatcctgagctcgtcagtttcgcattcctaaaaaacagagagggtgatgaattggacgacgtcgaggttgatgagggagaagtctcgacaaaagttttgttctccaagtgggactggatgagattagaacgaacggtcggaacggaggatgcgagaaagatggttcagcccggtggagatagtgtgtttacgttcatctaaacatgacattttctctcgccagaatcagaatgatgcagatgagtcttgataagtatatttgttcaatgcttgtcgattcaacagacgagatgaaatctacaatcaagaaccttcacgacggtacgatggggtatgaagcatatataaaagagtgtatgaacaagaacaaagatttcgtcatattataagtacggtagaagaaagattgaagagaagaagaatgcatagacgatttccagattaaaacatcgctgacaaggttgtatcaagagtttcttcatctcatgattcttcagtggttggatcaacaagctctgcccagggccgaggtcgaatccacatttctgttggccgccgagtgacagcctcggcgaatttctctccgttcggatcggccaaagaggcgggcaggatatccagaaaataccgccgagagagcgtcatgatgaacgatctgagctcgagttgctgatagcatcatcacagccgagtaaccaacagaacaaagaatagatcagaaaacagaagtgttaaaggactgaatgctgaattggatatgtaccgctagtctcgagccataacacgctcgaagacctgtaccgaaaggtatacttggcccagcgttgatgtcaaacgacccgtcggctttcaaccagcgttccggtctgtttggtttaccatatgcaaatacaaaaggtatgaatcaagacaatatgggcgatgtttatttagtttgaactcagatatgacagatggcaacgaacctgaactcatcaacatcgaccttgtcttcccatcggaacctccttggtactgtacctttctcagcctccaatcttggcaaggtgctcgactttgtagcacaaccggccatgcccatcatgagaaggaaggttgtcccctttggcatgacacatccgttgacgacagtctctaccgtagctaatagaagaaacacaattgagatgagcctctgattgcgtagagagagaggggggatgatagggcatagatcaaaggaacgattgtgcaatcaaagagggtatcacccacaagtccgaagagtggtcatgaccgtctgagatacgcgcagaatctcttgtatgactgcatcaaaatctgaggagatacgaagagtttagcatgagctcaataccgatctataacattagcaagttatagtctcaatctgatctgatttaaagataaggagaagaaccaacaagggagcgaagtagagtgtatatcctcgtaagtgagagtatgctctctaacgtcgggcaagacatgcttgatctcggcgtgtaaccttctctggacgtctggattgcgtgtaaggaatctcagcgcccatcccatggttgaagatgttgtgtcgtctccctggtatgtatggagagagaaaagaggtgatcaaaacttttggtatcacgatagtattcgagatctatgcttctgacgtacggcaagaagcaaagtgctcatctcgtccctgatctcctcaattcgaagattagcactcttcccattttctcgctcaatatcccactctttttcgaggaccatttctaacagacaactctctttagtttcacctagccgaacttttctccgtccctcgatgatcttcttgttcagcgagtcttccatcagtcgctctgcttgacgaaacttggccgatctgagacgatagaagaagtgagagaccgatggaaatgtagattcgacggggatagcctagatgatatataacatatctgtataaggatggaggcaaacttattgacatctgacaagtatataatgcgtacttcgaaatacattcgactagctcggccgagtgcgttggtctcgatagggaatcggttccgtcccattttccctttccgttcaaccacggcgatattagcctccagttgatgatatccgaatccgaaagcgatatcggagataatatcctatgatatgtttcacgaaagagcggataagcagcttaggccatgaatcggaagaaagagagcagtaggatcttcttgagaacaaactcacgccagtcagaaaactcaagtcttgcatcacttcaaaacatccctcttcagaaatccgttgaactgcatctcctaaagcttcacgtttagattcccatctatgtatcaaggagatagacagagattccgatggtctagctagctagctcgctacttgtttctattggccatataaagtactcacagattgaacaagttctcagtagtttgcacaatgttgggcgtcagtaacttgagattattttggttcataataggcccgaagaatcttcgatgattctaaggaatagatcataaacaagacagtaagtttaacacagggaagcaacggttggtgcgaaggtaacagaagtagacaaacacaccttccaaactgcgtctgtctcggccaaatgaacaaatccagtcagaatatcgaagtacctcaacatatagagtgactgcctcgctctcactcgttggtagcgcgagagatcccccttgagtatagatgatgacatggttgttcaaaacataacacaatcagcattatctgaacctttatgtaccagcaatgattgatctttgcttacaaggagtgataggcccaaaggccttcaagaggtcatcagatcgtcggaaaattgagtctttcttcataactaggtagttttgtcgaacatggcaaaaaacacctgtcaaaatatgtaatatcgaatgccaggtatcctctaacttactatcttcaattatcatcgggtcgcatatcaccacggccgtattccaggcaagccaatggaattgatagaaacctagagagacgatcaaaaacctccatatcagggttcgtaggacagtcccaacaattggcaagaaaaatcggtaggcgcttacctccgggaaaattggctgcaatgagctcgtagtaatcatgaaactttctggttcgaacgtaattcttgatgattggccggagatctccaaaaaaccactccgtggtttccatatggggaactccaggaatatgccttggcttggacttgtaaatgatgaagcatgcaaacgaaatagcgaggatgtaaatcgcgatccacagcatggtggatgaaggcagattgaacaaataggcggatagagattggtgagatggtagatgggtcacggatggataggtgatggacaagacaacaatctggctgtccaagattcctcttgtgttcttttatagtgcaggctcaagtatattgcacgtgtttaaagaaaagttcaacgaatatggtgtgatggtatctcgtcttgaagaagaggtagtattttcggccaaggatacggcccaagtgaagtgagaaagcttctctgtatcaacccgaagtgaatgtgaagagataagataagagacgggctttcgacacgtgacgtgatgattgcaattacgtaattaggggcgtaaccattttgtgcgtcgatcaccccaatcccagcacgcttgataaccctacccctaacctgagctccttcgtactacctacgtcgttccatccgcttatatctatcgccatcatcagatacatcacaacagcaagtgatagaagaagaggctaagacactgaatacatatctcgacatgtcttttaacgatcttgaacgaggagttcctctcaccacgactaacgcatcctctagctcgaatcaagagttcgacaagcttcaatccagtctatcccttcagatcttcaagatcaacgcgaacgtcaaaggaatcgataaacttctcctaaagctcaatggagcgaacaatctgacgagtaggaatgttcgggacagtctgtatgtccacttttctttttctgttttcacatgccggccttcgtcgtcgtcttggtagttcgtgagcaactcgccgaacgtacttctgtatattcaccaacccttcgattcggtcacccagatccggcctcttagattcaactcgggaaattgtcaagcactcttcatcggaccttaagaagttcaccgcattcccaccgtctcctaatgctcctgtgagtgactttctttgtcatgattcagatttgttccgttctaaaattggccgaatgtatgcaacatgccatgttggctagaataatcactgactggtgtcctatgaatgtattcacttatcgttctcgcactcccaaatctattgaccgcagaatcgaaaagctttgcagacaaagctttccagagagtaccaaacttccatctcggctttccagaagattcagcgaatagcagcagacaagcagcgtctcttggtcgaagaccaacggaaggaggtcaacgagttgcgttctttcattttctccgtctatactaccttgacatcagatgacttactttctatgtgctcatggcgttctctcccatgaacagagaaactactcatctattagacttggaagaacaaggcagcagtcaagaacttcaacagcagcaacaagagcgaatacaagtgtcgtacgtgctcatctccttttgtctatctatcctcatcctcccgactgattactgacacgtgtcgttaatttatttggaaccttgtcgaaccgatatgtggatggtagtcaaattcctgcccatgaacttgaatttcaggaggcccagatcgcggagagagaggtcgagattcgagagattgagtccgggatccacgagctaaatgagattttccgagaccttggcacgatcgtcgtcgagcagggtggaatgattggttcgttctatgttagctgaagaacgtgttcggacagatgggtggattcctttaggggttaaaaagaattaaaatgctgaactgtccaaacactttgacggatacatccaatagacaacatcgagtccaatatcacctcggtcgaacgtcacacttcggctgccaaccaggaactctcgaccgcgcacgaataccagaagaaagcgggcagacggatgctttggcttatgctcatcttgttaatcgtctcggctatcgttctgacagcggtaagtgtgctttgccagcttcgcagcttaaacgtcagagatataatactaaattcgcgctggacttgtctttgaatctcgttctcagatcctttcttgaggcttgtaaagtcatttttgtgcttcagattaaaagcgaccatcctcagaaccccttcatttcttttactcgatattctgatctagctttgtacttttcactctatagcaatctcttgtttgatatgttcggtcaatgttcctcacctacgtatctttggataccatcatcgcttcacaagagatcctaatcatctctcttcccttgctctctttgcagttgttcaagtcgaaacgacctcttgctatctatactgccatcatggactccgctcgtgttgtactccttgtcttctacattttgataaatgacacattgcgttacatcttcatatggaacatctttggtgcttaagcgacctgtccgccttgttgaaagccctggagaacgctgttcttgagctgtcattaaacagcaatgtgactgtcgagtcagagttgatcgaacatagaaaaagagaagagcagacaggatgatatgggaaagaacctaccactggactgatctcttttccatcgtccaagaagtaaccgatcataagcaactttccaattgccttctcttggactttgcccaaaatctcgccctcaaactcgaccacaagttctcccgaggagagtctaatcaacaagagttcctctcctttagcggctgatcgtttggggaacatcgccttgaaaggcgttaaagcgctctcgatcgcctgcgtttttaaggtggcacatctgtggatcagtatgatacatatctagctcatgtacgatcaaaactcacctcggcttcggattccgacatttgactagctttggagaggagcttgactctagcctgaatggcacgaacgaatccatctcggagatgatcaaatccggtgtttctcgtaggaactgatgacaacaacgggcggatacatgtaagactggaagctttggaaacgacacatccaatggcatcaacgtaccgattcgtaggacacaaggctgatcggactccaaaaactctttcatcgacgcttcactctatgcgaaaccaagcccggtcgacgagaacagatacaacacaaaggatgatacaggccaaggacgtcatggctgatcagaacttgatactgaaatcgaaaaatgaaggatggttatgtggaaaagacctactcccatcccaggcttctcccaccaggtccccttgggcgcatagaaaccagcagcatagaccttgactctcaagaaagacaccgtacgaactccaagtccaaccagagccagaggggcgctcgacggactagccgactggagagattttggtagaatagaaagagggaaaggaagggatgtagagctatcaactagttcaaacagaatcagcaacaagtggaaatcagatgagcataaaaccaagacgtggacaaactcttcacattagaaggtggaggtgcctccagctccaacaccgagagaagtcgagtaggcgcaaattcgaaatcttgatcaatcgtacagatgaacggcaggatgtcagacacagaagaaatagatgaacaggtctttttcgacgaccagaagagacgaacccttgagcgaactaccgacgatccagcctgttgtagccagagctgccagtccgatgactgctccactcggtctgacccatcttgcggccacgggtgcgactcgaggaccggcaacgtagctcagcttggaggttgatcgaagaacctgtctgatcatatttgatgtagatcagtatgaaggtaagtgggtaagatctcctagatttgtgccgatctatccgatcagtccacagatagatgtggtgaggttctctggcggtgagacatttcgttttctctttcgtctctttccttccatcaacgatcatcctgcttgccctcaaccaaccctcctttcttctcttctcatcccgttccgtcttcaatcttttacctgagcaacctttccatgtccgttatggcagctcatccgtcgttgcctccgacaccttcaaatgcaggcaaacacctcttctctacgcgacctcgccagcaacctccccgagcccgttctgcctccgcctctcctcgacccaaacaatctccagcaatcggaccatctttcccttgctcaccactagctaagaattctcagtcccgactcagtcagtctcggccggtcagtcctgtcaagcaaacgtctgaattgacactatggccgccaacaaccgctccgaacgcggatgagcgtcggagtcgaagccgtggagccaagaaaggagctagaggaaaggaaaagaagattgtcctcgaagaagcattcagctccctagagctcgacgctggagtcccttctgaagcggatgtttgggatatgccgatcaaggcgagcggaagagatgtccttacggtaaagctttcatttagttctctgcactgtctctcttgagctcatccattcgtccgtcgtaattcatttcattcaatctatcttcagtggcagcaaacctcttcttcatcttctccctcgaagcttccttcttctccacgaccccgagctgctagatctcagcagggacagccggtctcgacgtccaagtcgatcgctccgttcagcaggtcctcgaatcaacctctcgcagggccttttcatcacgcttcgtcctcatcgatcactgcagtcagctctaattctaatctgacctggcaacaagccttattcgagacggcccaccctgcctcatctaggccaaagatccgacgccgggcatctctgggaaacgaatcgggtaccgcccctgttcatcttcctagattgggcgtacccgtcaagtccaacagcatccaccatagctcgtctatgaagaacaagcgcgtatcaggctcgcctcccaacaatggggaacgcgtgaacggctcgtcatacccggctggaacggtcggatcggattctggaggagtcagacgccctgagggcgaaatcaacacctatgctggaggaacgttccagaacgcccccttggcaggggacttgcccaagccccgatttggtgctcgcccctaaggagttggagaaagggaggccttcatttctttggaggagctccttactcgtgtggccgaggacagaaagagcgatgagggatcttcccttcaatcttttcttgaattgtccatcacgtctggcaacctttcctaaactgctccctactgcttggggtcatctcccgagtacatatttctcgcccctcttctctctttctattcaggttcattttcttcggccagcatcaactttggccttctatttcttcttttctctcggctcggcgacctcggtttcaaaacgtaccgaacgccaaacaacagctgtttctcacgaaacagtcttttctcggccttttctatcatactcgtctattactatcacctcaactcccttttgacctacactcgcccactcgttgtcctcttgacagaactgtcaaccattcaaacgcatctttatgccaccttcgaccaaccattcgcctctcgtttcgcatcataccaagcttggtgcttgacggctacaactatccatagtctcactgtttcttgtgtgtgcatgctctcgaactagactctctctctcttgtcctcctcaatatgtaacttctcctgcgttactactccttctttgaatcaattctatctgggttttttggtctcggtgtgttggctgctttgcggaaaaaaagaatgacttatttccaaggtctctcgctgtcgctttacttgcctcgtcgtaagtcctgcctatcgtcgtttcttctcgtgtgtacgttcgacctgactcatcgtgttctactcttgctttgaactgcctgttcgtgatcgttgcctgactcgtacagccgtcaccggacacgttctataaattctgtccatgtagagatgctattcaactagcattaattgccaatatcaatcgctatcatcccctgcctcctacctttctcgttatctctgccctgttctgttctgttctgttctgccctgcgcctgtctcttctccttcttcttagtctcttttcgaagctttgctctaagattgaatctgatatgactttgcggtcgtttatacttgaagtcaaccttctgggcgtttgcctttctcttcgtgaagtgatcatcatgtttggattatagtttcgtccagtagaaaaaaatacaatcgatgattcatgctcaaagtccgtgagaatgaactatacgtaccagagacagttctggttattggaaagaaggtcattcgtcaagggtttcacgggtattgatctgctgaacgcgtgagcggcccccagtcggagagatctgtcggctgagtccgtaagaacgatgtgaatttctacagactttccaccatctctctctcactcacccgtacacacacacacacaca

SEQ ID NO: 1294 - DNA, 2182 bp, Xanthophyllomyces dendrorhous
acacacacacacacacacacacacacacacacacacacaaacaatatcatcaacatggctaggatcatatcctctcctccaccgagcaggtcgacatcgacgccaacatcaacgctcggaccagacagccaagacaccttcaacccataccctcatcagaagacattacctggttcggcgccaggcgaacaaacgtatccgaaggtgttggacccgtacaccggtcggtatgtatctacgaaacctgcgaacatgccgttcttggcccaccaacggtacaaagcgtctaaagcggccgccgatgctgccgctgctgccggcaaggatgagaacgcgaatgggaacgacggacggactcgatcagaaagccagacgacagagaggggtatgctcgggtggctcaagacggtcgcctgggcgatcatgttggcttgtgttctcggccggttcatcactgggagtcccgtatgggggtatgaggatgagattcgatctgtctggaacaagcatctctggaaggttcgtccttcttttttttccgttgaggagggcagagggaatgctgttcaactcggtcttattctttcttcttcctgccttcattcctcttttcatcgaaacaccatccctgatggccatggacccaatggtttctgaacattttctgcgtttcttttccctcttgctcttcgtctcttcctagcctagacaaatccagttcaacctggaccaactgtccgaattcacaggcaagaacccggacagaccgatctacctgtcgatctctggaaaggtttacgacgtctcgagctcggctaggatctacggcccgggaggatcttacgggatgttgtatgtccagtcaggaagagaggagagagagcaaggaagtttcatttagtctttcctgtgagctgacagcacgggctttttcttctcatttcctttctctttgttcatcctcaactctgacagaacagggaaagacgcatcgagagcgttcgtcacgggctgcttccaaaaccatcacctgaaccatgatctccgtgggataggacctgctgaactcaaggtgagtacactgaatgaggaaacgcagaccagagattcgactgtgcctcttgtgatcatgaatgatcgacgttctcaccgatgtatcctttaccattggatcattcctcccccctccccccctctacgggtgtagtccctgacgaactgggaaaagttcttcgccaaccacaaacgatacgttcaggtgggaaccgtcagcctgccgccggtcgaccctagggaaccgatcccggggccgtgtatagattctgcgccgaacccgcctgccactcgacggggcaccgacccagccgtccgagcgccgcctgtcccgcccgtccaaccggaacagacggacgagcacgacaaaagggccacactttcggaacacaaagagctatagaaaaggacggtctccatgctttctatcagatgaagctctctggcttggcgcgccccgcgttgtttccaatcagagaaagaaaaaaaagagaaaaaaaaagaaaaaagaagacatctgatatcgaccagaagctagttatattcctctccctctcgctttgtaaaggatgagaacgagcgagatgacagaggacgagctagaaaaagagattgactgagtgcaaatgtattcaatcaaacaagaacggctgaacgaaagaaaaagaaagaggaaaagagtggccacttcttgttaatgatgatgatgataatgatgatggtgatggtgacgatgatgatattgatgataacaaaggtgacgacgaagagaaaaagcccggtaggaagaaaagatccaaagaaaacaggttttgagagatgcgcgcatagaatgtcaatgtaggtttacaaattaaacaaacaaaaaaacaaaaaaaagaaagaaagcaaaagggatggttaggaaaagcaagatcgatcagaccacgatcaaagactcggctgaaagagagagtagaaaagtccgaacgtggtgtatacgaatgaaaacagacatgatggaggacagattgtagacaatacaacttggagagaaagagaaacattgtgagaaaaagaccgatatgtacaccctacgaaagtgcagatagcaaaagaaaggaaaaaagaaaaaagaaaaaagaagaaa

SEQ ID NO: 1295 - DNA, 5416 bp, Xanthophyllomyces dendrorhous
aaaaaagaaaaaagaagaaaaatgcagagaaaggaatctccgagctgagctgtctaaacggacaacatttagaaacccgattggcccctcgaccggcactcaactttgtcgtcgacgacaggaggtcgatcggtgtcccaatcttcgaccccacacaccaagtcatcaaactcatcctcctcctcggccagtcgtctgtacctttctactgcaccttcctcctcgtcctcccaccggtcaccctcttctcccgcccggggtccgtccagggtggaaagtgtgaactctgtaggatcggacacggtctcatcttcgaaggacagcccgttcggtctggtattcttgtcggcggaaaaccttcgggcgacagcggtggaaagtccgtttgctgttccactggcagcaccggttccaggcagcagatagttgttgttactaaacgaagaatgacccgagaatgagcccgacgggctccccacacgctcgcctatttctcgtttgagttcaccgagcgcgttggccgtggtgctcatcagcacaggcacccgtttccatgaccgaggagagatcgtcgggccgtctccgttaggataggccgggatgatcggccgggcgggccgaccggtcggatcacctagcgaggattcaatcgccttttcgagcaaccggtcgaacgatcctccgctatgggaatgggagccgacaggagtgtttcctctggacggatggcttgtcggcggggtcagcccgtcggtcaccgggtcgaacggatagggcgaggtggacggggaggtcaacagaacttcgttccgaacaaccaatttagacgtcgatgggagagatggaaagacgtggtggaccgaagggctgacaggaagaggaagatgatgaaactcaaactgatgagatagatagagcggtccggggagaatcttgagcgacgaggagatcgtctgaatctctgcacgggaaagcgacctaaagttcaaggagacaaatcccgaaagatgtgatgagcattttccgttcagccatcacgagcagtagaggaaaaaaatgttgaaaaagaaaagaaggaacgagggaggttaactaaccatggcaccaagccctgtttatgattctccgccagactaccttgtttaccgtctggttgggttgattcgaaatgcttcaatccgatatcctcgatctcagacccgactgtgccgagctcccaagcggccccctcccaggacttgacctcggcttcgagcccgccgatgttggaaccagaaacgatgccctccgctcttttcttggccatcatcatcaggctgagcgccgacgacggacctgtcggacttttgggggtcggactgaccgatggggttgattcgaccgacgtgggtaaactcacaggacagaataagactttctggagagagagcaggccgacggtcggatagaacaccagtatgtcttgtgcagtctcaggcaggcccaacggaccagaaacggcgtctgcgtgttggaaccgaccgggtgaaaggtctgcaggacggctgatccgaccggattctaccgaccggactcgttcgggagcgaggaagcagcaggtgacgggaggcagggagaggtcaccgacgttgggcgccttgagcccggtgctcgagagaagggcggacggggcagcagcggcagaagacgcagatagctgggagagctttcgaagagaagaagagaacggaggagagctgggcggcgtgaggcagtctcccggaggaagaaccttagggatggacattggggagggtgtcgaagaaggaggtatctgtctagtttgatggatcctcaaagcgggttgaacggctgtcgagagaggttgctgatgatttggcaagcaaaggaagatcagtctaggacgagaggaagagaaagaagaataagccggatcgactcgagcggcccaaagaaagaaggatactaaccacgtcgagagcgttgaggactttgccttgcctgtggcctgtaggaggtcctccgtacgggttaagagggtagacgtctacacagaagaagagagagagaggaggaggaggaggagaagagggacaggttccaatgtcggccgtccggtcaggcatctttacgaggacgacagaaagagagacagcgatctgacttacggagcgtgcctttccctgtggcaactgccacccatctgccagcgttgtcccaactgacggacttgacgacggcttcactgacgcctcttctgaggacgtatcgttcccaaacttcgcccgaggaatgtcctggtgccgggtgtggggactttctaggcggtcggatctcgaccacggcaaaggagcacgagggggcctgggagatgagaagcatctgactgtttggggagaacgacagatgattgatcggctgggccgaacgggcggtcggagatgggtaaaagtgaacgagaggggatctgttagccgggagggaggaaagggtgtttggaccggtgctgttgaccgaggcagaggagagtggatgaaggtcaatgatctgaacagattgctctaccctcgggaacgaagcctgttggccgggatgagattgatgcgagtgttggtgggatgagaaagcatgttgacgggactggaaagagtgttgaggagactgataggaatgctgaccggtcgagtaccgatctcgtgaggaggaggcaggcgcagggatcggcctggacttggggatgtgaccgtccggggtatcggctaacgaagaggaagaggaggaggaccggtcgatggtgcctccggtccattcaccctcttcgtcgtcgttggcgatcttgctaggatcttcctcggtctcgatcaccctgtcatccgtccgacctgacctcgagcgagatgaatctgccgagccccatgcgggtaggttgtgggcgagactcggtctgggacggtcgtgaaggatggtctctgttctagtgccggaggccctttggaggagcggggcggaaggtccgggcggctgggtggtagcaaaggcaagcagcctgtgtgagagagtgaacacgggtgcttgggacgagggataagatgcaggaaacgtgatgggtgggcatagtgtgtggaaggtggcaggatgaaagagatgaatagctggtggatcgagtgtgctctgtaggtgtgggcgcgggtgcgggtgcgggtgcgaatgtatccgtgtaaagacagaaagagaggaagaataaggggtcagcatagccgatggctagagagacacgccaagggagagtaaccaagctaacggaccactacaactgcatgggatgagcgttgaacgttgatgatctttccatcgaggatgattcttttctgaaacatcaatgtctctgggtgatgtagcacgatggccgacacaggttgattcttgtctggcgctggaaagtggagcctgtgaagcaggggaagcagaagatgagggaagaggatagacaagaagatcaaggtcagaaggatgactgtctgtagaggtaagagggacgacctcttagaggtatagaactgacgcgacgagaagcctatgcggctcacgaatgagtgttccgagtaggacgtttcctttgacgccttgatggacccagtcatctttgcgatcagaggtgatggtaagaagctcgatgaccgagtcggtttgaccggaagatctgccgaggggtgcgtcccagatggtgagagatcgggcggtagcggtcaggagacatctatagcaggggaccggatgatgagggattggcaagaggacggaacatgaaggtcagagacaagggacggaggggctgagccaaggaaagtagagaagcaaggagaacatgtagaaaaaggccgtaccgttggggaggcttgtttttgaccaagggcacgatatcccacccggaccaaacgatgttgggttctcgatctgtcctgtctgaccggatcgagatgatgtctccgagagattgagaggatcggacgaggtccggtgtgaccgtggacgacgatgatgatgctggtggtggtggtggcggcggcggaggtggtgggtgtgcgatgagggacgagaagtgatgaaaggttgaggtgagggcagagacggttgtgtgtgagacggcagctgctgccgactgtgcatttctagcgaacgacgtaggtaccggcggttgtgggctatttcgacatgtgtgtgtgtcaggacagatgagcagagttgcagaaagagcgttgaagacaagacttaccttgtatgtgtggctggaagagagcaggagagggagagagaaggacatgaaggatgaggccgagagatggacgacgatggtgacgacagaaacaacaacagaaaaaaaaacaataataatgataacgagaacaagatagaaccaaggccaaccgaggacgacgaccggacacaacagagagagagagagagaacgagacatgaacgatgagtgcttctgacaagggcgagagaccaaacgaaaagagaaagaaggacgacgtacgattgacgacctgacgttctctgtctgactgtctctgtgtgagcgggagatgactgacagggaagcgatctggaccggtggtggagacgatgctgtcaaccattccggccggatcttgaagataactcggttgttcgaacgacgtggtggaagcgggagcgagagcaagagcactacagacagccggacggacggaagatgttgtgcaactggttagattatccgaggacgacagagaggacgaggacaccagagagggttgatcaaggagacgatgatgatgatgctgatgatggatggaggcagtagtagtagaagtggtagtagaagtggtagcaggggtagcagtggtagcagtggtagcagtggtaatagcagcagtattagcggtggcaggagtcgtagtcgctgtggcagtagagggcgtggagtgatgcaccggtggaaggacacgcctgtggcgctttgtcattcgaacaggcacacccgacttgatccgaggggggaggggggagagggcaaaggaaaggctggcttgtgtgtatgcgtgtgagtgggagtgtgagtgtgtgaaagggagcgaccgattgaccgacagaggaacggatatgcagacggagcgagggaacgagggagagggagagtgaagttgaaagtgagtgaaagctagtgacaggacagacggaagagaacggtgccttgttcctgatggggtaagggacactagaccgagcacaatagatgacgagtggcagcaggagcaaaacaatagagagatcacacagcgcgagagatggatagatagacaggtagacaggtagacagatagataggcaaacagatagataggcagacacacacacacacacacacacacac

SEQ ID NO: 1296 - DNA, 9809 bp, Xanthophyllomyces dendrorhous
ccctccaccccatgtccacagcggtacactcccagccggccacacccaggaaggtcagattcaacgtcggcacgaaataccaggtgctcgatgtcatcggtgaaggcgcctacggtgtggtgtaagtttgtttcttgctttgtttgcttgcttcctctttctcagacaatccttctatgccatacttgcactcacacattctcgtacacacattcacattcacatacacaaactcacactcacatcctctctcacactcagcgtctctgccctccatcgagcgtccggcgcaaaggtcgccatcaaaaagatcgccccgttcgaccactcgatgttttgcctgcgcacactcagagaactcaagctactaaagtactttgccgagatgggggtcggttcacttcctcacttcttgccgctctctctctcactctctctcacacatacgctcatggctgaccttggtttgttctgctttgtttgctttttattcctggtaatctcgtcgtcgtggtcctccttgtcctcctcaaggtctcggagaacgttagtccatcctgattctctttgttttctcttgttgttcttctttcttttgtcttgccttctttctttaccaaagagaccaagaaacctctctttctcagcccctagactgttgtttcccatcgcaaggtttccttaccctcttctttctctttgctttccttcccctagatcatctcggtcatcgacatcattcgcccgtcttcattcgatagtttcaaagaagtctatcgtacgtctcgagtttccctctttcctgttgcaatttctttccctccatttctcacacccctcttttcacactccttctcctacagtcgtccaagaacttatggagaccgacatgcatcgggtcatccgaacccaagatctttccgacgaccacgcccaggtttgcattatctctctttctctctctccctctactcttctcacatacactcacacttctctcttcttctcagtactttatctaccaaacactccgagcgctcaaagcgcttcattctgccgacgtcattcaccgagacctcaagccatcaaacctcttgctcaatgcgaactgtgatcttaaagtgagcattcatcctcggagcttgtctacccccctacccctctttcgtctacctctcctgttttcactgaccaccagtctttcaggtctgcgactttggactagccaggagcgtcaaaacggcagagccgaacggaacggaaacaggtttcatgacggttagcccgttctctctctgttcttactcgggtacagaatttcgatcactcacacacccttcctctctatttccctcccccttgccaccgctcaggaatacgtcgctactagatggtaccgagcccccgaaatcatgttgacgtttaagcagtacaccaaggttcgtctttcttcctcttggcaacccgatcggacagaactaacctaaccttcttggcggcctcccttaggcaatcgacgtctggtctgtaggctgtattttagcagaaatgttgtcgggcaagccactcttccctggaagagactaccatcaccagctcactctcatcctcgacgttctcggcacacccactctagacgagttttacgccatcaactctcgacgcagcagagactacattcggtatgtgctctcctttttcctttatcctttattccattattttatcatcacctgacaattgccaccgatcattctcttttctcccgacccagtgcgctacctttcagaaaaaagaaaccgttcaacaaaatatttcccaatgctagtcctcaagcctgcgattttttgcaaaagaccttgacgtgttggtctcttcttcctttgcctgctttttcccttcctccttggtgcttcctctttcctactctctgtgcgccacttctgacctcatcctttccctttgttccgccgtgcagttgacccaaagacaaggctgactgtagagtaagtgacgagtgggatttcattcccttttcttggaaagctccctcctaaccggcttgctttatacgttctccgcttccatcgttctttcagacaagcgctcgaacacccttacctggaagcgtaccatgatcccgatgatgagcctatcgcgcccccgcttgatcccgatttctttgattttgacattgagtgtatgttttgaataatcagaaagagaaaaaaagacgtagaaatagaagccgcccttcacatatccgttgtgctgaccagaccttatccttgaatttctatcacccacaatcgcacccacagtccagaaagatgatatctctcgggaacgtctcaaagagctcctcttcgatgaaattatgagcttcaagtcgctcgattaagcacttcctctcgtctgctctgtttcaagccgatcatctcgccctccatcactttatcatcatcaccacggtccccgtcactcggtcctcacccgcccccgccccgttgcttttcaaactgttcatgtttcacttggcgtagttcgatcctaggctggtcccagagatccgactcgtccgttcatctgatccatcgtctcacgtctcacatctcgcgtctcatgcttctgacctctttaagtcacgtcctcctcttcaacgattcagtttgtttcccctctctctctctctcttccgtgtgttccacacttcgagccatctattcaataggccttgttttgtccatctttccttttccgatctgtaatcctagacaccagtcccaaccgcatgaccacaacgatccttgatttctttatgtttcgtttctctttctctggctgtgttccgtccgtcgttccttggtattctttttctttttttggggttctcttggttctctctacgcgactcatgatttttttgccatgtccttatttcctttcaacgccgtgaacgttgatgatgattatcatgttgttgttgttgttgttgttgttgttgttctcggatttgatgaacaccgagccatttaagcaaagaacagaaagattgaaaatatgtatattcttgaaaaccaagctagaaaagaaaaaaaaggcgtaacaacaggcaacctccttcttctcggaaaggacacgtacacacgagaagcgaggacgaaacacagagagaaagagacagggaagaaaacaaaaaaaagagtcttttgagacgagaaaggaatatatatatatgatgttgtccacaaccagataacaaaactatatgaccaccttccaagcgaggagaaaaatagccaatcaaaaggcgaatatcctagctccccaaagacgcattccgacccaccgcaccggaagaaaacgttgttagcgtgattcttgaagaacgaaaaaatagataaatagataaaacgaatcaaagatatgaacttacgaggattcatcgtgctgttgggcgtgcatcatcttgaccacagcgtcgaccaccgagaggtctgacgttcaaatgacaacgtcagaaatcagcatcaaaatcacgatctaatcctggatcaaatcgtgctggaataaaactaggatatatatgtatatatatataagcaagagaagtctcacctagatcagcacccatgtccatccccgtcaagacttttatgctcaggtcgtcgcctacctttccgatcacttccacgtacgggtccgacagatgagattcctttgagtttcgaacgaggaagcagagggcggaaaggattgacagtccaaaaagttgtttatagctcttaagacgatggaccaagtggacagaaaagaaggaagaagaaagtagccaagctaggacaaaccctgttcaagtgcaaatccacctagagtcgtgccccccccggaacgaacgccaagaatgaaagatgctctcaaatttcagcaaacttaccagacgagatcacgtttctttcaccctgactctctccgtcttcagtgtcgatatcttgcgacgatactgacctgtccttgatcactagcctcgactacagcggtatccccgttcaactgattatcatcaaaaaaaaatcataaaaaacaaatagcacacaaccctgaagtcagtctttatatctcaggcccagacagctggctcgttttccaagggtgaaagactcacctttataattttgcatgtcaatcggacagtctgccaacatgcgtttcaacatttgagccgaccacgatcgctcgtcagctttgcttgaggttcgaaagtgcactagaaatataaccctcttaccttgcctctgtactcgttcaggctgatgatcaagacgtcagaaatcaatgtgttcaacacaaagaagaagatgatcaataaaaggaaaaattcctgtcagaacgaagtcttgagggaaacccgagaagaaagcaacgtcatctctcacagagcactgttgacccgagctatcatatccagtagcaacgattaaaagaacatggtgtaaacaagagctggctgtcgaagaagaaacccaaacaagtgaaaccttacgggtgttcgaaaaagaagccatgatgaggtcgaagaagcgatgaaatcgagttgatgttcgagtcggaaggtgtgtttgatcacaacttgaagtggcaaaaacgctgtagttcatatatcgtgacgcgactcgacgcgacgcgttgtatgccacatcttacgcgacacacccccgcctttctcagacccgattaacagcaagacacaactgataattcaataaatcttacacatcaccccacagaacaagaagaagaaacctctccaaagacgaagatcaggaaaatcgagtaaagaaaacaaacacgagaaggaaatagatatatctcgtttgagatcaggataagagaaaagatcaggaaaggaaagcttaaagtatggccagcaacaacaacaatcttgcgcccgaggaaaataaagagaaattgaacagacggaaactagaagtataggaagcaaaagagttcgaagtaaacgccgtcttcatcgacgaatatcggttcggatccaatccgcgtttaattaccactcgcataataattcttgtatgtcgaccgtagcccacttccaccacctagacttttttctccagaagctaccactggcgaaacagggtccacagcaggtccaggaggtggagtcgccagcaaggccactggtagtgctaagggaaacagggttcgatagtgcgactcgagagaacaaggtattgtcgttgacgaggtgtgcgaatgtagggcatggccaggcaactctgccccattggcttgaagcttatttaaacgctcaaaccagagagttcgattcgtagcacactgttgagcatatggcgcaaggtcttatcgtcgggatgaatataagttgaccgaataaatataagtcacgttacccctgtgggaaatgtatattatgaaacacaacttacctggcatcacagtggcggcaccatcaaacaaaggttgagtaaaaaggtcgatgaatgccacctgtcctttagcttgcatcgcggcatcggcttgctgtacaacagagactggtagacgtaaatcgagttccaggttggcttggttgtgccattcctctacaagaagagaaattcaaatcagtgagtaggaagagaacgaagaaaattggagacgcaaggcaggagaggctttaccgagtagagcagtcgaccaatactccgatatttggtgaggccgacactatttaccacgcaataaaatggttagtatgagtctaatatcatcagagaacatactgtgaacgaactgggttgctgatgtctgcacatttcatcaatgcttgatgaaaaagaatacgatcccgctctatagatgtctcctccgtggccacctcggtgagtgaagccatgaaggcgaaatgcatagacatatcggtcgccaaaatagtgctgaacaagattttccggaaatcactgaacgtcgtcgagatgttttcgcgagccttattcacttctggatttgatgccaaggcagtcgagagtccactatcgtccgaaaactcggatgtaattggtgacttggacgaaagatgcccaacaaacaagaagccaaagccgtgacgcttaagaagactagcgatgagaatacagtgcatgttttcgagagcagacttgtctccatatactagagataatggagccttcgcatttttctacaagaaaagaaaattttgaaagtcattggtcagcaatttgatgtcaatccgtacacccggtgttatcatgaggaacatcaagaagtcaaaggctcaccaagaatgcgttgctcaaccctgggtgtgctccgtcgtgaccgatagcagcaagcatgagcgttaagatatcttggggtctgaaaacttccgaaatccttcctgttttcttgtccaacgatcgtttccagggtgtcgacggacggtctccgtcgcaatcaaggagcaactggagcggaggaacgagaccaaggtttaaaagaaaggtatacgttgcttgtaggacatcgcaaccatgttggtagttactattcgcggttgaagacatacatccatgaaaaacaggaagccataagcttatcgacgttctgacgccgatgtcgaagaatgaagcgagagcaattgtcagaagaagaactaactggtaagggttgtgcgtgtgatatatttgacggatggagagcaagaatcgtctcatagccactatggcatcatttcaacaatacacagttaatttttcctcaagtatctgaagatgaagaggcagaaatatcatacctgcatcgatcccgagatcccagaccccctctgtcataagaacagcctcaaacagaatgcatgtcgtccgatacaaatcatctccggatagttcgtagggtttgaagtcccaaccagaaagcttctcgatcaaacgtgttctggtgtcttgattcattggccctagcagcctatgatgtatttcgattgatgaatcacaagatcgaatgagtttccagaattagcggtttgagacacgaagagaaaatttcgacctactccaaatctgctactttgtctgcaccctgaatcgtctttttgacctgaaggtgcatctcactgaccaactcgcaaaacaacgcgtctccactttctgctgctatttcagccaccggagtcaagcctccctcactccagcctgcaccaacctccgctccgtccgcaacagcctgtctccacggaccccgcccctgttctgactgttgctccggcaagtaggccgatgagatctccccatccgatccacatgctctcgacaacgtcaatgcaagtccacccatatcaacacttgcccgacgggggagattgtaatttcctattgaacaaagattcgcaaacggagcggataggtcggagatcgtgaagagatccttttggtcaggtcgatcgggtttgttggttcgcggtgtgaacacagtttgccggcgtaggttttttggaggtagttggaaagatggggatggaatagccggcgttattgtagaagatatggacggagacggagaccccgagacttgtgattgagaagcgtgctccatagcggattgaatctcttcagtcaaacgagaagtatgaaaggggaaggtgatcactctatccaccccagccttctcgcaagaaagcaaggtactcggagatagtccagagtcgagggagtatactatgatcgcaagccttgagtgagttttttcacgactcgagactaacagcttaatctctttcaagcactcgaccacgctttcgtctatctctgccaagcctgcaggactttggtcctcgaagcagaccgcggttgaagtagagctttccttagcgttcacattggaggcatggattcgaggggccgggatgtgatttatcggtatgaacgcgacagtcatagcttcttgaggggaggatgaagttggcgagctgacatcggctagagtaattgagatatcgctggccgacgatttaagcagtactacacagatacaagcgaaagaagagcagagtatgagaaacaagagtggaccatgtcagcgacgtatgtcaagtttttctttgagatccaaacccccaaatatcggtaaaattaacgtggtgatatggtatagatatctgaagagaatcagatagactatgagtacgacttggatgggattgaacatctgacattcgttttgtcactggccggtatgttgaacgatgtaggtgacccagtcatatccctcgaagcaacacaacacacatatgaactcatctacttctcgactataacctcaatccactttctttgggtgtagtcgatacaggctgtaatgaaggcatcgtaggacacgcgacagaggatggagacatacctgtgatgcctagattgactaacgagtccttgatcgaacccgcacctttggatgactcccaagtggatggcagataaggactagttgtcggtcgtttactcccactctttttgctcctgtgctgtttccccgactggtatccaaaggcacccggtcctgaagagaattgcgagaccgagggtgaagtatgaggaccgttgttggtagcagctgcagaaaaaactgaaaccgattcgggattgcttccgtcttgttgatttgcgaacttcgtgttaaacgggatgagaaaagcggtgatggatgagaacggtaaaggctgagacatgtcagtctggcgagagaggataagacaggaccaagagaaagaagaggggaggaaagaaagttatgttgtagtagtggtcaaggcaggaagtaataaagaaagaacaaatgaatagatggcacatcaaggtctctctggcggtgagccaatccgttaattgctcgagcgacttgtaatcacccatcttcgacgcaaatcatttgctcatttcaacttcatcacattcgtgatatttgagaaacacatcttgcgcaaacaacaatggtcaaatatctattccatattcattatcataataaaacgaagatgaaatggccatgcttgaaatcagatgagggtgatacccaactaaaggttagatccaggagcagaagtgcccggcaatcattatgtcgctacttggttcaacgatagattatgttgtcagggtttgtttcgaagctcagattctcgacagattatggaagtgccatagacataggcatatgcatggtgatagacaaaacgaaagatgtctcgaatgaagatgacagaatccaagcttgagagaacagagaaaataggaaaagaacaacagtgaagaggaatgcgatgaagtatttgtatctcttcgtcgctcggacataaaaacaagacaggaagggtgtatacagatatcgaaaacaggaaggtaggaatcagatatagtcaaggttgtttgcattagcacacaacttatcccatccagtgtcaggggcgcaggcaagggggctgagtggggatggtactcagtacgcttgagctcccaagagggaagggatcatgcaatattgcagagtaatataaggaaattgctgaagggaaccatgaggatttgacgaggttccaagcttgaaagagaaaaggggagacagctaacgactacctagtatatatgtcattcgagatatcaagccaagcaaacacaagcaaacacaagcaaacacaagcaaacacaagcaagagcgaagagataccaaggaagagtcaagatataaccaagagagagttgagcagtaccaaaagactgttgcaagaatgggtctac

SEQ ID NO: 1297 - DNA, 559 bp, Xanthophyllomyces dendrorhous
gaagcctagtgtaactagcttacgcacggttttagccgacgatgagctgtaaaaataaggaacaaaagaacaaacgtatccggttcatttacgattagccggatacgttcggtggcaaacgattgcagagagacggaggaatcgatcgcatctgcaatcaaaaatggggagtaacgatcggcgttactccaaagaaacttcagagtccgcagggctcccatgttctgctctctttcgagcactagaaagctttcttattatcgtggtaagaaagctttctagctaagagaactccgctgacggctcgttgccgtttgtcgcttcgagacttaggtcagcggtagaaggggtgaccgtgagggaagccggacagaatgagctataagctcagctgtcctttaagagaaaggaacactcttgcgagcaattctcctttctcttaataagtcaattcctagtggcacactaggctttggtgaagctttcctcggagataccggtacaggcttcgagaaagcttctttcatgagcccttccctctatagtctcctatcaagcg

SEQ ID NO: 1298 - DNA, 592 bp, Xanthophyllomyces dendrorhous
cgttcttccccctgagtccacaagacgaggatgtggggtacgaggggtggggggatgaccgactaggtcgctcccgaacccgaagaaccaggcccgagcccgtggggctctcggccctcccgtaggacgatttctccaatgtcggtactcaccggcattccgagaaattgtcctacccgagggcgggacgaggagggctctctcgcagctaagcgaatagcgtaagcttgagcttatgcaagagaagagctctgccgagttgatttcccagaacaacaataggcgtagccgattgttcgtgacggggaatcgaacccgttctcggcaactagggccgagcgcaccacgcgctccacgagggaagacggtgacggagtcaaaccgtcttcacgagggcgaaaacctcgggccttgtcgttaggcgaaccatcttatatactcctttgcgggagtcgaacccgcctcggcttccacaagcaaaggagtgagatgtgagccagactaggccaaaggtttctcgaaagagaggtgctcgggcctactgcaagcagagctaggctctgactcacggtgagagagaaatgacctacgg

SEQ ID NO: 1299 - DNA, 473 bp, Xanthophyllomyces dendrorhous
actcccctaaaggagttcttctgcctattccgacgacaaggagcctgtgagcagtaacatgacctttctccaggcgaatgggagttccattgcccagtggtccacttcggaactgtctcttcgttctgtgtagccagagagatcgttcctgcttacgtaatgaaacctctagagaggagtcacgactcagtaaccaatgctctgccagagccccaaattttcccctttccataacatgggctagagggtgctttctcctatagtcgaggcttaccaagtaagactaaacgcataggagaacgtaactcctaccaccatgttatgtccgcggaatcctccggactagacgattatacgtgaatcagttgattcacatatatgggatggctccctcgtctagctcaccccgttcagcgtctggttccagcacaaagatctcacctttgcgggtacaccagacgtccatctgtagg

SEQ ID NO: 1300 - DNA, 3390 bp, Xanthophyllomyces dendrorhous
accagacgtccatctgtaggggcctaccacgcatccactattcacatcttccttctgcctttgtacccatcctatactcctctcagcccctgtgttcacgacacacaaggagaggagcacaggacaaaggcatcagtaggatgcgtttaatgtctgcgctgtggacagttacggtctagtaagtggaccaacgcctaacacctgcgtgcgcaatgtacaacaggcttgtctttattccgcttaggagtggagctcgcgctcttgtctgcccttgcccttcatccgtcccccactaggcttgcaagcctcttgggatatcgggtagaattacaagcactctttttcgcatttctaacagttcttccgggttatgatactactaagttgtaaccttccatttagaaacgggttgaagttcccggaggctttatcattaaagccacaaatatccacccgcaggtggaggtgcgtctccttcatataatgcctcataacaccagactacccaaatcgtaaagactaggaaacaagatcactcctgattcccctcttacgaaaccaaaatagtcaattttgtggggtgtattctccaaacataggcttcgagcttgatagcccttcagcactggtcctaaccctcgtggctaagcagtatctccagtagcgggagatagagttcaccattggagggcgaataccggtcctttcgtactaggtattcgatgctctttgaaaacaaagcagaagatagaagccgtactgactcacgtcgtactgaacccaactcacgtagcttattactggacgaacagtccaacccttgtaagcgagtgcacttacaggacaagctgagtcgacatcgaggtggcaaacatcgactccgatatgaactctcggtcgatattaccctgttatccctagcgtaacttacttgttgatagcgaatcctctcgtagggaatccgctggtcaatagagcccggtttcccgattggatgaggtatccctctagccaattaggctcatgatagtcttaaccgaggttaagcggctaacccctactccagatggagcgaggctagagccgagagctgatgctctgttgatttccagtcaacgatcatgaaccattgctcgcctttgttattttgtgaaaggcttccgtcccagacaaacctctccgctatcagcctattggatgtatagtcaatagggtcgctcctctagcaagtttctcaggagcgtcctcattaggactccttgctaggctgaatagaggaggcaacaccgattgttgctaatagagagaggtgaagttgctagggtcttctcgtcttgctgcttttaagctgcatctgcacagctattgcgacttcactgagcctattcctgagacaatggaaccatcactacaccattcatgcgggacaccagtcaaatgccaaggaatttcgctaccttagcactctcaaggttaaagcggccattaacgagacccttacaggggctgccgcttgacagcccaagctaaggtcgcgcatcgggcaggtgtcagcctgcataccaatccttacggattagcgcagacctgtgttttaggtaaacagttgcagttccatgtcgtagtccactgcaacccttacggtcctacaaacagatttctctgccgcataggccctaattttcttccacagcttatgtcttgtacttcgagacctaccgttaggcagatctaaaccccacttaagaggtgacccactgcttcatactcactaggttccacaagggatacagctgcctttataggcgaacgtacagactcattttgtcgagttccttaggaatagtttactcaatccttgccttattcaggctgacatccggtgtcggatacggtacgggatctcagtccatccatcctaatgggtcttccgattacaatagttttcctgcaagccctttcaggcttgaagattgctaaggctcatcagcatctcctcccggaggatgccttagaggccgcgatgacgcaaggttggctaccagagccttgcaaaccgctgtgtcttagggcgaaaggcatctctacctttcttacattactcacgtacgcattttcagctcaaactatactccctggggacagcaagggatcgtttagtttgagggctccactacctctagccgtaactgcccacagttacgtacatccccgtccttcgtgggtgtaaatagggttgtgctagtcgggagtccgatcagctccttagtgccttgaatcaggactcaggcgacgttcgaccgtcgggttgttacacccacactatcgtatagcgacttctaggcttaccgcccggttgtcactgcatcggctaagcctctaacttaggagctatacagcatctcgttacccgattggggctgtttccctcatgtcccagggccttatcaccgtgggactgtgccatgagcgcaggcactcgagtttctgggattaccactaaaaagtacctcacggccaatttagaggcaaagccatactttcgggtgctgttactcacgaccgctctgaggagcctgtcgtggagggccagctataacccgatatgattggcttttcaccactttcctcaactctcctgggcatattgcaacatgcgtcagttcggtctttagcctaatcaaggaaagatcattcgggcttcgggtgctcgcattgactatctagcgcaggcgctagggcttcggttttaacctcgccaacactacgttctcgacgcacccattatgcaaaaggtacgaactctagcttaaagctactagagttctgctatcattatcaggctcatcgatctatttcactcccataatgggttctatttcacccttccctagcggtactctacactagtgctttctctccatcttcctcgtgggttacgatccccagtatagaaggcttctacaccttctagacagcgttagcgagctgttgtcaccgccacagggctaataccttctctggcactcttttcgaatttggcgtactcctacgtgagccgcaggagctggtaacggtagtcgttttgcaacgagggctcctttcgtgctatacctattcagagccctgtcaatacagggattcccctactaccgttatcgggttcgggggttctatagtaaacgtagtttactaagggacgccaattggcttttcgacattgtgccgcccatatggagaaaagcaaggggacttgcctgacaacgttctaacttacgaggcattacttcgtacaaggaggcctcggaattgaaccgagaaggccagtaccccctaacgttggggtaggagattactcctcgactaccctgagagagctagtcgtctcaa

SEQ ID NO: 1301 - DNA, 934 bp, Xanthophyllomyces dendrorhous
cctcacatcatttctcgtggcctcctctccttcctggcttgaccagctacactagacgcaggattggcttcgacgacgatagggtggaactgtggaaacagatccatcaggagtacacaggatacacgctcgacatttactatgagaacaaaggacgggcttgcgcatgccatggagatgtctgcagagacgattgcctctgtgactgcggtctttgtcagaaacgagccgcaacggaatgcgtctgtcgtcttcaagagcgttgctattgttggatctttaacgcctgttgatgtccaatctgtaacccggaaacagaggagaggaggattgaggcagaggagaggaagctggaggcagaggagaaagcagagcagaggaggctgaagacacagaagctgatggagcttgaggcagagcagaggaagccgaaggcagatgagtggaagcttgaggtagagaggatgcggagggaattaaaaaagcagtttcaggcgcagaagtattccggggtccaacaactgatggcagctgcaaagctagtcgaccgacaacaggtagcggcagatatagatgcaatcatcgcggaagctgcaggtaaagtagcggccatcgtggaacgcaacgagacatatactgcggtctatcagaggacggtcatagtcgcgcggcagaagatctacgagggaatatcttgtcggatcaagactttcgcagagagggctgcccaacgaacgtcggatccggtcgtgcgacggcaagggattgcagtcgtgcggaacaggacgattctagagactcccatgcggctgagtctggaggctctgaagcaggagacattggagcggaagagactgtggagtgagatggagtgtatggagaaaccatatgacgtcagatgagttggatggaagatggacagagggacaacgac

SEQ ID NO: 1302 - DNA, 369 bp, Xanthophyllomyces dendrorhous
ttgagagagagcgaccactgcgtgccgtgctcggccagaccgccgttgtccagagacatgtcgagccctcctgcggtcgtcgagagcagcgtccgacggcctgggtccagccccacgacttcgtcctctggctgcacaccccacgagacatactctgctcggtgacggtccttgccttcgccctcccatctccatccgtaggcgtcgatgccagatgaagacgacatgagtctcagcattccggcagacactccgatgccgtccggactgagcgaccgggcgaattgtcgctttttggtctcgaccttggatatatggaacgaccgcctttactaagtgtcagagtcatcccggaaggactcttctgtc

SEQ ID NO: 1303 - DNA, 8921 bp, Xanthophyllomyces dendrorhous
cctcttctctttctccttcctctcggacaggaggggacagttgctcccagagtttatgggagagggcagtgcgctgagaacgaacagatggatcagatatgtcagtcattgctgcagcctttcttcagatatctcctcagatgacttgtcttccttacctggctgatactgatccggctctggatcgtttctccgacgtttgtctccagccaccaagagatgagccgagaagcccggcgcggcatgttcaggacgacatggttctggcaggccgtggtccacgacttggctttggcagcaaccatgctgctcagaaatctacgataatggcaagtcgctcagtcttcgttcgcagtcagctgcatcactgtcatcatccaggagatcactcactttgagtctttgaactggtgctcagcagggaaagaggcgtcgcggaagttgttgagctcttgactctgtgttggcgctccttggtgcaaatttcctccacgcgtgttgaaaccaacgtccctaaaaataaagccgtattgtattggggagattcggtatctcccctccatccgcgcagaccttcgacatgtggatattgagaaggcgagacgcgtcaaatgttatctttcctagccgggcaacggccgactcgatcgggccagccagtggctcaaaggcgagtaaagaaccaaagcctatctttactgtccctgacaccatagggaccgctgacttggcgtggatttccaccctctgacgagggatgtaaaacgggcagaggtgattagatcgccttgagtgcccaacctgaccgcaggctgagcacgtggcagtagtagtagtagtggaagcagcagtggtagccgcaagggaagactttgccgaggcctgagccgtcctcttgcgcttcatgtcgaacacaagaggagcggcactcctcaaggcaactgatgatttttctgatatgaagtagtgttctgatgtgaaggaatgttctgatatggaagagtgctctgatcatctcgagtccgttgtgtcttataagctgttgggattgatgcctccctgtttatagaaaattcttatcattggtttcccctctgatgggttcgactgggtgtcggtcatgatgaacgacctggtgaaagctctatcgtccacagacagataaacagagaaacaaaggaatggtgagacagattgacggagaagatatgcttgatcgagctacctgcagctgatctcaattttctttgagcacgggtgaagagtgaatttccgctctagcgcttgttcccaatcgagtcctcactggtttcccaaagtctcatatacactacccagctgtcacagtgagatagatcgagaaaaagagaaaggcgatgaaaaccagctaaaaatttcatagctcttcggaaagagtcttggaactccgcgcaactaagaactggagggcgttgtctcaagaaggattaacaaactacagcttgaatgatgctaagactgctgaaaaactaagaaagactcctagaattacaacaagcgatgttccacaagctgatcttgtactttgatagaacaacttattacaccaggatcgtatagcatagtggttagggttggattgaggattcgcaggagtcaccgtaagcaggaaaggctttgcttttaattctattacaggcatacaagtaggcgtttcagaccgaaaatacaaaagagaggaacatctacgcagatatctcgtcctcgaacaactctaagctaagaaaagaagtaagaacaatgcgccacactttccacagaccctgaatcctccctcatctagaacacccaacgaaagactctctttccaatcttttccttgctttcgttctcgacctccagggtagacagtgtagcctcatgttcttccacttcgtccaaaccttctccaagattaatttcctctagcttggtgagcggccgtcggccgataagttttatgacagcgtagacaatcacgaacaggataggagcggcgtaggaaaagatgctagaaagaaaagatagggtgatttagttgatccgatgcgaaataactgaaagaagaagggaaaacagaagagacatgactgacaaactggggacatcccaacctcctttcaaaaagacagggtatccgttggaaatcaagacgatcgcggcaagaacaagtgcataccaggcaccatatggctgaaacattgatcggtagggtaatgttgatctatcgatcttctgaacggccatcgctctgtaccatctgatgtgtgtcgcgctcatattcatccaggtaacgatctgggtggcggtcgagatattgataaacctgttatgtaacatgagtgcagtagaggaagatggttagatgatctcgaattatcacgaaaggaggacaaaaagcagacgaccaaccactcaaggactttattggctcgatcggagcattgaagaaaactgaggccagcaaaacaaagcgtagcgatcaaagcgtatacaggcactccattcctgttagtgcgcttgaatagagcgggagcgtgaccagcttgcgcgagaccgctgcaaaggttgtatggacaatgtcaggctatcattcctttgtttctgtatgaaaatagcaacaaagtaagacatactgaagagttcgagatccgcagaagagaaatgcgctgcctgcagagaaaatgctcgttactaagaaattccgaatatgaaagacaacagttcgtaagatacgtctattcaacttttaaagcagtgcgaagcgtactgatcaataccagcgttcacaacggaacccaggtatttgatgtggagcctggtcatagcagctatataaggagatcttccggctagatgggaacgcccgggttagaaggaaggactaagcaatcatcgacgattaacagagtagatgggtaagacgataagctaacctcccgcagagttttccgcaatagcaccgttcaggattttgtcattgtagggcacgacaataccgacggcgagcgcagacccgaggaagctataaatcaatcatcaccagcaagatttggagcccaggtcggtacgctgtctgcattgaaccaagaaaataaacatcaaaaaacttacaagacaattaatcgaacataaaccgatttgaaggcactaggaagaacttttcgaggattgatagattctgatgcctatagaagtaaaagaagaaaggagagaaaaacagaagttgggctcagcgtacaagtggaagaagaaggaatataagaaggggtctgtttgtggaactaaccaccaaagacaaaaggtctggtccggcaatggtaaaagatgctcccagcaaacaggtccagaaccctcgaaagatagccgtggagttgttgccgtagtaatctgagatagggcttgggttcttccagtatctgaagccgtaggcatccttgagaggatttccaccacacattgtcacgatggtaaacataaacagtccaaaaatgaggataatcttgcctgagaatgccgaggtcaaatgagatcattataaggttgtgtatctttggcattggattgaaaaagaaaagatgatgagaacgtacagagaacgatccaaaactctgtttctgcaaagaactttgaagaccacttatgaagcagggaataagcaactatgcagagcgccgggacaattgccggatgtatttccttttgttttgtacggccgaacagagagggagatagacaaaataagaaaaggagaagagaatagaaggaggtgagctagagaccactcaatcaagaagaaagaagaagccacttaccctggaccaataaccaagggcagcatggagggcagtgatctcgaaacacagcagggagctcattgccaggaagtaggtccagccggtcgctccaccaaacgcatcatctacataccgaccagcgaatctaatgaaggacgactcgaccggcagctgacagaccatctctgcttgaccttcgttcacgctgcgttggtagcaagggaagaaaagttagagaatcagctgatcgattttgatttgctgaagtcatacataggaagaagaggaaaggcgctgaccagaaaatgacggacgtccataccaggaatcccaagagaagcatcaatggccctcccttgactgagtagatcggagaagcaagacaaagggacattaaattaatgagcgcatcgtctctggaaccaaacagacagaggctgatctcctactgagacttcctccaattgccaggctgaaggaccaaattcattcagcatgatttatgagccactacgaatgcgcatggaaagaacgggaaacgcaagcaaggacagaggagaacgaacaagacgtatgtaccaattgttccaccaatggcaagaaacctgatctgtttggccgtcatcactcttctcgtatggttcatctgtctgttcgatccaccttctagaccttcgacctcctgaacgtccaccaaggcgacgtccttctgagattttagttcatccattctgattatggggatttcttctcctattatcgaagagaaagataaggaaattgggtagaaaggacttgtgatgtgttagagagaacgactattacggatgaatttcttgatacatcgtttatatattgggaagctatctcaggccgaggaaacggaagaggcagagtgatgtccgtctatcagtatcttgatcgaacctcgattgtagcaatcctgcaggttgataaactgattagaagataggatcagattcttgataatatgggtctgttagcgtgctcggagggtgagactgagttccaagataagttcgatcaccgaacgagagggccaagaacgaacggaatcaataaagtagtgaaatactttgattatcgcttccggcgcaccgcgtacttcacaatcatagcatggggagccgtcgggcggatcggctgaacgacaaatgtagttgagccccggacttatctttcttcaacttgcgaggctcaacgtcttctctcatcttatctctctttctggttctttcgccattgcttgacgagttctctcagaggttgtgtgtgtgattgtatgaccacatgtctgtccctcgttgctgactgatcaccgttcaactctcaagccatcatcgatctccaagaaagaatcatggaaacataaaaagcaagggagaaaagcgaaaaaggtatttactttctcatccttttgaagttaaactacatgtttgattgtttttgtgtctgtctcttcgtccgttctgttgttggttcgttcgttcatttgttcgcttcgcatcggttcgatcctttgcagacacagttgctcttctgtcttcccagatacatctactcttcgtcatcttcatcatcctcctcggtgatgtgctgttctcgtatgaatgaattattcagtcagtgacatgtcagcttcgaaagacagagagaaactgagagaaactcacgtcatacaagggctggacactcttaaggaagaattccttgccctgtggcttagcacccttatcgaaccagtagatcaccgcgttatcagttaccaactctgcgtcccatgcaagctgtgcaggatataagatatggttgtgaagatgtccgaagttgacggatatgtttataggaaagaatcgaaacccccttgttagcatcgtctagccaatcttgccggacataattcaaatacagtcaaaaacgaacccggacaagagaagggaaggccttcatcgccttctgctcgtcataacagaatacctggagggtctgcaaaaagttgacctgctccattggcttcttgcagaagtttttgagcgccggtaagaagagctgtggaaaagaacgggatgtcactcaaaccgcctttcctgacatggaagtgagagacgagagaagaaagaaaagacaaaccttgacccggaggacttggtctttggaaccagaccactcgaacgtagacatgaagttgttccaaccgatcgtcaagatgtccgaggacgaaatcgaatgctcagcctgctgagacgtcaagtaaccaacaacctaaatagatgtgtgtattttttattatgagcatagaaagtaaacgatcagaatgacgctttcaattgggctaacttgacgaagagcagaatcaactcacgttctccttccattcttctccgaactcctcttcctcttcacagtttcggacaatccatcggcccatctcctccttgacaagcgcagtctgtcgcttcgagtaccattcggccacctgaggtaacccttcagccttgaaatgagcctcaacgtgggccctcgaacgctggttgacggggaatacatcggccaagtccttgaacgtggtcttgagcaaccgaagcaaatggtcggatgactgagcgctcaaataggccctgatgaacgaagtcaagaaagaaatcgacaccgctgataaaagagatttcggacaagattgagtacgtcttctacagaactgcaaggtcataatcttttactcacaatctttgacgaggtgatccttggtcagattttgaaggcactcggacgaggccatgccctgagcaataagtagagcggcggcatcagccaattgctccctctcgagcaaagaccactttgtgatgctgttgtgcgtgcagaatttacaagacaatcgtcagatgaagaatcaagaagaaaaaggccagatgaaaactgagatgctgactattggactaaggcgggcaaaacattcttctcgaggggcttctgaaggtatttgtatcgcatgatgacctttcggaggacctcaattttgagcttgatctcctccaagagagcctttgaatcatgctgagcggccccctgttcaggctcggactcatcttgctgagccattaccgagaacgttgatcgcttctcgagctccttgtcgacgtagcttcctccgggttggagaagaccaccgacaaggacgatttcgaacaactgatcggcatacttcaggtactcgagcgtcgacccagcggtgatcagctttgtggccaaggtgtcgtagtccgtcggaggaatcgggtggagaagagttaaaagagcatctcggaagactgtggtgagagatggaaaagtcaaacagattagtaaagtttggtagttgtgatgactagtcttcgactgttttccttgttttgtttgtaactcggtatgcaaaagttgcatggaaacatcaaacacagaaactcactctcgggttcaaactttgcgttcgcagcggtaacacgtttacgttgcttgatacggactccagtaagggagggctgtaagatatggttcgggtggtgatgatgatggaccaagtggatagaacgaggtatgaggagaaaaaaatgaatgagacgatcgggacgcagggccaaagggtaaaagttgagaaactgacgtaccttgttgttgccagtagcgggtgttgaggtggtaggagtagtagactaccggatgtaagaacaaagcgatattcagatgccattgcagcaaagcaaatggtttgtacatggattggtcgatagtcaacgagttagtgagagtgctcgtctgtgatccatcttaaaacagacacgaaagagagtccaacgcaagggaaacaaagcaagaaatatgaaaagactgaccatgcaccaatgagggaataggacctagtagaagaaagagagttagagagagtgatggataagagttgtttcaaaagaagcagagagtggaaccgaatgagaagaaggaaaaaagagtcgaaatgtttctgatggagtcgaatgaagagtcgacgagctggttaggtagaagctacataagactaaatgaatgaagtctcgaatcatatatatatgtatatgacgcctacgtatctcctcggctgaagcgaagttcgcctaggtgcagagagggagcaatagataccccagcataaacatccataaacagcatacagcgacaatgttgcgcttgatatcaaggaccagctggaagatcttgtgaacgagatgagatagatgagatttgtcaaagatgacatgagtgacatgagtgacatgaatgacatgagagtacacatcacaggcagcaactgtcgaatcagatacaaaggcagcataaccatttcgttccttgatcctcttctttctctcacatcgaccattcaactcgcctcgttcattcacagcctctttcggtttctccgtcgttcttttcattcttgatctttctctttgtccttgctgttcattccttcccctcaccgccaacctccttatcctctaaatagtcactgggtggtcctctgtttactcgaagtctcactctccgttccacccgacttggtacacaaacgatgtcacctccgaatcggtatcaactcttaccacactctgctcttcctagctttccaatctttggtcggaagaagcatcactcgttagcttccatacctcgggttcttcttatcctgagtctctgtgtcccagtcatcgtcatcacgtgggtcttctataaactcgccctggtgtctaatgcgttcaggacatacgagaccaacccgccggtattcatcgagcccttcaaaggcaaaggtaaagaggttgagagtagtgtaccggtgttcccgagctgggtaacttcccagatgaatagtccggacaccattctttggaacgtcaagaaggagctatctagacgatacatcgagatcggtcttccggtacgtccattactccatccgctctcaaagccaagactgtgacgatatggacataatgaactgactcctttcttgctatctttctatttctaacttgtttcccttcttggataacaccctgtacttatatt

SEQ ID NO: 1304 - DNA, 24466 bp, Xanthophyllomyces dendrorhous
caccctgtacttatatttcttcccctctctaaactgacaggatctcactgttggatgcccggccatcagatcgctacgatcagacgaatcaggttatcttgaacaacgttattcccacttgtttcctgaaacagcaaccaatcctacctcgccctacatccatcaaccccagggttactttattgctctgaatcttttcaactcgaaagcggtaatccctcatctgttcagtaccctccttaccgttgccggacttcttggtccgtcaaatgttcacgtggccatatttgagaacggctcttgggatggtacaccaacgttgctcgctcattttgcaagagctctctctgcgctaggttcgtctcagcttgagttttcttttttttctttcctcttatctttttattttccttcttaatgcatgaattgaagctcgactaacttctcaatatcaattgttgctaaacgtaaacaggcgttgctcatacgattcgctccgattcgcacgtcaccgactggaataacgtcgaccggatcgctcaacttgctgaatacagaaacgttgctctcgagcccgtgttcaattactcgccctccaacccgcccttgttccaagcacacaaagagacaaacctcaccagacatccgatcttgccctcggacgtcttgttcatcaatgatatcatcctctgcccagccgatctactcgaattgttgcaccagcggcgtttccaaggcgcaagtgcaacctgcggactagactggagagaagctccagaaggaagtatgtggaggtggttgagaggttggttaagcaagaactataggttttatgatagtaagtccatcgccacactctttttgtatacttttatctatctgtgtcttgtcgactaaccttggaccatacagattgggttactcggtcaatggaaggctttcctctccggcctcgggtagatatgtttggcgaactccgggatggcgttcgtgaactcttccactgggattctgatccaacatatctcatccgatggcgtgccgctatcccgctccccgtctactcttgctggaacggcatcattgctctctccgctcgccccttcctaccacctgcacaaggtggacactctttcaagttccgaaatgggcacacagccgatggcgaatgtgccgcttccgagtgcaagctcatcgccagagatttttggggtgtaggggagaccaaatgggtgctcgtccccagggtcgcagttacttacgaagaagaagggtacaagagcgaatggatcgagaatagagtccgaagaggtggggtaccggggatggacaaggatttgaaggataggcggtttagacacgcgcctagtacggcaatgccgctagaggaaaagattgattggagtatggtcaagaacccagaaagagtcgtctgctttccttatcatgtcggagacagattagaggtttgtcgtgtcctatttccgtcttgttactgacgtttgtactcgatcaacggcgttctcatccttatcattctctgtacttgtcttttatcgtgcattcagatctggcccctttaccaagaggtatgttttgctcaaactccaaacgatatttttccatgcgtattaactttgtccttctttcttattcctctaacagggctcatcgatgaactcatcaattcttcatgactttaaccgaacgtcagctcatgtcccgtgggaagacataatctgattcatctgaccgccaacatttatcttttcaactctggtccttcctcattccgggttttatttttactttttactatttccactgtctcttctctcttcccagtcaacgtttcaatggtgcacacgtgcggatttgtttctggtcttctcgttcatctctccagggtctcgattgtcatgcttgttccactagccatgttttcattctatatcaacatcttttcttcctttctatatatttccctctcgtctgtctcttcttcggtcaaaaaattccttttcctccctttcgtccttgttccctcctttactctctttgtgccccaacggacgagatatctgcttttgcccctaaccatttgtcaattagtttcttctgtttcttcctgctctcttgatcacccggtcacctttttccttagtcgacgaaataaccttcttacgactgcaagcgtcctctatttatccccctctttctgcaacctttgagaatctaaacttcgtcttcttttcttttcactgtaaataatacctttgagttttgaacccggttcatctgattgttagtttgcaggcaaatgacaatgatctctttcttcttacctgctccgtcttgcctctcgctctttcctcagaagcccaggcacgcgcctagtgttataatagacatcacatcacggcgtaaccaaaaacttgaacagagaagaagagagggatagaatggagaatcaacctccaaacctagctaatcgaagagctcgaagttgggcgggtgtcaattctggttcgggtgatggttgtttggttcctcctccaccttcaccatcatcaaaatcctcgtcgtcgtcgtcgttgtcgtcatcatcatcgttgtcgtcgtcgatgcgatcggtaggtttattgggttggctgagctgttcctcctgcggttgcggtcgtgacgggaactgctgttgggcaacgagaggggggacgggtaagacgaaatcctgaggtaaaccttccatcgaagctttcaacgcagcctggagctgttcgtcctcatcatcataatctctgtctctctggtcatttgtgggtcccccgaatggtgatggtgtggacgtgaacgtggatgttgagaaagtagtgggagggtcggaaaagatatcggcgtggtcgtcttcttcgatttcttcatcctcatcctcatttcctactagtcctacctcattctcatccgcatcgtcgtcgtcgtcttcaacgtccatcgcatttcgagctcctctatttgctcgggcagctgaacgatctcgttcctcttgttctctgattgagacttcgatcgcaagtctcatcatttcctcatcttcatcatgcctcggacgattccttgtctttgcactggtccgtccacttccacttccacttccactggatcgtctgaacgtagaagatccaatctcgcgaatctcgtcatcatcgtcatcgtcgtcgtttatattcatattgactccgaccaagttgggaagaggagaagtcgaagaaagcgcgcgtccgaatggtgtttcgagagatgacgggtcggcttgtcttctccttctatttcctctggatgtaccttctgtctctgactctatttctcgtgatcctcttctcggtgcgataggtgttgtgatgttgagcatttcactaacatgattagtcgtatttggagggatgaacgagaaggaggacggtggaaaggatgaagaggggatgtgggtgtcttggaaagcggctgcttggtcacgctcgaaagcagccatggtagcacgggcacgttcgagagaaatttgaacagggtcggccggatccactaattcagatcctactatgggtggcctaacaatgggtccaggagcagatggagtagtattttcaggctcgacgttggcgagcgaggcagcaagggctgcttcgagttctgatgcttcgtctgtcaattggcaagaacaaaatgaaacaacctcgagttaagcattggcagaactcgatgttcagttatgaaaacaggaaacaactgaccgtcgaagttgccatacgctccccagtcgacctctccacctacgctggtctttgaaattctcgagtgagtcgacctgtctgagccagatgtagcacttgtggctatcggaagagagactgcaaatctatcggctgctgagctttccaaaaactcgctctgaatagaagatgacgaagaagaggacgcagaagaacgaggtcggacgacaaaaacagagtagcctgtccatactcggggaagaactggttagatgatatgcttagaaattgtaaagtgtactgagtcataccttcagactcggcttggtttagaaccattgtaagataggtaggcgacacccctgattagacagaagcagattcagtcaactatcttcactcgctatctcgcatgtgagagttacaggaagacacatacaagcgggttgagaaaagaatgaattcaagttgtaccacctatcctttctgcctccaaaccggcgcaaggtaaaccagtgagagtctaggtttaggatgaatgcctgttgatctctgggaagacatagctttagataagtagctgagcgaccaactcgaagctgaacagacaccaatgcttactctggacgatcccaatgtggccgtaattcttcactacgccaacggtcgagactgagctcccaaacctcaagtcctcgatctagaacttggacactgaagaagcctataacagcatggaatcgcgcaagacacgtcgacgacacgatcagcattcttgcttaataactgttctgacgcatgggaccctcgcattccacgcaccagtgtcatccatgttgactgattcagagcgtgcttgactcaaacgttcgttttcgtcactgtccaactgaagagcgattgaggcaagatcggtgggttcaaaataatgggactgtagaaggttgttgagagcatgctctgtagagaaacatcagcataggtttgtgcctccgacatgcatgaaagacttgtcggaaagttgatatcagaacagaggtcagaaaacgagaaaggactaacggccacacatgttagagccaggctcttgggtctcgtgaaagatacctacacggacggagagaacatgaacagagattgatcagattatgaacttgacagagatatgaaatacattcttacgagatacaagatccatgatggagagaccgcgatgaaagttatgtgatggaaattgataacgactgtattcgctgtggtggtggggaagtatgcagatgagagatcaagagacggattcgtggaaggttggaaatagacagagtaagatcttaacgcgcttcatgtgttaaaatgatcaagcgtctgagatacggattaacacgtcggcttttttgtgctacgctcgacgcgtttaaggttatcattcaaatattcatttatttatctctatctcattaagtctgttgatcctcacacgaatatggtcaatctatttctctgtttgcctttctcttgtccatccatcctctccttcttctttgccatcgttctcttgttcatttctctcccttccagttgaaaggcttcattcgagacagcctggatcatcagtagcatacgtcattcgttaacagtttttgttcttttttatttttgtctggcaagtggatccttcttttatcacatttgttcctggccaacattcatccgacgctcgttgtagctttgctgatcacatacatctctcttttttctcttcttctgcttcctgtcgactctctctttttgccaaactacacttgatatcggtttgcttggacagatacagacgttcgaccagtctggtcgaaaacacaacagtatcctcgatgtcgtcccacctgaccccccggccatcccggctatcgggaattccaaccccaggtcgagtctctctaggcggatctggtcttccaactccatcaaaccggaaggtttctttaccacccccactacctaaccaatcgtatcaagcatctgaggataagactctgtcccgggctctctccgatgctatcaggcataaccctcctccgggttcgtccagaaacgccccatcggaggacacaatttcttctcctgggtctcaatccttcttcaatagtaacaccaatagcagtagcatcagtggagcaagtttaacccaaaccccacgccgaccttcatcttctgcttcgtccaacagatcgtacatgggctcttcatcagtagcgctgccgctgccaagaaccccaggcccgccggcacttcggtcgaccggatttccctctacccctacgcccggaacgtctggaatggcagcccgtgctggacctaggaagagtcttttggccagtagtactccccgaatggaaagcaggcacgaggccagaccagggtcttctctgggtactgcagtgggaggtaagggaccagcagcagggttcaatgtcggagacagagtgaggatcgacagtatgggcatggagggtttgctggcttacgtcggaaaaatcgatggtaagccagggatctgggctggagtagaacttagcggaggatttgcgggtaaaggaaagaacaatggaacagtcggagagtaagtccgttgaatcattttgagtgatagcgtctctcacaccatcgcgaaactaactactattccctctctcttacttgatctgtacttacctctagaaagcaatactttacttgtcccgaaaactgtggtgtcttcctacaacactccaagctctccgccccgactacgactggcgcacatcctcctcgaccgtcttctgttgcatccaccagaagttctatccgaaccggttctgaatctggacgctatactccgtccatctctggtcggtctaccccttcggtttcaggtagggctacgccttcaatctcaggcagggcaacgccctcacaatcctccagagtgttgacggcgaaaaggtcggaagaggagaaagagttggaaggaaaggttacagctgggagccgcgcgagcaaatatctaggtgagacgtgatataatcatctctttatacttcatcttctctcaacatgtttcttgcggttaggctcgttcttacttctatcgccttcttctttcgccttcctgtatgacatatcaaggtatgacggctaaacagctcaaggatcggtctgcctcagactcggatggaaaaagcgatttcctctctagatcaacaacaactccccgagcagttagaactaccggtctcggccaacctaccccaacccgcgcggcctcttctcgtcaatcgctcggcgcctcgtcctcctcacatatcacccctggtcgactctctcgctcaatcacaggtggaccttctcgttcgacgcctacctccgagatgcctcctccaccatccccttctaaactcaaagcaaatctagcagcttcagcagcaacgacatcgtcggtatctcatcgaccgtctagtcgtcaatccgactatccttccggcagctcccgatcgtcctccagaatgtctgatatcggtcttaggccgatgacccctaagagcgaagcgattgtctcactcgaaacgaccaacacgactttacaagataagattgcaaacctgatgcgatcttcgtccaggcaatcagatcattatccagattcgcctggtaccggttggggcactcaaacgacatcacctcccactacgcgtacaactaactccactgtctcaatggcaactccaacaggaggaaaagtcgagccaaggacagaggaggcgtggatcaagcaaaagactcgaatcgatcaactgctgatcagagtagattctttggagaaggagaacttggggttgcttctcgaacgtcaacgatctccagagccctctctgcatccttctaacaacacttcttctcagtcaacgaacaaattggcatctccaggtggcggagtagacaatgcggccttgatggcctctctggaagcccgagcgatcaatgctgagcgtcaagtccaggcgcatactacccgattgacgatccttgaatccgaattgtccgccgctgctcaaacggcacgaacatctcaaacaacaattgagcagtttgaacagaccgctcgtcaaatggaggaggatcgggccagagaacaggccgaggccaaggccggattgaaagatctccagagcaagttggacgacaccgaggctctggtgaaggggctgaaggaagcggccgaggtcaaagaggaagggcagactcaatatggcgcggaggtccaagcaaagaagaaggagattgagatcctgcagtctaaagtgacgagactgggaggtgagttggctcaacagaagagtgagttgggcgcgcaaatcgacgcacttcgacgagcaggacaggtcagtcttttattctcaagcgtcttgaagatgaagagatgtatgtgatgagaaggctgattgagattgatatctcgaacaaaatcatgatgaattcaggaaacgatcatgctctacgaagaacgactcaacgcggctgaatccatgcggcttgacatggagagcttccttcgatttaaagaagaagagcttgctcgatcaaaccagcgatctgcttcccctacttcctcctcacaaccttcgagcagagatcccactcagaaagtgatcacagcgatcgagattgacaacgagaacttgattgaacaagtgactcacctgaaccgacggattgcctcttttgaagaacagatcgaggagtaccaactgcagatcgagtcggatgaggctgctgtgagggtgaaaactgatcaggcacttcaagtggagaaatctctcagaaaagagttggcggcggcaagaacgcagatggaaggtttagtcaaatcagagagaagcgcgaggtcgggagtgacggacatagaggaggctctgagggagaaccacgtggctttggagaacgcgagaagtgagatagaagggttgagagccgagatagctgtaagtgaacagtattctctatcaattgttttcaagtcgatcagactcggttgtttgttaaaaaccatttacatgttttgctggtttcccgatcccttatcttgtctcatctgtagaacctggaaaattctcaaggcgaatctcctaatctagatagaaccgaccgcgttcaagaaatcgagaagaagttggcaactgaccgggcacggttcgaagaggagatcaaacaactcaagggtatgcttgaggaaattagagcatcaagaggtgaggcgctcgaagcggctgctagttcgagattggagcttgagcaacgaacgggtgagatcgaggaacttaaagaggtgagcatcttgtcttttcgtcccttctacttgcgttttttagagttcaacttgattcgagagcttaatgtctaattgatatctgatgatctgggactcaaaggctattgatgcactagaggcaatggttgaggagaagattatgactgaagaagatggtctcaatagagagattgcatcagaaaagtcgacccaagaccaatccgagcaattgatcgagttacgtagagcgttggcagagtctcaggccgaattagagattcaaactcaaaagcatgaggttagtaatactcgacatttattaattccaatatcgagcgagaactgattcttctccttgatcgtcggtggcaacgacatcttcatagtctgagttcaacgatcttcagagtaaggttgcagaaattgatcgtagaaaccagcaggaggttcaagaagtaagcgcacaagctttgttcaagtatgcattgtaaattcttaaccgaagttcttctattctctatataagctcgagaaccttatcgagtccaagatctatcgagaagacgagctagagagggaaatcgaggacctcaagtacaagctttctcagcctagtaaatcaagttcgagtgggacgcactcgcgcaatcataccggagaagctcagactaaaaagctcggtagttccgcctcccgaaatggtgatgcactaggtgagaattgacatgtcttatttcttattctcgtatcttgattttgatggtgaacggtgtcgagctctaactcttatctctggtttttttctgaagaaacttgcgagttgtgtgacaaccctgatcacgaaatccaagactgtccacgtaggtcctctcatttactctggtttgccctttagactgaagccgcaacagcaaagaaactccggtcacttacgagatatatatctttgcaaaaactttgactcagtattcaatggatcttcctcagcgacccactactctcctcggtcgtcaaatggggaagatactgccgattctgttggaaagtcttcattgccttcgttcaagaattctggacttttggctgaatcaacggacaatagaccgtggtgtgacgattgcgagacgtttggtccgttcttccttaccccgttcatatttttcctcatgctcttgtttgatctaggacaccatctgatttctgttctcgaaacatctttgcaatatggcatcgattctactgaatgcaatgtaggtcatcccaccgaagagtgtgaatatgctcaagagatgttctagatatttatatatacacatacatgcgcgtgaaagagatacccattctatctgagagtatgtctcctcgtctgtctatacgttatggtggcatacatcgtttcatgtggcctctttctgacatttggcctctttcttgctggctggcggacttatagaccaggggatttctctggatgatcaactttatgagccattattccatttgattatcgaattcaatatcgtcagataagagtaggagaagcgagcctaacaaaactccatgatgaaaataaagaagaaaggagagggaagtaaaattaggagaatgaatagagaaatttattcttagtgttttcctctgaaggagaagtgtttgtgaggcgaagacccaatgatcgattttctggaagcatccactgatgaaggcgatccgggaacaggtggcgggttgttcaaactgtttaccgagccgttggctagtttcatcgaagtgaacgagtgagatgctccagcgttcgatgtgaattggcggaactccaatcgaaggaagatgactccttgtccctcttggaactgccaatgacgattcaaaaaagagggaaggaagaacaaaccagtcagaggatacaaaacacaaaaaggatgacactagcaagagggatttcttacttcgactgcgactctgtcggccgtgggcgcagttggcgagataaacttccagatctgtaaagatataagagcgatcagtcagcatcaatcactcttcatattcaagtctgattgaatgagataaatattccttacatcaacatctgcgacgcctaggactctgcccttaccaatagccttgtgctctgaaacggacaaagagattcggctgatttctggggtgacggagaacttgaaactctcattcctagaagcgaatcaatattgctttgtcaaacagcacacacatccgaaaaattatcaaactcaccattcgggagagacagacttgtggtgtctcgtcttctgagtctttcctccgacactaagagacatttcagccttcacttcttccgctagatccttggcggacaatacggtcacgctcagacttccctctcgaccttgtccgttctgggaagcaaaatcggttgaataagtcacgggagaggtgccctccacggtctcagaagtaaatcgacgagggccatcttgaatgtcggaagcatcgtcgacagggacctcgacaagctagataagcaaatagatttaaggctgaattagcgcagcttcaaagatctcaatgacatatagaaagaaacataaactctaccatttctgaaccattgtctgtctttttcttgaccagaccaatctttcgaccagcgaatcctccaacagaaccaacgccatgtccgactaaacccacgccctcttttaagaggaaagagtgaattgtcatgagcataggacaccaaccgactcagagaatgtaaaagtatttactgaaagctgtctttccaacacctccaacgatagccacaggcgcatgtccaacctgttttaacggaaggataagataagtggaagagcttaatttcaaacgcacagtctcagaacttacattttgaacagctcgcccagcggtagagaatgtggaggtgttctgcgtaaccccgacgaaacagaaggtcagtttcttcgtctaccatgaaagttcgtaaggatcaagaaacaaacctttcgagctctggcgatgaccgcaggttggaagaccaatcggattcgaatactgccctgctcgccgtgcttgacagtcgatataggaatggtcgcttccaatgcttcgaaaggttcaataaccgcgagatcgatcaaccctttacctaaagacttggcttgctcaagttggttccagtcaaagatctcaacttcgaacaaggctccaactcgagaagtcacactggtttcgaacttctcgttccaaacgggactgagagtctttttctatattgatataacatgccagaaagagcgatatatcagcattaaaagctcgaatgtcgcacctatcgaaggaggcgaagacaccgtactttaacttcactcttgaagaccttttcgccgttactgtaaatgtaaagtatcgttcagtactaatgctgagatagcataagcagacgaagacaagaagttgtaagaactgacaggttgaacacggcgtaaggatccgactttccacttcgatcggcaccacgaaggccgtgaccatcgatcaactcgaccttcaaaagacccatgttgttcgcgctctctgatttgtcacatacaaagggttagagttggaaatatagatatacagtgggaagaagactaacctctgggctcaagcacaacatcgacgggcgcgtacttggcgcagatcttgaccgtgctctttcggcccgatccattagtagagatcagagtaagatctccgggagtatcctgcatataaccggaacgagaatcgtcaagatttttggcagagatgcgcgaagactgcaatgagacataccaagtattgtctgagaaatagattcgatagtcttgtgagcggatgcacatatctgtataagagtgtaaagaaagaaacatactcaaggaagaatctggtatccaagctgatttctgagaagatatcctctttcctgagacacacgaaggaaaagagccgtaagccacggctgagcatatcggagtgagcagcactagactacagcgaggcttacttatcgtcatcgtctccgttcaatctgaggcaaattcgaccaaggtcgagctccttgatctgttaacgcaaagtatcgtgaggtcatgtttctaagatgtagtgaatataaatattacagcgaacgtacgaaggcttcaccgacaaagtcccatgccgccgtggtacttctagaataaggagtagtgaactgatgtatgtcgaagtcaatcagtaaatgacatcgatgaaaactaaaaaaactgaacgaaccgatgcccaatagcctgtctccaccaaaacctccagtcggcccttcttctcgagttgtccagagacgacttggatgacaaggagtccggattctagattaagacataaattttcaaaggctcaaaaattagacaacgaccaggttttgtagaaattcagagtgaggggagagtcttacgggtattcaacaagtcctgcctagtcatgaccactccagtctcttccttctcgttagcagaaacatcagcaccctctgcagcagtatcgccaacagcattcttcacttcagagacgtttggagtgataggactcataggactggagggaagggatacgggggaaggatcgtctttcttttcttcgaatgaaattccccccttgaggcttacggcagagaagaattcctaataatcatatagaaccaattaggtcgattaccgatggccggaaaactaatactgtgacaaacggatgatacaagtggaaaggaagactcactacgtcgtagaatagatcacccttgtaccctcccttagacaactggatcttcttctggcaagacttcctaccgagcgacacgtaaggagttcgaggatcctgactctgtgtggcgtattctcgaacgtcaacctcaaccgatctaggcgattttgtttattgtcagaccgtttccgatcaatgcaaaaattagaacatcaatctcatttcaactctgatcttgtgaagcgagaaaaccaacgtaccccaaagaccgatctttggtaaggttctggtaatccataacttcgagtgtgcatcgctcagaaagatgatgcactggaacatatgcatagctgtcccaaacagggttaagatctatgtggcgaaaaaaaagttagatgtgctcctaaccaccatctctttggtcaagaagagaatgaacatactgttatcgacgacttctgttcgggccaatacgttgccggcgctcaaaactcgaacataggggtccgatttgccgcccaaagtcgcttccacattcctgtaatatacaaacatcgatcagttgggttgctcgcgtcggagaaagggcaaaaaggcctatccacttgacatcgacagctttcttgagtaggatcttgaggataccgataggaggaacataagcttgaagggaaaggtcaataacagtttcaaaaattcacagagttagcttcacttgtcagaacgaactgggcagtttattagcagtgaaaaggaaacaacgaaccagctcctccgttcaaacttccagccatacccagaggtttccactccgctgagattcgaattcgtcccgttttggcacccttgagagggaaccagtcctgctgcttttccttggccatgaggagatcttgaagggaaacagtgacccgccctaacgttgggtccttgacgaaatctcgatcgtcaaccacagcaacagtcacgacggacgagctcttgtccatgaccaaaaactcggtagacgactcccaagaaggggaaaagttgtttttgaatacctgccatgataaagtagagaacagacctcactgatcagtaccctccatgtagaacagaaggaaagtttcaaagagattacgaactcctgtcttgtgagcggcttccttggaacctccaatgaacagcttagcataaggatttactccacctggcatcagaattttggatccatccagctccttggcctggtggatggtcaatcggcagatacccgtgcctgataggagatgatacaattgagtcaatttatcatctctatgaatgttggtgctatcttaaactagatctatacttacggctatcaggtatgacgtccaaagtaccgtcggcgagtttctcttgttgaagaaccgggaaaaagtttctgagggacaggcagaatttcaacctatcagcaaagagcgcctcgaacatcacgtctgaaggatgaaggaggtggatgaaacatacgcatcaaatcggagctgacctcggggtcggccttctctcagaacgttcatcgagatggcttccatggtcgaatcctctttcagtttggaaagatcaaagtcaaccactcccaaatcgttgtccttccggctacagaaaacaaacaagcagaccgaatgttcttagagcttgctcctgttttactcggtaacgtttgctcattgacaaggtacttactgctcattgtaatcaaagacgtttaaggctaaactatcattaagactggaaaccaagatatacttggtctctccccactgaggattaccggtactcgaccttggtttggtcttcgcgacaggggccttaccggccacagcgatcgtgacatactaaatcacatgagagaaagtacagaacgtatcagccgttttgtcgatcggtgtgtaatcgaagatcatacgtacgggatccggacttccacctccaagcttggtaccctccaaccctcgagcagagtgaatgttgagctgaacgactccaatggccgagtctagaaaagaaaaacatatcaagtcgatggctttgttgactagcaagaattaaaagatgtcactaacccaacggagcgccggagagaagctgctcgagattgagagtgaaaacatttggatcgtacatctgtagcaggtgacaaggcgagcatgtaagccggatggaccactttgttgagttggaagaacaagtcgtgcttaccattggtccgagattagcgtgcacctgatcacggataaagctcgagagcccaggaatctacaaatgttccaagcgcgagattgggcgcgatcagcgtcgcgcaagaaccagagcaactaggacaaactcacgctagcaatatcaaatccgagagtttctcctccaattggtttcagcgcatagtctgtatatcaatgataacgagaacgaagagaaccaataatctatccagttctcgtgtgaaggaaggaagtttgaaaagtcaagaaaaagagaacaagtcagtgtacgtaccgaacatgggcttttccaaaaaggacatctcgacaagttgtacgtgagggaagttgttcatcagtttaagcttgattcgcatgttaccgacgaaagacatatcctcgagtagaacagggaaaggagctgagataaagctgtttgaggccgatataagatgagcaatgcgcatctctctgaactcaacagatgaaaagaattgacgaacccctttccgactttaatctctagaacaatcttaggatttgtctggaaagcctgttctcgaggggtaatatcactcatatcgttgggcgtgaaagaaagcttccaatccataatcacaacgtcatcagctgtcttggggaacgttcggacagaatcaattcggggagctggagatccgagcaaaaacaaacaaactggtgtgaatattctatctaagcaaataacacgtcgatgcggatatcggagggcatacctttgtttccaagagtaaatgtagtcattttgatgctctcgattcctgcaattgcggtgttagagagaacagcatccacgcttgccacgattgtcgaacttaggacaggttcctatcattcatatatgatcaatccacagacgcgtttagtagacagttgaaaggataattcaaaataaaagggacggactaacgtagattttccagaatcgatgtaagaagttgttgatccagtcagcgctctcggtctcggtgatcaacctagttttgacaagctctctctgaatatcatcccttgcggttttcctaactcgggtgatagaaagctcgtaataggtcgcgcaaacagccagcaagatgatgttccaaccccaaccgagccgaaagatagcaaagaaatgagaggtggctacggcaaaaaagatgacacctgcgttgtggtatgtctttccgtatgcttgctcagaactgtcaaaaagaagtgaaaacgcgtccggtttagtacgaatgaaactgtcaattataaggacaaggaagaggaaaagaccttacatccaagacgctaacaaagacgcgtccgcgcttccaggctgagcatctataccgctcaccgctctccatccaatcttgtactgtcgttgttgttgtcatccacacggcgaggacaatttcagattccttctctgcagtgtaactaagaacctaaacggctatgaactcacccagtcagggacagcctgtaacggcttcgcggggatagctccgggcacaccctcctgatggtagtcaagcccaaaaccacatgttgtaacaaatcagtacaggtctagttgaggattatctaggcaaccggagaatcctgctaacttgtccaacaatctggtctttagatggcgcggcgtttgctttgccgttggttttctcgttggtggctttgtccaagtccttggcagtaaccgtaggaaggggtgcagggttcgagccgtcatccacggcaagctctttagtagaaacaaccgaaaaacaccgacagatgtcacggatgagcaaacaaacagatgatccggataggagtgtacgattcgcaagcgaaaagaatcatagttggtcaactcggtacgcgtcaatagcatcataaactagaccgaacaaaccagtgactgcgtttcctttgatcacagcagacggttgaagtccgtcgagcgtgttcagagccgcccgatccttcccagctgctgctttcttctcggccgtgctcgcgtcaggatcgaatgtctgttggagatgcaagcgatgcgaccataaggatcatcgatttgttgaatcataagaaaggaaggcagtcagttcaaggaaaccgaccggtgcacacggtcgaaccaattcgtcttctagcgaccctcagtcctgtctggaacgtgtcctcgattgaaggctgcctgatttctgatcgctcgtcttgatatacacaggaaatcgcagccataacatcatcccctaaccggtttgaaaatataccacaaaagagaggtgaaactcacgtgaacgggagtcccccgagcctcatcgatctgaacgatctgagcctcggtctgttgggattttggatactggttttcggcaggaggcaaactcatttacctgtagagagatgtagaggaactggaaaggacgcgatgaggtttgttgtaaacgagaaggatagaaaagaatgaaaaaaggaggggacggcggttaggaacataaaaaggaggcacgacggcgggaatgtgatgatgagatctttcaacgttagtggcttatcaaaatctctaagcgcagcaagaagaattttggctctcgagtccctgctccggctttcgccccggccagccgatcccgcttttatatcgagcgccgcagtactttgttccggctggttgcgtcggaagtatttgagcggtacaggcctttgtcactttccttgcgtcaaggcgaagcgacaatatgaaccgcccacaaacagagattgataatgctggccggctcatttataactccgtaacctatccggacgtatagagcgtagatgagagatatgtatatagataaccggataacggataacggcaatttacttgacggtatcgaagcgtggtacggaggtcgtaaagaaagaaaaggcataacaagctactgtcatagaccagaagcgcagaggtcgtcaggagagtagaaggaagaaaaattgagaagtccataaggcagaaaacatatacaacaagaaatatttgtctagaaatatcgaggagaggagggactgaagagaaagaaaaagaaaaagatacaaagaagggatagggagataagacgagatggaaagcatgctaaaaagattgcgttcctctagttatgaatcgttcgtctcctcctcaacatagcgcctcctccgtcgtcttcacttccaccatcagtctctccctcatcgtcctcatcctcatctcctagcccgagcgccccttcaactcccacgcttgctgctcggcctctgccactagccgtcctcggctttgtctgttttccgtcttgctgcctactatgtacaaagccgaggccgactccttggaaacttggaatatcttcctcgccgggcgtagatggaggagttcgttcttgggaggaactggttaggtccgagcttggcaacaaggcatgacgctcgccgggggtggtcatgtatgccggagtcgtcgcacccgagtttgagggcgaaggaagaacagtataattggtcgatagagaaggaagagggacaaccggcgaaaaaactgttgcccagtcaaagtcaaaaagataaacggctgtctctttttcctctctgatgaaaatgtgatgtcagcaagagagaaagcgcaccgaattgagaggaaagcttggttcttcgagaagatttgtctatcttttccaacaccttgccaagcacgggttcccctacgcccgttagacctaggcctccagcaagttcagagtcctccttgaagacgctcaccggagatgatgcaggcgttaatggcagcgttgaactcgaggtcgtgaacgtcagaggcttctccagatcgagagcactagtagtagcaccctcaggaagcgaggcggtagtcgtggtcttcgggctctgaacaggaactcgtactcggcgtgttggctatcaaagaggtacaattgtaagattaagtctcttagatgtctactaactaaatagtactaactatgcgcagagttctggttagaagataggcgacaaggtcctatcaggaacagcacacgtaagccgaaggtcagtaactctattaaaaatccttgctacattcacatcagagctatttgaaaacgtgcgagagatcatactaaccagaagaataagaaatgccaatggaccagagacgaggcaggctaggattctaaaagtaaaacatatccattctagcagactgctagcgaaaccggtcattattggttgcaacctgccgagggtggtttcgtttcggagcacggatgaccatgcagtagaaacagtcgaactcgggtcggaggacacatagtgtagcaattgctgatgagacataagttaaggatagagggagtatgaatttatacgatgtgaaggaggggcgtgaggatggtgaaggctggtgatgcctggaacgactacaccgaaaactcccaacgaaaagatcgaactacgcagaggaccggggtttaccaatcgaacattcaacgttggagaggtgtatgatttatgtcagaccaaaagtaaagattgatggactgaataagcggtaggatgaagttatcaatggtagtaggaacaccagatgaagatggtcctcaagaagttcaaggaggagagacaaaagaagaggatgcagaagatctaaacaaaagagaaggcgtgacactggttacggctaagtcgtaacccagcgaccaatcatcggggccctaacgcctcaggatacaagcgacatcttactctcttcttccatctttaagtgctccttccgatctaatccatccatgcctcccaagtctgcagatcctaccctctatcatgtggcctccaaagggtctgtatatcctgtctttgttactgatcacatgggtctgaacgacggcaagagcgggagttctctaagaggagagcattgtactgactcgttgcatctatctattccccctaaattatatcatctccatttgacttctccttgactctttcactctactagattctggaagaaacttcgtacgtatggatcaaataagtaagctgtaaagatatcttgcatgtcaactgatttgggaatctttctttctggttgtgaccgctccaggtgacaaaaccgtgatcaaccccgagatctctaccggtctccctattcctcttctcaaccgataccctcctcctggatctcgcccagaaccttacgcggttcctgctaccgctgctagtgaccctgcattcaatcctgtaagttctcttcacatctggactcggttatgcagctctcttgggattgactctgagcagtccatgggttgagtatcatgtatgctgacttgtcctcttcctcttgttcaaacgcacatagtattggaagcgtgatgtacgtcttgaaagattccaaacatagtgatcttttaaagccagggctcatcggtcgcatatgttgcatcttcatgtttctgttccagactcgccgaaactacccagccactagtgtaatcactcaatcgtacctgaccaaccttctcctcgcttccccagaagggaaggctgcgttcgttcttccttccatctttcaagattcttccttctagttcgatgctttatcgtgtatcgcgttcttctacacttgcatgagtctaatttatcccgatgttgatctctattctaggattcctggtcccgactccgctcaaaagactgctgtgactgacaaggtcgagcctgagcagactgttgttcacaccctgcctgccgtcgtcagtcagattttcgaggtcagcaagaagaagacgtacgacgagtccaacttgcctcctgtgatgcctgtacttaaacggcacgcctttcaacgggccgcggatcctccgcaaaatgagtttgactatttgccaatgtacgccaaacttatttctttggagatttgtgctcaggccatctagcgatcatcactcgtgccgatgttgacattagttatctttccttaacacaacaggcacttgcacaaatgagaaaagccatctggctatcaagtgattggcaaacaaatcaatccttgttgttttcttcttctctttttctctttcttatcttgtatcttcttcttctccttccattgaggtacattttcttctcctccttttgatcttgttgtgttggtctgtttgattgtttgttgaaacttttattgtatgtcacttctattgtctcccactcttttctctatcgctactttaccccagcgagatcatcaccaagcccccatatacacgtgtacgcgcgcgcaagagcaaggctatgtgaccagagtatcctggttgtatcaacgtgattctgcgggactgtttaattcatcaactaggtgaacagatgggtggataaagagggacaaattagatacggcaagacagttgaaacgaagtacatagagaagcgattattgtaaaacaagacaagagtgccatttccaaaaacaaaaggtcttggaggtttttacgcgtacttttcttggacatatctcataaaagagagagagaaaaggatgtattcagataagctgattagtgaaaaacgagaaagagctggagcaactacaggaaggggtcctcgactcggctctccaccatcctctgaccttcttcgtttctggacaaagaataagagaggaagaatctacatcttcgagcctcatactacttgaatcctgatccatcctccttgaccaagccagcctgcccgatcaatctcaaagggatcatccttctctttgaaatctctaatttctcagtcctccattcgatgttcgggttgtcgtaccttctaaacgtttcgaaatgagcgggtacttcttcgcctgtttcttggtctctgacgagtgggacaagatcgatgggccgccagtcgacttgcgcccaacaaaagccggagacaattccggtagattgaactggccggtcgtctcgttggtgttcatgctgaccgagatcgggttttagtttggtattagtcgactgtcgttctcgagcaattgtattccccttccttcgcttagtgctatagaagatggcttacgtcaatccattcaacttcatctccgactgctagatgcaagacttccggacagatactctctctgcaaaatcacgtcccaatatcaaattcccccgagaaaaagaaaaaagaaacagcacatgcgtgagaagcagattagatcctatcttctttccctcctttgtagagcatctctttaggtttgtacactatatcgattcgctcttcctcgaagcgaacacctctctttcccgctaccacagttacagatacacagacgtccatacaagtccgcagcgatgaaattataaagctcacctcttgtgtttcgcaagcgcctgagacttttgaaaggccttcatgttcctatactgagcgttctgagtacttatagtatcctgagaatagaacgaatgggcgaaaatatccttttctccatcgactgtttgttcgttcgttcgtttggtgttcaccatccaaattccaacgtcatttatatattcgtttgttcgttttgtgcattggattttgtttcaagaaccagacgggaaagaagtgaacggaaaagggtgaaatgacaagagaagagaaagaaggaggatgagccgaaataccgagcgaggcgagaccacctatgacttaaaggtgacaagaagaaaatacgaacgagacatcgtaaacatccgcacacctccggccgagactgaacgatacaccgacatcgataccatcaacgacattggcggtgacgacattgatgtcgatagcgactgcagcactcttgatcgacctcctatgagctcgacggtccttgatagaccaagactcgaaggcatcaccctacaaagaaacgacatgttctttctttcgtatcaatcaacgacgtcgtcgtcaactcagcgttgttttagttacggctgttggttggtttgaagtgggggtgagctcgatgtggagaggtatcctgatgggatgtatgggcaagatagaaaaacaagagattagaacgaaataatgacaagatcgtccgcgtcacacaccccacaccgtactagaattatgagcgcagtgatatacgatatccgtcaatcagcttcagagaacaaatcactttcgaggggtagagtaaaacacatggtgtaagacagagacgtctcaagccaaagtgagagggcataagaaagtgtgtaacgtgagtctcattatatattgtatgggaaacccgataaacaaaaaaaagaaaaaaaagaaaaagaaaaaaaagccaaaagaaaaaaaaaaaaaaa

SEQ ID NO: 1305 - DNA, 8505 bp, Xanthophyllomyces dendrorhous
aaaaaaaaaaaaaaggaaaaaaaagagtgcaaaaaaaagccaagtgatagtggcaagtcctaagaaaatccgaattgatgtatgtgatatgggtatcgttaaagtgtacataaaaatgaatgggtgaggtaaaacggacgagcagatgtacacgtccggttatcaagcttgtatggatgttgaatggattttgttttacagatggaggcaatgataccgaggaagctatgcaaacccaaacagatgaaaacaaaactgaagattggacaggctgaaaagcggaaatggtttggagaggttaccgaaattatgcggtaggcaccgaagggataacgtcttgcatagattctaattcctgcgctggtggaccatcaatagatatactcgcagatgatggtggcggtggcggtggtggcggaggcggctgcggctgcgagaacgtagcgccgagaacaggcgtggtcactgtcggatgctcgggagggtctgataggctttccggtggaggaggaatcatctgaacgccccccactggggaaggagcgttctttccacgaccgaggacattgattccgtcgacctcgtcgatctgtcggaagcaacccatgtctaccaagagatcccagatctttgccgttttgttaacgtcaatcttgatcaaccctctcgcctctcttctccttaagtttccgcctcgtctggcatattccctgaccagcgtctctttgatcatcaggtagggcttgggcaggatccttaatgttgaacacaattgttgttccgcgggattcagcaagtggagtgaggccgaggtagcgagattgagtggctgaggcggcttgcgcgtcccgttagccgcaacatatggattcttctcctttttaacgacctcgacctgactggtttgtcctcccagcgagattcggttcgctccgccacgggcagacttgacgtcttgtaagcccgatgttcggctttctaagaggatctcgtaacgttctgcgtcggcaacggtggtgatccctttggaccgatatgtttgtagctgggatatccgcgttcggaggctttgttcatatatcaggccttcagagaagacctcgaaatcctcggccgtctgtaatttggcaaaaactttgtatttctggataatccccttgtcctttggtggtcgcttcttctcagcagccatgatttttttgtgttctgtaagtcctctctggaaaatcaggttcttgacctctcttcttcggtcgagcttctcgttataaatttctagcacggctaatttaatctccagatcgtcctcgtcttccacatagtctggagaatctgtggagagcacaatcggctgagcggcgggcaccttggtagaggccgccacaggttgaggtgtggatgaacttgaagggaatgaaggcgcggatatggtctggttgaggaacaatgatgaaggttctataggagtcgaaaccccagatgccgagttcgatggaatcgggcgagatgtaacggaagagggaagtgtctttgttgaacctggcggtaatgtttttgttgatgatatcgagcttggctcaggggtggcagagtctctgctactccccacactcgctgcccgctctctctctgccaggatgtacgatggtaaactcgatccaggaggcggcactttcggggaggcgaatcctggtggggctgttttccctggaggtgctttctttgagcttgatccccttaatcctttggcacctgcgctccgacttcctccggctcctgcactcaatataggaggttggacgaaggacgggggcggtaatttttgggcagtcatggaagagtagtcatctccccagtcgtcgtcatccccctctccgtcggcatctgggtcgggctcacctaagtccatccgggaggaagcagcatctgtcggagttggcggcgggagcggagttggagggactaccgatggtggattagggggtgcttgtgtagaagggacgacaacaggtagcactacttcctccatcttgtcgtcatcatcctcatcctccactacgtcctctggctgttcgtttccgccatacttgaacaccaaaccaaactccatctccttgacagtgttctctgcgtcgtcgtaagcgacctcgtgttcgaagtcaagtcgacccggcatgaagcctgctatttcatgattggtcggagcagacacaagtggtttttgagcggcgaggttggatatgtctacaacatcagatatagtttagtacatttacagaacgactgaatcagagcgaagagagaaagtttatgagaaaacttaccgcgtgtggcggtcctcatctcctctatccgtcgtttctttctctgcaggaaactttcctggtcaatatcaaaagaaatttctcctttctgcgctctttctgccaagccgcctgttcccatcagacgtatgcgctctctactttcttctctgctctccgctggcaaggactcttccaacgcaccgacccaaacctccatgtagtgctcgcggcattcttcttttgtgcgtgttccgacgtgttccgatgcgtcctgccagttacccaatccgtaaaggtttaggccttcgatcagtaggagctcttcgtctgctccccaagcctcgtggtagatcggatatgaatgttgctcctattgtgaaaagaacgtcgaaggaacacggtttagacaacaagcagtcagtcggttgggaacacggctatatgcgggtgtcaatagataccagccagaactcacaacgactcgatagggatgccagctcttgtgtttgccgccttctttacctttacagaaacacgaagggcatagatcgacttcctcgcaacctatggctgcacattttatgcgaactgtatgggtctgatgttgggacgcgttggaaagaacagtttggattaaacatgtcagcggaggtgtctatctgtgaagggagggaacgagacagaatgggaagagtggatacgaacgcagtcgaggaagcaaaagtcgcagttatctaaggaagagcgtgtggtgatgcgaagtgttagatgattgagagtcgaagcgaaaggagagaagacaagaagaagaaggagagacgtacattgaattcctcctgtcacagctggcggaaggaaagataaagatgaagatggagagatggagatgacatggagatgaatagatgaacgggggccacgtgagaagagacggaagatgagtaagcgagttgacagcaaaaggaacgaggcacaggaatagaagaagaaagagaagggtgacgcgtgtgagatcgatcggtttccgtagtcgaaagtggaaaaggcaggaaggagacagaacaaagacaagagggaagaaaagaaaagaaaagtaaagtcctaaaaacacgtacccgagtgttgttcattctcagcatctttttttcttgacgatacagtcattcaaacaccaagatgacgaccgaaacgcgttctaaattatggagggagaggttgtagagggagattggaatgaaagatggcgagataacaaggtaaaaagaaggccggaacgtaataagagacccttcttttttcttcagtgcttatgttgagtgagtggagagaaaaaaggggaacggggatggtagagagagtaaacggggtgtaaatgagcgagtaatcagggcgggtgagagtaacaggaaagagagaagaacgggtaaatctgggtgagcacgagcttagttaggttctttccgctttcggatgtgtgcctggcttatccgcagtagttcactcgaataaccctaaccagaggtaatcagcacccacatgtacaccttgtagtgatcactccagatagaacacgttcaagcttcatacacagaaaaccactaggttgttcaagatgcacccagagaatccatatttgctctgtcctcctgatttctcaaagctcgcaaagtcaagcgaagagctcaggccgttgttcgtgtgcttggttctcaactcgttggctgaggatcgctaattcaacccggaagctccctcctttgtctttgaccaacacagtgtctttcttaatgcatctaaactcccagtgatcgatttcaagaatccagcggcggtaaggtgatggcaactttttgcgagggtcgtgtgtatctaacgtgcggacactcatggtcgtcttcgttttctctttctctaggtcagggcattgtcaagggccttgctacatcatgatcttgacctaaatgtcactatcccggatgatagattatgtccaacagtaagaatttacgcacaaaaaacccagcgttatgttgaatctatctgcaacatgctgaagcagtctcatattccttacaggttgctaatcggttagactatctactctggatccgctcccttctgagaacacatgactgcctttccgatgttgccctcaagaaatcatcagaaaagattagaggcatagacataggtaccggctcgacagccatctatcctctcatcgggtccaggctggaacctcaatgggagttctgcgctaccggtatgaggagaaactattcttctgttgcccttatttccggatacactcgactaagactgacgaacgttcaacctcaacctagagatcgatccgaactcgtttcatcatgcgcaaggaaatatatcgagaaactttctgtcggatcgagtaaaactcgtcaaaatcgagcctccgtccgggcaggaacaagaccgaatcttgaagccatttgagctgtttccggatcttcagtacgtggtgtccatcatctcaaacgtttttctgcgtcttttctcgggactgactgagcctgcctgtttatctcggctagattcgagtttacgatgtgcaacccacctttctattcttcttggcaagagattagctctttagcatccaacaaagaattcaatcctcatgcggtaagaaactcgagcttccctattctgcatggtctactcgatccgtgtacccgctactgatcaaaagaagccccttgccatacagatatgcaccggggctgaaacagagatgatcacgactggaggagaagtcgaattcgtaaagaggatggttaatgagagcacatccatggggattcaagaccgatgcaggttcgagcgtttctttttaacgtccctttcaatccggcttgtactccgtcgggcaatggatacgaactcaaccgaggcttgcttttttgacctagatggttcaccagcctcttggggaaatcaagttctataaaggacgtcgtcgacctctttcgttcgaggaaagtaaggcccgttccagttgccctttaattaggctttattttcaaaaactctatcacgaacactgctacgagatttgttgctcatgtgttgtatcaaatgctagataaaaaactatgcgatcgccgagttcattcaaggtcatacaaaaagatgggcgcttgcctggtctttctctgctctgtacctaccagatgtgagttcttctgtctctgctctcggagcctatttatgtttatactatcttactcaagccctttgatccttctttcttcgcttcggcctatcttcatgatgacctcaggacctctcccgtccgacatccaaacaactgcatccgtttctcccgccttccaactcaaaatcattcacctttccacccgatacgtcgattgaggatctcgttcgatgtacggagcgtatccttcaggctctcgatggagtctccctatcaactctctctgagcctatcacggtcagctctggatcgcattccgattcatcagagaacccgactcggccaacctcgagttcgactcgatatctagtgagcgcgcgagaagcaacatggtcgagatccgctagaaggaagaaacacgtccgagtcgagaatgagataaacccgatggagcacgacgtcagcacagtggatgaacggccgttcttgagtactcttcttcgatttgatcgtgtgggcctgacaaacaggggaacaaaccggagcacagataaagatggggacaagaatcgagaagacggggacgagaagggatgggagatgagtatgcatctactaagtctgaagacggatgatatcgaggggaaaaataggttggcatgggaaggcctttggaattttatgttgagaaaagttagggaaggagtccaggaatgtgtagaaaaatgaatggaaaccttctgcgaaaacgttcttggagtcatcagagaaatcttcctcatggcagaaagtttgttattattaataacaagatcgtttctgaaactggatgcatcaagatgttatcggtgttcctaacgagataagacagcaatgaatagaaaaaggaatatacaagtcacacggaagatgggtttccgtatccttagaagatggaagtgaagaagacacggagatatgtgcggcaagctatttcagcctcgtctcaatctcggccgagccattaattagtcactgacggtatccctcaaattcggtacacttgacattagtttctactgcctgaattctttataatccgaaagctcgttccatccttctctcttcatatccaagaaaccccggtcgatcctatccaaacgggcgaggtaaaacaaagaagaaataagagacaagaggagggaagagaaagcaaagatgtcgtttgcttcatcaaatcttctaccagaagagaatgagtccatcctacaatcaatagagaacgacgtcgaagggtccggctggttcagactaccgatatatctagaagaaagacccgatcaaccgtttgtttgtttcgtcgtggtatgttctcgtgttcctctcttttgctggagttggatacatctgctgctttacttgatggtcttttgtttatcgctagagccgaacaaatgatcatatcatcccggagattgctcattctattgtatgccttttcggtcttgggtggattatgaacagttaaagacaaagccggggatggaacaagctgtggtacgccccttctcgttgcctccggtctgttctttgccactgtacccagtatcttacaccacatcacgcttgccgtttctctctactcgccgatttctttttaaaaggtggatatcacaagagatatcagagcggaaacagaccaggtatcgattgttttccttttcttttcgttcttgcgagtttgtatgcatatgcgaatgtcttttaaccttgtgatgaaatctgatacatcatgtgtcaacagaatgagctcgaaggttcgtcgcaccatcacgttcccgcattctccgatatttgggcccgactctactctgtgagatgaggcaggcaaacaagtaagcttaactcaacaaaactctggtacatctgcgcggttctttcctcctttcgaagtgtacgcccatcggacgttacaagccaagtatgaagccgatcgaaacatgttcgtacagtgcaattctttgcgtatttgtgtgtgtgtgtgtgtgtgtgcacttgcgaggatgatctatttcgctgatgtcatcctctttttcattccatgtatgtaggatatgtattgtgattgattgcaagtacaagatcttgactctttgattgtgaccagttcctttactcatacacacgcgcgcgatgcattcaatctctttctttttcttgcctcagacgactcggcggaagcttttaggactcactatagagggaagaacatagcagtacgtccttgggcgggagtatgaaagttagacatcaggaatctgacgaagttattctgttttcgtgtttgaccgttagcggttgtacaaggctggggtactgtctgagcctcctaaactcaacttttttgtagacgtccaataatcatatatgtaaacacaagggagacaaaggaaactagagcaagaaaaggatagaaaatattgggaaggatgtgggcctctcttcaatgtctccttctggtagaagctgtctacagaaaacaaggagataaatccatgagtggtccatgtgtttcgactattctttcctccgtatggaagccgtcaagcgtgttaagccataaaggttgaagccggtttcctactctcgaaagagttaggaagccgtcatcgttcgcgaggctttttgtgttggggattttggtttgtgaaagagaaaagagaagagaaagataaaagaatacaagacaaaaaaaagaaagaaagaaagaaaggaagaatgagaggcagacgaggcaaaaagggtaagaaagaaaaggggaaaccctagaccaaggttcaatcagaattaaagtcagctattctttgtccaacgaagagcaagccttgcctgcccttcagacagtttaccacacacgaagagaaagaggaagaacggacagaacgaaagaggacacatcgactgaaacttgtaatgactgtgcgggacttgaaacagagcataacgcccgttacatccgcaggc

SEQ ID NO: 1306 - DNA, 17804 bp, Xanthophyllomyces dendrorhous
gactcactcccactctccttttcttctttatgcgtgcagacttcccccacgaaaaacttgcctaccattttgtccctgtacgattaccgtaatagcctcggtgctccctgcttcacccccttgccgccttcgtcccaaccggctcagcagtacaccaagatgatctacccacctgcacctccgtcaccaacgctgttcccaaattttccctccccgaactcttctagctcgatccctgcgttcgtcaacagcctccagacatcgccttttaaccacttctcgctctcccctccagctgccgaacttaatggatcattccttcagcagccaaccgtaggattcaactcagatttctctgtcctccaacagcagcagcaactccagcatcaatcacagccgcagcagtcacaacaacaactttccatgttgaacaatccatcaggcttgcttcaatcccaacatctgacgtttggagaaccaggggagggtttccagttccgtaatcttatccctgcagagtacgagccagctgaactctcgatggatcaattgcgcgagttccaaatgattcaagagttcgatcaggggttgtctcatcagtcgccccagacgatccaaccgctggcagaaggtggaggatcaaacggacgaggtcttcaatcgatacatcctcatcaacctcagttgggtgtccaggttcatcagatccagcaacaggcacagcttgctcagagtcagatccaacaacagctcgcagccgctcaggctcagaggatacagcagcaacgctatcaagagtctcttaacagttcgtcctcgtccgatgatggacacgaacttggcagtagcgaacttggattcgacggccttgccgagctctctggcctccctcaatcaaatccgccacagtccatgccgatccagacagctcccatgtctcgtccggcaagcagagactctgtcctatctgctccgtttccaatctcatacaacaacactcacggctatgctcatgattacatcaacaacagaagcaaagcacgatcgtctggctctttgaacaagaacgaaaacgtcttgctctcaacaacggcgacgtcgatagcgtctcctggacaatcttcctttggtggctctcccgaatcttcatccagagaaccaagcatccagcctagtcccttccaatcgacaaagcttccttctacccggccctcaactggtccagactcccacgctctacctaggttggatggcttggttggagagggcagtttgtacgttaacgtgaagcaatacgagcgaatcgtcaagaggagagcccagcgatcgaggttggaagaactcggtagggtcgccaaggctcgaaagccgtatctgcacgagagtagacataagcatgcaatgcgtcgcccccgtggtaaaggtggtcggttcctcgtgggtcttcttttcgctttcctgaaacccataacttcttcaccccttggggttgtatgtgcatgtactgatcgatcgttcatggtcttcgttgtacagaccgctgaggaactcgctcttctgcctcctcagacactcacctcaccccccgaagatgcatcctcattcgcctctccagagggttacactcctatgcccgttgtgccgagcacggcaaaagccaaaaatttgcccaaaaccagagggaagaggaagaggtagacccgttgactttgtctttcaaagaaagaaaaaaacccgaaacacacgcaaaaacgataccaaaacaccaaactcataaccacagagataatatcgataaccacaacgtgccgggtcgcttgggatcacgggaaagagagatagagaagatgcataaaagcggtatgctgtcgtctatgttcattctttaattgctatattcttctctttactttcgttcgttaatacctgtagatgagatactatatttctatttcttctctttcttcgacaattcttccaaccttctttcttcgttttttgttgcattttaaccttttatcttgttgcccttcgtatctttgtttctcttcatttccacacgtttcgatctcaacggtgtccatgagctttcacgagatcacaagatagatgacgaaagatgctcgagatgaagaaaactagtgcaggatatgaatactaatagaatctgatgaaatatacaaaaccaagagaaaaaacacatgtaatcaaacgccgctagaaatatgagacacaaaagatctctggctgccctgcgtattcctcgttcatccttcgccccgcttccaagaactctgtccaatcgatttcctttctcctctccttttcttcctcttggcccattctctcgtttattatataggaactagttcttgttcttcttgtctcctcttttctcttcttcttctctttggccatttggagagatgccatctagttctttcgtcaacctcaacagagttcgtcgacagaaagcagcggaagaggccaaagcgactgcgacatcgacagtaacctcatcaatcgcaacgccttctgctcaaactcaatctcagaaccagcaaaatcaacaacagcaacaacagcaaagtatctctccggttccttcactccatcaacaaccacagcttcatctagacccgacacattcttcttcctcgtcccaatcagcttcgtccgtcttggtctcgccgatcgagtctacgccgaatacgacggtgttcagatcaccagcttcatactcatcccaaggatctctctcgcctgcttcttcctgttcattaaatataggcggtctcaactctcctctcagcccgactgccacgacgacgattagcggtcatccatgggcgatctctccttcggcgtataccggaggagggggaggatcctcggatattaggagacatcaatctacagggtcgagacataagaagtaccttagttcgactcaggcggaaagcttaggtgaagaagcagaggaggaagacgaaggggatggagaagaaggtgggaaagacggaaaggaaagtaagacggctgctttaggtgggttgacgaggtctggtttagacagaatgggaaatctgacaaggcatgggagcttgccttctaaaaatagtggtatgttatgctcctttttcttctgttcctcttacgacctcatagagtggctggataaaggaacaggaaggtcggagttcaaagtcaaggccatggtgctcatctcaaatgattattcctgtctttctgcagcgttccaagctcgagcgactcgagcaggaataaaagcacaaacatccccaggggtctccaggttggactcgatcaccgcttattctccagtaggacccacacaaaccaaaggagtagatcctcaagacgacaagatatgggaacaagcacttgcagagaagaaacgagcggtgagtcactcattcttgctggctcttctatctatctgtttttaggatgtcgcctcccccgtttttggcggatggaaaccacttgtttgagttcgctctgctgaattatagtctttcttctcgacaatatcatatctaccaatcttttttaatttcctgatggcttactcaggaaactatggaatccaactctccgtctacattctcaaacagcgttcttcgacatcaaagatctctacaattgattccttccgggagtcgatcccagcatacaccactctcaccgacatctaccgtccctggatctgctagcctcgtcggcggtcacgccagatctgccagcggaacgggtgagcatgtaaacgaaaattctcaggccgaggtcgaggccagtctccgaaggcatcagagcttaactcaacagggcatgaacacccggatttcagaccgactcaaggcgagtccactccctctatcgaacactcaacgaccatacccagcatcttcctctgcctcacattccgtgttgagcgcgcctgaagatcaagacttgccgcctccgacgtcgcccattcaggcttctccctgggggaaccaaggggcgggttcgaacagtatctcgagtaatctcagttgggaagatcactccagagtactgaatgctggttcgctcctcagtccggtccctgggtcggctcgattcggagcagttatcagacgaatggaagaagaggcggatggaggactaggtggcgtgccggcgatgaacgctgagcagctacaaaccgcgttcgaagctgcttcgctcggtcgatcgtccggagcgcacaacgcgttagggccaccggtcgtggatctcggtcggctctcacctgatttgccaggtggtaaccttcgccggagccaatcgctccgaactcactctcgaacgtcctcccgaagtcatgaccaagcggccttaggtggtaacccacctccgcctaggttccttaacgctagtcctcaacctccttcgacttctcctcgaccggatgagccatcattctctgcttcacccgaaccacagtctttatcgaccggttcgacagcaggaagcgcatacaactctttccgacctacttctgggtctggatcttccactccttccctcccgggtgggaagaagctgtcactccttaccgatcccgtcacgttaggtcaaatatccggccagaagaagccgtctgggccggctacggccgctccctatgttcctccgattggacatactactcgaccgccccaatcggctttgccagggaagacatacgtcccaggtagccaatacgccaagccttacaccgccgttggcatgggctgggatcagaaacatgcgatcatcggcagtagatctggtggggcgttgaatggagatgcttccggcgaagaagacgaaggggggatctataccaccggacaaggcgactacttgggacgttcactgggtccgatgatacaacctacgtcgataggaggaatgggtggaccaattcctcatcagcttcttcaagctcaaatgaatgcgttcacaggaggaaacccatcgggagggatttacccgatacctctcctgcctccaatcacacagagcttggcaggcccgaccggcggttatctgcagccgatcatgggagtgaatcatggagtaaatttttctgggcctggcgggaatccagtgtttttgagagcacaaaccggtttgcccgaggcttcggggcacctggatgtacagggactgatccaggccaaagggtataatcccccggtatttgacataaaccccacaaaggtttgtcgtgattccttgatctagctctctatctgtaaaaagtgcattttcgctttcctcaagctgacatgtgtattgctcggtcgaaatgcaggcaaagttctttgtgatcaaatcttataccgaagatgatgtagccaagtctctaaagtgtgagtgagccgcgtcatcctgtgagtgcgttaacgatgtcgctaattagaacctactgtattcaagtcgaaatttgggcaagcacgcgatacgggaacgccagattggacaaggcgttcaaggaacatgcttctaccatggtgcggtaatctccagagaatcttgctcattgaaggaactttgtctcatccagtttcttcctctctctctctctctcagccgatatacttgatgttcagtgtcaactcaagtggtcatttcgccggtatagctcagatgataaccgacgtagattatagcagtaagtagtttgtgcgtattttagagattaattgtttaatgagccgacctcttgcctgttggatgtttttttttggtatcagccaccagtacggtttgggcccaggataagtgttagtagaaatcctcgctatctgccctcgagtctgtttgctgaaagttgacgtgtatctaatcgttaactccgccgttcgtcaaatagggaaggggatctttcgggttaaatggatctatgtcaaggacgttccggtttgtatcttctttctttcgaattaccctcacctctgcttcagttattcgtcaccgagtgatggctgaacgtctcactttcggattcgtttatcacagaaccaagcgcttcgtcatattcgactaaccaatacatctgagaataaacctgtgacaaactctcgggatacacaagagcgtaagtgtctcatcacatcatacttctatcatctaatcaatatatcctcacgatttttccatctctttattcagttccatttgaagctgggttggagatgctccagatatttcatacatatcaagctcgaacttctctccttcaggattatgggtattacgagcttgcttcgaaccaacgagatatctctcctcataaccagcaacatcatcgggaaccgcctgtcgaaaaagtttggcatcctgcggcagttcatcttccctctttcccggctcagcccacagtttatactgctagatcgggactcgggcccggacctggacccggacccggactggggcaggggcagggacagtcgtttgggatgggtcagccacagggcccagcacttgggtacggacctcctcggtactagaaaggagcttttctttctcgattcctgtttctccgctcctttaagttgttcgtttagttctttcctgggcttttgcacctttttcctcttcaagcctctccggtttcttctttcttgcctttcagtactcaatatatgaacattctacgtgctatgaccccctttctctccatatatagaaccttcaacatgcttgcctttcttctctctatcttcctgcgatttgttgtggtaatttttaaccttctttttcatgtccacttgctaaacaaagagattcctcctatgcgcatgcgtgcgtatattttcacgtatgagccgtgcattcgagcttactctttaaaaatggggccccttcaccccctttcctgtccctttgcttctttctctctgctctttgttttctactttctggctcttcgcgcctactggtccttggtgatgaagaacaaatgccattaagagtggttatcagagtcaagaaggagaggatacaagttgattatgtcagaagcatatggtaagaaaacagagttgccctcactaggcctttattcggccgcccaaagaagaagaatgaatggatttgaactactccaagcttgaagagattgaggaatcaacgtaaaagctaagacggggtggttcgacgaggaaatcctgacaagagtagatgttctgagagagaagaagatgctcaaaagataagaaaccggtcgtaggaaatgatcggaggaaatcaaacggtcctctcacccttagacttgggttctggtaatgcttgtagaaaccgtcggcattgtcgtctacaaatatcgaaagaacgattaatgaaccggacataagacagttgaatctctaccgcgcaagattatatgcgactaagggacttgcaatcgaccacgacgcagaacctgatgttggatgggcagggttcaaaatgagttggaacacgcgtttatcatgatccagtaggatacatgtgaagcaaggaagaagtgcgcatggtcagttacgatgaattgatattccgagaccaagacaacgtggcggaagttctagcccggcctcacaaagattgatcatccgtttgatctctagggactaagcttcgatgagagtacacttcgagtagtggaagtaaggtattcagacccttggctagaacgctcttcctaaaataacaataatcatgataataccggcccagaattagtcacttaccatcaagattgaactatccaatcagaaacaagatacgatgatgaccggacataaacacatatacaaaagattcagtcccggaagtagaatggggccgagtgacatgtcgaaatcagacggatagaatcagcgggctagtcagcgattcatatcacctgtatgagtatagagaaggattagatcaatagacgacgagatgcagtattgcgccaaccttgtcggtttcttcgtgcacgatatttacacatctcaactataaccataagatgagccagtcaaccgatagagcaaagtgcagcaattagattatttatcctgaaaaacacctcgtagactaagagaagaatcatggctgataatcattggcttaccagatcatccacgcgttcggacttgatcctcaactgatcattcgtatatccagacaaacggcgaaaaagtcaatagatatcgaggacgtaaacgaataacgattatcagcatctctgttccgtctgtgtaccgagagagggagagaaaagagagcgaagacaaccatcacgaagcatgtataaggcacatccgggtttcgttcaattatttttggtaaccgaaagtagtccacatagttctcacgaatcttttccaagacaatcgtgttctcttctggagatagattccacgaagtaattgtatttatcggcttgtatgtactcataagtggaggataagacagagtgaaatcttggaagagtgagagagatgaagttaaaccatagaaaagagggcaagaaaattgctaaaccatgctggccatatatcagtacagtttacgcaataagcccgggatgcatgacaaaatgaaatgctgccaagaaactgaacgtagttgggagatcggtccatcttgatccttaatacacaactcaaactaagatgttattgggctctttcttagatacaaaaatcatctggcttatcgcaaaagaaacaatcaggacatagatacattacattgaatttgcttcatttttgtattgatcacaaacagatataaaaaataggaagaaagatagatcaagaagagagaagcagttgcacattgcttctattgcttcttccaatacttgtatgtatgttcttttattcaagatcttcccgtttcatctagagaaatcaatctgttcaagctgccgtctttgccttcttctcttcggcctagacaacatatggacgacgaaaaaaggtttgattaagtgatatttattcagaatgtgcctctcttgctgagcacatatagaggacagatggaatcaatatcaggttttaggaagaaactcaccaccggtcggacaggtccaaacttctccaaacgcttgcgcttcttttcctcctcgaccggatccaacacctttgcgggctcagatttgagtaccttttctgatgtgggcttggccgttgcggctgctgctttaggaggttggatggtgtttgtcttgggtctgacggttgtatctttagtatcgacgtaaggctgcgtgtaacatggaacgaagatagataggcaaggtgcattcagcgtgtcaaccgagacggatggcgaagttggggtacttgaaagagaaggaaattcaacgaacaactccgaaccgggcagctcgactcttcctcttctcaatctcctcatctatctctttgttggaagcggtcttctcctcggatggggcagcgacagatcctgtcgaggtagtctagatggttcaacccgatgatcagcaatcactcgcgtattattgtctgataggagggggcaatctcaccttctcagctatctcaactgacgatgcggcatcagcagcaggtatggatgtagagatagtctggtttgacaaacgagattgaaaagaattacgagtagagtgtgaacatgacgcgttttgttcgatgaacaatatatccagatcaaatctatgaacctcacctcttcagaagtcttcgtctcgttggaagcagaagcagtagttgagtcttgtctctctatagccttcataggctccgagttcgagttctcagttgattcagagttcaataagcgagcgataagctcctctttccgaccgctcgtcggtaggtttgcctcagaaaggagatgtttgagatcgactactttgagtgctttcctgatggataggtgaaagcaatcggagttacagacataaagaaagatttaaccttcgtcagaaacaatacagatccacaccctaagtatttgtagagctactttacaattcgtcttcggtatgggcggccatgattgtaatgtcggcgatgataatgaggggaaggtatgagttaactctcaacgtcaacaatgctgaagaggaagcgaaagatcgcttacgtaatcatgcttacaacgttctcagctcacaacattcatttcaaccatcatcatcatcatcaccaacatacgatggctttcgcgttagcaacctcagatgaggtgtttctattcaagacacctgatgttcaatctctttcgaatcttccagatcttcaggcgcttccttccaaggttgctttttcgaaagcaggcgagtttgtgtgcacgaccgagggaggtgctatctgggtctggacagatttgtcgaaactagaagagagagcgttgatagccagcaaatccgaggttcgatacttttctatactttgtgttacgctcgcaccgctcccttcatttgtattgacgattggatttctaacggcaccgtcggttcaagggacctatatcttgtttgcttctcgacgtcttggacggattgtcgatcatctactcccaaggctcgaaggtacctatcggactatctcactatatgttcgacagctcgagatgattgccaactgattcgtggatgacgtctctcgaataggtacatgtatctaacgcccgcacaggccagcatgtcaggacatttgaagtaggcgactttctctcgcgcgcgtctgaatcataggagaatattcgaacctaattgatgacccttcatgttccctctcttatatcggtcagcactttacctcatcggtaaccgacatatctctgggagtcgatgaagccttacttgctgtaggatatgcgaacgatccagttgttgtattcaacagacgacatggatctcaaacgatcatccctgttcagccaaaaggggtacgctttgtactttctctaatcgttcaagctctcgtctgatattggactttctttattgttcttcgaaattctaacaaggaagctatctacaagcatgtaggcgctctttctttgctctcatcacctttctagaaacgacgtctgcttaccaaattgcgtgtatatttatcagttgtcgatttcatccaactcggcggaatacgctccttgttcttctatcaggaagagatgaattattagtgttcgtatctgaccttgattctgcttccttctctctcatttgatggactgataaaccattgagtacttcttaacttctttgacgaacttgtcgtctctctctagatatgatattctcaaaccgacgtctcctcaaaagattatccgtctagacttaccttcaccgtcgtcacttcagtttatcgggaatgcaaccgacctggcattcaactcactaacccctcactgtgctatcgtgacagatgctgggctcttggtcaccgtcaacgctgagacggggagtgtgagagcgagagagatcagggttcctttaaccagtgtcgtttggagtgggcggtcagaggtcctcataggaaccggtgagtctaaactctctactcttagaaaactatcaacgataagatttacttgatgaataattctttacctcttcattcgtaaatgcgaaccacgtcggaagaaacgggaaagcttctcagacgagacgttcaagacgagtctgtctctgaagatttcacgattagcgccgagggagcaaccattctttctcttgctgctcaggcaagttgaacgcgacctggttttccgtagagtgatttcgctcttggttttctgatcctcatcttctctctttgggccaactgtgcgcgtatgctttcttcaacggaaaaaaggctaagacagttacccggacaagtcgatcaaagcccaccacgaagactggggttgaacctcgtccaagaccttcatccgttgtagttccacctatttcatcaactcacaacccctctagtcgttctagttcacggcctaccagtgcacctctgactctcaactcggcggacgacgaacctttggctcttcggtcttcttcgccttccctacctgccctaccacccgctcgatttcgtccgatacaaatctctcgcccgtccatcgggactgaatttggaacagaactaacatcagttggagcaaggacagaggcaggtacaaggcccgaaatcagaccaatcccatcgacttcctccatttcggtctcttcatctgtgtctgacccaagacgaggatttccttcaccttcttcgcctgttgggtcgactagaagagaacgatcacactcgcccccttcgcctcgttccgaccgatcaatcggagaatatcgtcgagggggtgagagagagggcgaaggaagaaaggatgagttgatatggatgctttcgaaccaaatcaaagatcttcatctagatagtacgttgttcctctccccctccttttgtgcgcgcgagcggggtttttgtgtccgtgtgtttttgttttattttatcataattcaagctgatcaatttgaatggacccatattctgttttctcttgtctccatcgaacacaaacataaaaatagtgcttcgctcaagaagacaaacgaagctcgagacaaaggcattgttcgatcaaacattccgtagactagacgtcctccagagagagaacgaggctctaagatcagagatcaacaggttgaatatgagacctgggtattcagatgatggcgagaatggaggaaacgatgaggattcaagttgatctggcttgattacgatcggatttcgaccgaggatcaaggggatttaagctcggcttatatatccacatatacatatacacatacatacggccatactttatgaagataataaagaaagatgataaatggaacataaaagggaagtataggcatgttttcaccaaacctgaactcgaccgtctcgccagaactctccggtcacgttattgatatcatccagggcaagcatgacgggcgttttggcaccttgttcgagggtcttcacaccgccgggcgccatctggattcgtatcagatccgcatcaaaagaaatatgaaaatgatgacaagggtgatatggattgagagggaaaaggatggtcagttggagtcagaacataggggaatgaagaagatgatcagaagcggacgaacgtcagtcttgacgtagccaggacagcagttgttgattagcattcctgggttttctcgcgcggcgattcgagtgtacgcttggagagcaagtctattaccagagtaagcgcagagtgaaagagaagcagagaagaaggaagcaaaagggagaatacgatgagttcgagtcggagcacatgtgtgtacagacagaaaaaggcgcttacttgctcatcccatacccggtagcaggccatcccttcttagcatagtcgcctgcgctcacatcgttctgatgtgctccaatcggcataaggtgagtctacaagttttgtaatatgatagacagcgaaaaggaaggaaaagctcactttgaaatcggcaacggccttttcgagttcttcctccgtcaggtcgtcttttgtaaatcgggcgagtacgctcgggtctgtgatgatacctgatcgaccggcagtggaccccacattgacgatccgggcttcggtcgatttcttcaaaaggggaatgaacgattgaatgacctgtacataatgtcgtattcgtcgtgtatgcatatagaaagaaacagaacatgtttaagtccgataagatcgtgctatgaatatgagaaggcagtggtaaaacatagaaatcggacggacattcttggttccgtgataattggtattgaatgcataatcgacgacctcacgatcgaacttgtttccagagatcgccactcctgcgttgttgattagtatatcggtctgaagcatcattcgtttgtcatcgtttataacagaaatcaggtgaacatcagtgggagaaagatgtagatgctgatgcgagaagcgcaaacggactaaccttgccagactcgctttcgactctgtcgacaaattttctgatgctctcttgattggatatatcgagatctccgactttgacaacatgatcgcctacagatttcccttgaagaacatcttctaacgccttttttcctcgagatgaatctcttgagcacaggtaaactgtgagcggctggctctgcggcgcctggagaaggatagactttacgatctgaaggccgatccctttatttgctccagttacgacgacgactttgttgttcatgtttcctacgaagcgtgtgtatgtgttgaagatgagaaagaatgtccgaacaactctcgactcacgtcatcaaaaacccagatcgatccggatgaaggatactaacggcagtcaccaactgttaaccctaacttgacccccgtccacgcccttgcccgtcccgccgctgagccgatccgctcgatcagtcaaccagttgatcacgcacggacctcctcaggtacacaaacttgtccctttatatcagctaccgtcgagacgatctgttctgccaccaatctaatcaagtcaaccacccactcaaattattaaacacctcattcacctctgattcaatcgatggctacttcaattcgcctgccgagtgtgacgacgataaggaatcttatctcagcatactacatctggacaaacatcatcctcgcctcctacaggcacatcagagccagaggagtggttggtcacgaatcttctcatcatgtttactcctctgtatgtagtactgatcggcatcaactctttggcttcctgaatcagaaaggcacaggcacagagatctacctgacattccagcaggcaagttctagactcttccttccactcacccctgccccttttcgtccggctgtcaggcaggcaagttgacagcaaactttgaaattttccatctttccagttcatcgtctctcttctcctccgtcttccgtcctcgcaggccaaagtaaaggcagagttgtcggcgcttcgatcaacgctgaccgacaaactcgctccgccgaggcctcatctgaaccgaaatctaagacttcccgcttccggtttgacgaaggatgttctcatggcggaactcgagaaatatgctgcccttggctcgtcagagtctgtcaaaaatggaaagagtggagaggactggaaggaaggtagagtgtctggcgctgtgtattccggccagaaggatgatgaagaaatcagcgtgctcgcgttcgagaagtttgttgtctctaatccggtgagtgtttgttcaaagcgtacgcatgtatggtacatgtccgagcgaactgacaatgaaacaccattcacagctgcacccggacatctttccttccatcaggattatggaggcagagattgtggccatggtgttggacatgttccgaaatccggacggggcgggaacgactacgagcggaggaacggagagtattcttttggcttgcaagacggtatgttccagacaatccttgtcattgtttgttactggacacagtccacaacatgtactaaaagaaaaatatattgaaacgaattcttgggtaaaaccggaaaaaacaaagtaccgagattgggctctgaatgtgaaaggaatcaccaagccagaaatgtttgtaacccgtttcttcaactcttgtgctatggccgtctggaactcgtgctaacatgatacgccccacctcctgtattacccggctacaggatcgtccccgcttcggcacacgcggcgttttggaaggcttcatcatactttcatatcaagcttcattcgattcctgttgatgaaaagacgcgtaaagtcagactggatcttgttaaacgggcaatcaacccgaacacgatcatgctcgtcggtagcgcgccaaactttccagatggcatgatcgatgatattcctggacttggcaagctcgcgacaaagtacaagcttggccttcacgtggattgttgtctcggttctttcatcgtacccttcttggaacgagcaggtttcaaaacggagccgttcgattttaccgtacccggagtcacctcaatttcatgcgacacccacaaatacggctttgctcctaaaggaacgtcggttatcatgtggaggaacaacgagtggcgaagccaccaggtgcgtcttgtataatattctctttctgtgcagttgtatgggaaacgtgaggttgattgaacgtactcatactaccccgttcatgtagttttatgtactacctgggtggaaaggggggctatacgcttcacccacacttgcaggtatgtttgatatcgtgcctgtctggtcaagattctcgttttgattaccttttaaaacttgatctcgcgcaattctatctatatatatcctctaaactttcttcaactcgacaggatcgaggtaagcagcctgctacacttgtataatcatatcacgagaggctttcagctgactgatttcgccttcctccaaagacctggtgcattgatcgctggttgctgggcgattatgatgtcccgaggaatcaagtacgtctccctttcaacctttgatcgacttatcaccttttagtccacttaccgtattttctgttcttctagtggatacactgaatcctgcaaaaagattcttaccacagccactatcatcaaacaggcctttgtgtcctcctcaatcttgagcagagatctctatgtcttaggagatccgataagttcagttgtagcgttcaccagcaagtcggacgaagtgaacatcatgttggttggcgatcggatgggtaaaaagggttggcatctgaacgcgttggagggtcctgcagcgctacacatcgcttgtaccgtacgtcctttcttctcgttggcctcatctgaagagacgtctgacccttgttgtgctctgttgtttgttaaataaataaataaataaataaaaacattctgggatatagctcttgacgaatgcagatggtttgatcaaagatcttgagagcgttgtccaggaggtccgaaccgctcccaaagatgaaaaggatggcacgatggttcgttctcctcttctctcgtcgttgtagtttttgcctgtcaagaatgaggctaaatctatggtgtttctaaataggtcgccctgtatggtctcggtcaaagttcggttggctcgacgatcgttccagaagtagccaagtatgttccttgcatccgagtttcaagtgtcaggccgatcgctcacctattgatcttcctctcgtttctgcttctgtccttgaaaagaatctttttggagaccctctatctagcttagaagatcattcctcttcttggtagattaactcctgcctttacggatcccgtctcttgaaacctttgttagacatccctttccgataggaataacctattctcgttatcgatgtttccagtcccagcgcaatgctttccattttcgatctattcttttccttatatactttttttccgggtctccagcctctggttcgtcctatcgttttgctcccaagtcagggcaacgagtttcttcagctcaggtgaaagaaaaaaaaccgggaaggactacgactacattcatatttcatgaccataaaacttagacaatagatcaacgacgactgcctactcctgacgagcgaatgggtaagagaggaaggaagaaagaaaggaaaaaaaaatagaacaaagaaggaaaagagaagaaagatctgacgacaaatcg

SEQ ID NO: 1307 - DNA, 4978 bp, Xanthophyllomyces dendrorhous
ggattaaataaaaagaaaggaagattggggaaaaaaaacggatccactcctcatcccactaccatttcctagcccctcccttccatcccagtcccgatccacgtccacaacactcttcccgagcccgagcggcccatccggtctacacacaaacgagatctaacgttcaagctcagttcttcttccaattaggggcccagtagtccgtccctagttcgctcaaaggctgagccgatcggattggtccgccgtcgggttcaggcagttgcggttgtagttgtgattgagcgagattcgaatgcgtcaaataatgcgattgggatggcggttggggatgggattgggattgggtggaaggaatggagaagaatgagttggaggtgataggtaaggatgggggtgggttgtcttctgtcggttttctagtgaacgttgatcccaagctaaagaaccgactatgggggtttcacgatcgtttgttaaacaaaaaagaaaaaagagaaaaagacacacacacatatattgagcattcaaagtcgcaagaagatcgaataaaagggaaagaagaagaagaggatggaccgacctgaacgatttccgacgactcgttccctcatccggaccatctgtcaacctcggtctatcggacctccaacctcccgttctgcccccgttcgggttcgcgttcgaaaccgcgtccccgttcgcgttcgcgcccgcacccactttctcgccgttcccgccggggccggaaacagaagacgagctcagatcaagctgactggatcgaggggtcgtcatgaagggcgtcgcggttaatcttccggaaggaccggagaggatcctgccgttcagaccgttctgtgggtaaaacgtcggtgagttcggcaacgagttctcgcccgctcccgacccggagccagagaccgagccggagccagagccagaagtagagttcgaaccagagggaccgttctgattgttgccaacaccgccacttccacttccacttcctcctcccccgccaccacttccaccaccacctccaccgttgctaccgttcgaagggctttctaaacttcgactgctcccattgttcaacctgagcgccctcgtcagagcctccctctccgcggcagaaggcgcaaaggctctgatggacgaaaagaacctggagcctgctcctccacctggcgagactgcgtagtcccccgggttaccggtcgacgaaggatgggcgggatgaactagtgattcagacgacatcctgccaggaacagagacagaggcagaggcagaggcagcagcggcggcggtcgtgctgtttacgttggcgttgctggcagagatggtgggcacgaaaggggctgagttgacagagaggtctgacgaaggccggttcaacacgggtggctgatggacagacaccgggctcgaatgagacttgttcaacccggtcttcaggctgaacactctcgcgtccgggttgagtttgccgttgtcggccgtgctaccagggatggtggaaagggtggcggtcgagttggaagaagacctaggtgattcgacgaacgactgatcggaactcggaacaccgttgacggagccagcggtagggccggagctagcctcagcggtggaagaaggaaaccaacgtctaggagggaacctcgacaacgtgccggcctggccccttgctttactctccctcgattcggctcctgacttgtccttgttgtccgcgcgctcaccttcggttaccggcccaccaagctgagtgggctctgtgggcgagaacgtcccggaaatacggggcgagatcgaaggccgcctgaacggctgcatgctcgagggtgggtatcggtctgaatcttgcggatggccgccgccgccgtcgtcgtcggaggagcctcggcggagggcgaacgtttccgcggacgggactaccggtgtttccgccgacgagggatccgacaggaacgacctgcgctcgtccgggaacgctagttggggcgacagaggcagggccgagtcttccgtcgatttctttcgctcgctctggcttcctctccggtcgtccggaacaccgggcggggtctgcctgtcgtcgttcccaaccgagcctcgggccgacgtagggctaggcacgacggacgacacaccggaacgggtgggttgatcggagaagaaccggccgagcgagccggttcggttgtgagttcccccgtaggagtatccttcccggctttcgatttctgcttcgctctcgctctccggtgtcagaaggccttcggtactgatcgattggaacaagcctctggggagtaggtctgagaacgaagcagagagagacagaggggaggatgattcgtcctcgctcgactcttctgtcgggacgggtcgaccgaacggggcgtaggtcgatcgttcccggtcgtgaggaagggcaaggttttgggtgtgggtgtgggcgtgggtgtgagtgatgggtgggttggacgatccgtcctgattgtgaaggtgatgatcctgagcgtaggcaggtttgttaaatcgagatgaataagcgaccggtccaaagtcctcgaacccaaacacgtcgttcagagcggacgagtaagccgggaccgggtcgttgggggaagaaggatgggtgtgatgaaggtggggaggattgagaatggaaagcgtggtggatgaattgccagaggtagagctcaggatcgaaggagcggcatgaccggtgccagacggggcggccggaggaccggccgagagagaggtcgggtcaattgtcgtcgaggtcggttgctgctgtcgtcttcggtcaaagagggaaagagagagtggctgaacggggagctcgtagaacgcagagggcgccttgtttgaatggatgcgagagagaggaggcgacggatgaggagtatgcgtttgggatgaccgaccgtttgccgaggccgacggatatggtaccgtctgaccgacggcgatcgagggggaagacgaggatgaggaagaagcagaagaagtagtaggagcaatagcggcagcggcggcggcggaggaagtagtggaaacagattgtgcggatgaaggggaatacgaagaagggaaagaagacgaggtggatatcggcgggggtggctgtggtggaaaggcagactgggcgaaccgttcgttctcgatcgacctcggctgagggaacgaagtgaaggtattggcgaaccgtttggcttgttcgagcgctgtgagcgcttcggttttggaagtctcgaacgcgtcttcttcttgctttgtctggatttccaactctctgacgtctgaacccaactgggccaactcggactctacctttttcagttcctctcttttcgaactcgtcgccttttggatggccgagcctttggtgttcatcagctcgtcgctcgccttgatctcttccctttgggcggccatacggtctctcgcgttcgccagccgatcttcgagctctctgatccggttcaacactgcttccttcagaccttcgatcacccggagtttcttctctgcctcccgcttgagtccttccgcctgtcgtttcccgtcctccaacaatttcgtcctggccttgacctcgagccgttcgacgtcctcgtccctcttccggacccggagttcttccaggttggccatcaggctcgaatgggcagtctgggtctgggtggaaaactggaagagctgggcccggaggtcggtcgtggtggattgggagaggacgagggcgttgtggacctcggcgagggccgggttggtcgagagaaccgaggggtcgaccgagggaatcgagatctcgggaaaagagccgggcgcgatcgagtgaggtgggaatgtgaacgactggaacacggttgaccctgccgcgaccgggggtggggaagaggacgacatggtggttgatggcgagaaggatgaagtgatagtagtagcagcagccggacctcctaccacagttgacgaggcaagggaagggaatgacgaggacgtcaaaagggcagagggcgcgttcgggttggatgaagcagacaccatggaggattcgatcaatgaatgattatttgagctagcagagggatgttcgaacggatgactgccctcctcgttcctctctgtggacgtggccgagggagagagagaaggactggttgacggatcctctaggctgggttgacgagaccgattgttggctgaccgttttgtcgaacccgaacgagagagcgcgtgcggttggttcggtgcgggaccgttgcctccgggtgaaggggacgagaacgagtacggaggaggtagttcgagatctagagctttgttgtgcagaacttgaggtgtgaagggggattttattttttggacgattgatcaaacatggtgacgcacaaggtcaatactcagggctccagaccgatcttttcgggtttctagttgccaatgttgaaagacaagaaagaaagaaagacttaccagcagctaccgattcttcgcttccatccaacgccttcaagtcgacgacgccaaacgtcgtgccatcctttgagctaccgtcgacctttttatttgactggttcgggatcgtttgactgggtgtgacgactctaccgccgaaccaccatctaccaaaggcgccgatgaaccagacgccggcgaggacggtgtcggaatcgtcggttcctccgtccggccatctcggtttggttgatttccgggggtggtgggaaccgatccggtctgccagtgcgagtggggacgaggtggtggatggagagacggtaacgatggagaagagtagatgatcgcgcagggcgtagggaggtgtgcggagggcgatggagactctgttggtgaacctgaacggggcgaaggggccctgtctggtggccgacggattttttgactggctcgaccgggtttggcggaatgtgccgagggaggaggagga

SEQ ID NO: 1308 - DNA, 1046 bp, Xanthophyllomyces dendrorhous
gagagagggagagagggaagtggaaagcgataggtaacaatgagtaggagagaggataaaaggaaagaaagagagacgaaaggtagaaagaacaagacaagaaggagggacggaaggaaggattagaaaacaggagggaacgcgagacttaccaagacaagccaacagacagagaaagagagtccagacgagggcctgcctgagctgatggaacgcagagtgaccgagccaggtggtgagctctggggagcttccggctgcgagtctgggaaggaagccaccgacgaggccgagtgttccgtaagcggtccagcccatgaggctcgggcgccgacgggtgccaaaggttgacgggggctgggacttttggaggagcccgactgtctgtttcgacgggcgagacagggtttctggtgaggagatctgttgtggatctgtgggagaggatcggttgttggtggaccaagcagagagcaggaatgggagtgagggtggaaacgaatgaagagcaggtaggttgtcgaggtcgacacgaacggagggtgacggccgggtaaagttagagtgaacgggaggaggtcgagagcgagcgagaggatgattgaacgggagcagtgaccggcacgggggatgtcgcacacacgcacacacaacggaatgagacagaacaaagcaagcaagagcggatggtcagctttgatgttgttgctgccgtcgtcaagagatcaacctgtttagactcgttttgatgatgggattttttttggaaaaaagaaaagaaaaagaggaaaaaaaggagaagaaaaagagcgtgtcgttcttttcctcctcttgttccttcttccccggctagaaccgggtgtgtgaatagaatgaaaggacgatgcttaacagggtacgaaccagatggcaacaagggcgagcgagcgctgagtgtgtgtttgggtgaacggacggacgaccacttgacgagccgaacggatgggcgagggtttattgatgttgtaagacgagcgagcgagcgagctaaagaacgaacggtgaat

SEQ ID NO: 1309 - DNA, 489 bp, Xanthophyllomyces dendrorhous
tcggctatagcgcgtgggggggttgggggtgagcgctgtggttgtatgtgtgttatagagacagagaggggcaagagaggcaagagagcagagaacacacgctggggagccaagcgagggaatgtcagggagagaacatgcttaacagagagcttcctcaacaaagaacagacaacatccagaacgggcagcctgttgggttttgtgttggccgttgtgtagaattctgtagtgaatccattagggcgatttgtagtgtgctttgtaatgctctgcgtagtgtactttccaatacacttcgtagtgcattttgtagtggactccctaatacatctttcaatacatctttcaatacaccttcgaatacaactccctaatacgctttgtagtgcattccctaatacattccctgatacactctgtaacacgcccggtaacacgctcccgtaacaaccccccaccccccccggtaacacatcctctgccaac

SEQ ID NO: 1310 - DNA, 468 bp, Xanthophyllomyces dendrorhous
aacacatcctctgccaacgctccctctctctcccccactcgtccaacagagcgttctgtcaagttgtctagtctaattctctaatgctctctctagtgcgttgtgtagtgcactgtgtagtatattgtctattgcgttgtctaatacattctctagtcctttctctagtgcactctccaatacattctccaatacattctctaatacacactgtagtgtgttgtctatcacgatttctattacagcctctagcacactttctaatagaatttctgttacaatctctagtacacttcctaatgcacttcctaatacaatctctaatgcactctctaatacaatctctaatgcactctctaatacaatctctaatgcactctctaatacgtcactctaatacgctctctgtcacactcttccatctcgtctcatctcatctctctcatctacacccccaccctcccattc

SEQ ID NO: 1311 - DNA, 1277 bp, Xanthophyllomyces dendrorhous
actcactcatgaccaccaatccgtacactcccctgccactcactgaggagtcggcagaaagctccctccctttgtactccaaggactctcgtcccgaaggagcaaccccatcagaccagccagcctcagacctatcatctcatactcatctggccctaaaaccaacaccttcgggcaagcgatacatgtctttcagagtcgtctggccattttttggctgggaacgcgccgtgatatgtgaactaggtctcaccaagaaggtaggttctttacgttcttctgggcttggtatccttttccacatttcatcattaccttctcctcggctcgtcaatgcgtaaaggaaactgtcgagaggttgcgctcggcccttccagatgatctcagccgagaatccgtcgaacgaatggacttccagatcccggtgggtgagggttgggccgacgtgatggactccgactgggatgacctgataattggataaacgttcaaggagatcacagtggaacccgttttgacatcgagagagcaacggaagcgttagtcaatcttacttctttgtcatctccgaggctctcttctcctttcccttgtttcgtatcgccttctatccgtctttaagcgtcacagctgatactgagttggttgcgtggtctggatgatcagcttggctcttagctttctcggtgatacttatcgcttataatattggtcgtgggatttgttcttctcctacctgaaacaaacgaatcacaaaaatgaacgatctcctgctttccctcaacaaatatctctcgctagcactgcacactctgttctgtctgtttgttcattatcacatgtatctatatgatgtcccaagagcgcacgtgttttacaacttgttttagctcccacccgggacatacctctacatgtcgtgttgtgaagagggcctgtggaggtgaggaagtgaagaagtagagaagattgggtgttgatggactattctaagaattgcctagcgatatttcccaatacgattttcattacgatccctaatacaactcctaatacaatttcctagtgcaactcccttcggagaggaatcaccctcaagggggacgaccagaagaccaacagaagaccatcgagcaaacacatcactctctctctctcttcaatctcttggtcatcttgaggacacacactcactcacacccccgcttgctcccaagagataaacgttggaaacagcctggtgcgctgaccacagagtcgccccccccccccccccc

SEQ ID NO: 1312 - DNA, 46318 bp, Xanthophyllomyces dendrorhous
gtcttcatctgatcacgccaaagaaggggaaaaaaaaacaaacgcctttttttccctcgactttttctcttccctcctttttccttctccctcccgcacacattcatctctgtccatctggatcccgtcgccccgtccccatccgttctgctctctctccctctctcatcctccctggttctcttccctgttctcttcctgtctcttcatcgagacctttcccctcttcgtctcctctcctcgggcgatctcctccctctcctttatcggcccgcccgctcctttaatcaatctccaacctccccccgatgtccaagaccgatgacccgacggtcaacggtcaagacctcgccccggctctgacatcctacgactttagtaacggtcagactcacagccatctcgcacacaccacccgaacggtcgatcacccagccaaccctcctaccagcacgcttacgaacacgtcgacagtcgaccgacgcgtctcgacaaaagatctcccggacggatcgctcgacccgatgccatcgtcgtctggtccctccgttctggcggtgtcgccaacagacccatccatcttgtctcttcagccaaaaaagacggtcccattgataaactcgagcctggtcgaggaaaccccaactggttctggttctgcttctggttctgcctcagcttccacctctacgccaagccctgcaaaacaaaacgatccctcctcttccttaccagcccacgaatcgatagcccccccgtccaccacgtcgtccgcacctcggaagctcgatcaaaactacactacctcggccagcacggctacgaaaaagaagaagaagaaaccgttctcattcgcttccttccttccttgtctgtccacaaatgaccgggattacgatggagcccggcagcagccctcgtctgggtcgacccgacccatcaagtcttcctcatctgttccacccaccacgcctgctgctgctgctactaccacatcatcctctccctcgacttcggctcagtttccatcaggcaacctagccactcccatagcggcctcggccgctctagagccctcgtccgtccccgagtcggaacacaatgatctcaactcacagtcgacttcgtctcacccagccggacaaacggtaccgaccgcttcgcgaactcccgtcgctccccgatcgttcacccaacaaaaccaaacagaccctccccaggtgatcatccctccgccgaccccggtgaccgcaccgctggatgagaccgaaggcttaacctcctcgtccgtcgtcccccctggtttcgacccggcagcattcccaaacgcccactttcaccaacagcagcagcagcagcagcaacaagaacaacaatcacaccatcgccatcacccttccacctcttccaatggctcttcatcccaacatcctcatcaatcaaccgcgtacacatatcctcatcagcaatcgaccagaccgtctacaccatcacccccagccggcgtcctcgccacctcgtcctccgcctccgacagcttcgccgggacagactcggacgatggcaggcggtacgatagctcagacttagatcgcgacgcagaagccgacgccagtgagggcgagggcgaaggtgaactcgaaggcgaaggtgggattctactggacgacgaggagagcgacgacgatgtcggcctgttgggaggggttgggattcctttgggacctgtaagtttctccttgtccttcttcgactctgcattcgcgctcaccgtcatcctgaaacgtcatgctcaccttcttccttctcttttcttccttccccaacaggacggagaaccgagaccgctcctccctccgctcggtagtcaccacaacggccggaaatgtctcgtgttggatttggatgagaccttattacattcctccttcaaggttagttctcttttgtgtttctccttttcttccctccctctttcctctcgtttaatccatctcgcgtgcatcaaaagggtagaactaatgaatcattcttcttcttttatcacttcaaaaaaccccctgacctggtcgtgctgcctagatgattccccatgcggactatatcgtcccggtcgagatcgagtcccaggtgcacaacgtgtatgtcatcaagcggcccggagtggacaactttttgaaaaagatgggcgaagtctacgaggtcgtcgtgtttaccgccagtctctccaaagttcgtctttattccttgccgtccctttttacttctctgccaggacactccctgacctttcctctctgacctcttccgcgcccacacctcttctctgtccagtacgccgacccggtactcgacattcttgacattcaccatgtcgtcgcccatcggttgttccgggagagctgttacaaccataaaggaaactacgtcaaggttcgcgtcgtttctggcctgttgtacctgtgcttttcttgatctcgatgctgacgtcgtcctggtcctcgtttcttgtctcgctttcttttctcttctccgcggtctttgttcccctgtcgtttcgttctgccttttcccacctttccttacgttcaccatctgcaggacttgtctcaactaggtcgtccgatcgaagaaacgatcatcatcgataactcgcccgcgtcgtacttgttccatccgaataacgccgtgccggtctcgacttggttcaacgatccacacgattcagagctctcggatctggtcatgttcctcgaggacctttccggcgtaccggacgtcagaggtgttctcgacggagggatctgagtaacgcagacctggggatacttataaacaggaagagcgagaaagtgaatcttctttttctttcctacgggatggcaggaattaaaatggggagggaaagagaagatttctacaccacggaaggacgtgacgcagtgggtttctcctttgtggaaagctcattcgatcatgcacatgttatcatcattttcccttctttttattctgtcgtgttcatcaatccaattcgatgctcgtttctcgatagatcgcgtccctctccttgttcttttcttcttttctttgttcttatttgcctcgtcaatccggtcagccgatgacgtccggcaatatccataatacccacacacaagaccctcttcttttctctttctctctgcgttcacacttgtttcctcgtctcatgtttcttttcttccgacgtcgtcatcgtcgtcatcgagggttacttctttttaattttcatatgacctctcaagggagaaaaaaaaacacctttgcaaccctctcatctagctttactctaccttactctactctttatttacccgatttacgcacactcacatgcatacgtatacgcaaccatacgcacacacacacatatacacatacgcgcatgcatgcagtactctcctcttccagaatcttaattttaaaaaaatcctcctaataaagtaaataatcagaaccaaaaaaaaagctctttcgtctgttggtttgttagtttcgtgtttcgtcccctgctgcttcggatcgcgcctctgtctcatttgtccttgttcctctctctccccatgttgtctgagtttataccctttactctttcctttttttttcgttgcttcctactccctactcgcgactcttttcttcttcttcttcgtatctctctctgctctatcatgtggcttatagggtctccctttttacctcgttcttttcgatctaactctgacgtccggctgaagggaaagtccctcgtgccgaccgggtccaggtctggcctgctccataagactggccgatcgatcggccgactgaatcaaacacccgtttcgcgcaagactcgacgtacatcagatagacgtcacaaggagggggggagggggttccttacatgttagaaacaatgagagcgtgaatatatcgagacgttttggacgggacgggacggaacatcgtctggctctgcgcgtaggtctcgaagaggacgaagaagaagaagaagagaggaaaggtccttctgagaggacatgtcagaggtgtccttgttctttgtttaaggtgcggtatacggagtttaagaacgatatcaaaataaaacaaacagaaaatggactcggagaaaagaacggatggacaaacggaaaaacaaacgaaatgaaacaaggtattgcaaagaaagaaaacatttgggggggtttaaagagagattctcggcggaagaaaaaaaagcatcctcgagggataattgttccggaaagaaagggcggcactcagtagagatgtatatccgaacgaaccctcactcgaacttttcaaaaacacgttttaaacaaaaaccgacagttggaaaatccagagctggctttccatgagggacagcagacttccgagtgaagagtggggtaagaaaggaggggtaaaatgaaaagcacacgacacgtggcttggctggtgtttatcggtctttttccatccccgtgctttggatcaaggccgtgttggtctttgtgacaaaccaagagcctgagtacatggcacgctcttcttgactgtgtgctttccatcaccaaaaagaactgataatgtgaaatatagaagaagaggaaagaaggatccgcgtagatcggcgtatgtcaaggtgggtataatatatagagcccaggaacattccctcaagttcctactctcggtttattctctagttgtactctaaagtatatacagcgagaaaatgagcggatgcaacagaatatcagagaactgcaagtgctcgatgaggagcaagagccaggcggaggaggaggaggaggagggagggagttcaaggtagtatccatgcgggatggttccgggcggttccccaaaattctgtaatcttccaatctgattagcgcggctttattttatttcaattcctcccaactctccttgcttcctcgtagcccatgctcctcccatcgcctccctgtattgaatggaatgaaaccgaacgaacgacgcctcctttcgatgtcttctggattcacgtggaagaaccgtcgcagcgagagggatacgcaatgtgttgtatctgttgactttcttcttttttagccttcattattcttccttcgttcgtcggggtttcttgtcctttaaaaaggccagcctcgttcagtcttcttcgttgaacagttccacaaaccacgacccactcagcatatccattcgtccattcgtccatccgaccgtctgatagattctttttaacactcatctatattcgtcgttctactcctctgcatccacttttctcttcacccgcatctttgtcccctctcgcacaccttctctcacacaagtcaaagaaagagaagaaagtttcataaacaataatataataaaacaaagattaaaagaagaagagtacagaaattaaagccatgtgttcgtctttgacttccgcccagagagcagtcgttcccgtgagcaacgctcttctcttctctttccctctttccctcttctttctcttctccttctcctcctcctcctcatgttgtcaacagtcctctgaccgaactaacccatggctcgtttcactcccaaccagtcatcttcatttgattctcctgcttccttctcttgctcatcaacaatgactccggttccgacgactcctataaaggcagaagagccaacggatgccctctcgtctgctctctccgctctttctttcattcctctcgactctcctcctctctccgacagacctgcactgcttcccagcctatcgtcgtcttcttcgatagaactcactgcgacctcgagttctacaggttcgagctcatgttcggattgttccgactgcgcacgaaagagcgagttgagagacatagaagagatccatctagatctcatcgcccaggccaacggaaaagcacacggcggcttccctggattccctctagggtctgtcggtcaaggcgcaactgccgctgcgggcgtaggagggagagctaggaagagaagagaaggaaagaagacgacggatgagtcgacgtgatcgttcggaaggttccacctctttcgacttgggcagcatcgtattgtttctattctttccatcatgcaacacaaaccatccggacccatccagcatttatttcgtttaatttcatttttctctttcaccatgaataataaacccccgtcatcctcttcttcctctccttagcgccatcttctatctcttgattcttcattctcttttctcatctcttgacctctgctcttcaaccagccatttccattattttctatcgtcatctttcgcatcttctcattcacgagttgtgttagtgtataaacttaaataccctttcttgttctatatatgttcttctcatcacatcgggtgttggtagataaagaacgaccagaaggatcaattacgtcataagctcaagagaaagaagagaggaagtcaacaacaggaacaaggaagaacgatacgaaacctaagatgaaaataagtgaaatcggagactgagagagaggaagtatgaatagagtttggtaatagaagagagcagaaatttggggtccttctcgggaacgatcgacctaggcacagcggcaacgatgatggtaaaggcaggcgtgagagatatacatttccgttcaagcagagcctccagaatagactttgccgaaaaccttgatcgcgaaaaagaaattgaaagaggaagaagagaaagtcagacttcttctattcttctctctccctgttagtagaagttctcaagaggcgaggaatcaaacagcccgacctttgcttggaacacgtcgtagagggagagcgcgccagcaccggctacacctcgtaggatatttgccccttcagaattttctccccatcagagtaacggtttttcgagcagatgatagagatcgagaggaagctgttagcatcatcgttcgatggaaaacaagggacaaaaagaaaaggcaggaaagagggacacaaaccggcccctttgaatagaacgctagatccttcgtgcttgacgacacttcggaaggcatccatcgtcgacttgtataccactccagatccagaggtcatcatcatcctccttcggactgatgcgttcgagatatttcaacaaccaagatgtaacgaaacggtcagaatcatcggtaggccaggctcaaggccgatgaagaacttgctagtatcgagagggtaagccgctagaccaccgatcgtagtcacaccccatccaaggatgaacgatgccaagaaggatccttccaaagatccggtcacgagcaccggcttgagagagtctgtccgtccatttcgtgcgcgaacagtccaagagtgtcagaagtcttcttaataagatagtccgagaagtggaaagacggcagaccataaagaccaaaagctgaacagcgtccaacagaaaagagtattttgacttgtcagtatatcaaatgaatattattaaaatggctggaaggtaagctcaccggttcctctatagacaatgatcccagcaacggagggctagtcaacccggaaagagaaagaaagaagagaagaaagcacaatcacacaacgcccagctctgccccgtcttcagcatagaagtctataccgatccccaagttgattgagcaacaaaatgagcttacaccaaaccccctgtaaagcccgatgactccatctgaagcaatggttttcctactgtagtaggtaaaccgtaatcatttagcgctcaaacccgttcaaacgaatcttttcttttatagagaagattgagcggaaatgatgagagaagacctactagacatcgatgatcccagtgaattgccgttcacccccacgagatgcgctctttgcatcggccgagagcctggtccgagcgtagtcgatactatatacaaagacgcctagcagacgacaagggaaagaaaagtcccacaagtatacatgtatgaatacatagtcaacgaatgtgaagataggatctgaagagttgcaagactgactggatgctgctcccgcactggctccagaggcgacgttgccggcgaaccaagtccaatatccctcggatcgcttgaacccaaatagggctttgaagtaatcctctataaagtagatgaccaaactcagatgaattgcccttcagttctggtatctgaaagaaagacagaaaagcagagcgtactgaaagcaaagttaagagcctgggtaggaaagtaaaggatgacgttcgcgccatttcctctccagaaagagatgatcccttcgttcctataagttttgactacgtccaacaagggaaaacatgatcgcgaaagagaaagagtaaggtatgctcttggattaaagaactccagaagaataaggaaacgaagaagcgccaaccgaatgcgtcggctattccagagaactctcctgaccggagttgaacgaggagctttactcgttcctatcaaccagcaaggagggagggaagaagtatcatcagaggtatactgtttctatgaaaaccaccgcaatggtactcacgagaggagctgcaacggtcttgctgatcgaagccgcgagacctcccattctaaaacccatggccgatatttcaatagatagacttcaacaaggtgtgacaaaccgggttgcgcttacagaaaatcaatctcaaagttggattttggttgagtagacatggacgaatgatttattgattggagatgttattcggcgttagttatgtgagatattgacaaagcttggtcagatatcagtttcatctcttctcagcacataggatacaatcttttatgtagcattttgaaacggaacggagaagaaaatcttgaaacgaggccgtgtgttcgtgaagttgaccacacacggtcaactccgattgtgcagaaggccctatcagtgaatttttggttcatactagagacacttcagcatgagcagttagtcccaattctgcagatctaatcttttccgtgttccgagagaccaggtgggtttggaatcaccatgtaggggagtgcattcaaggctcaggctgaaccaaaagtcgaagtacgtcacacagctcggacttggtcggatttgactcacgtggtgtcattcgccacctccgctccgatccagaacgtcagaggcacatggtccaaggaagatagtcacatctatcaataattctatattttaacaatcaatcgagctttgctagtggcgtttgagaaggaggagaaggcgttgatggcgcagataacgagaacgggttgttcattaacgttgaagggtgtatgatagtgggatgagggtgctcgtgtggccgtaatgaggaatgaggttcgggatgctgggcctcaatatcgacgactcgatcgccgacggcatggttggcataggagaggctacgtgaagacagtaaggaacgagcctttcttcagctttcttctagaatcactataaacccactaggggaaagagtgttgaacatactaggtattccatcctgtgacgcggaaatgatgggagaaaatcctgaatcaatatgtagctttgcagctcatgaacgaaataggaaacggaagtttctgacgtacccaatccgacgccctggaggaagagacctctatgtgccaatgggatgatggagtatgtaaggaatgctgtcggaatgctatgagcagtgatagtatttggttggatttaaagggtacaagcgtcaggtttaggagacatatgccgtctcttggctgaggcctgaaattaagacaaaaagggttccaactcacaaaagtacaccaccgctcaggtagattggccaaaatccaacttggactctctctattgcctcgtgaacggtcttgccctccatcaagctcatcacagacagaaacatgcttacactccacggaccccagatactgattgaatcagacccactaggatgagtgcatgaaacaaatggaccatcgaaagtcaaaacaaggtgacatacgtttggtcaaggaggacctttatataaaacataattcaaacgagtaagcctacaatgccgacagaaacaattcagtgaaagtctgaatgggtgaaagaagataccttgctaccaagagcactagctttgcttttgaactttattttatcaacgaacttgaaccactgtgctagtaccggtgcatggaagatgaatccatatgctgcgaaccttccggagcgggcgaactagaggtaagggatatgtgtcaatcgttaaacaatattcagcgtctctgaactcagttgatcggattttaaattgagaacaagaacctacgtcatgtttttcgtttctctcgaatatcctttgagagaggatgtccccagaagacatgatggtagctgcgactagtgacctggttgtatctagatcagaaaaggacaaccacggtcatatcttgtcagaacgattatttgcccttactgagctacaaagaggaacaacggtgtgtaaatctgaacaaaagtaacccacacggcctcttggccaattgaatattgtaccacctccagggcatgttagttcgttatatatgtttgagcaagtagtgtcgagtgagcgttgaaggtgagtaatgaacataagagaaaaaagtgaagaaaaaaaaagttggaaagattagataaagagtttttgataattactgttattcaaaaatacgcgtctaagctaagatagacgcgacgcgttttgaaccactgatttccatttgctcgtttgtgcttcttcaaaagcccagcacatcacccttcctactttctattcgctatgaatccgaatcggaagtcgctggcacccattgttcttgcgccgcacgcttcatctgttgctcactcttcttcctcgtcatcggccccacaattatccgcccaggattcttttgatggacgatctccttttgacagagaacgagatcgtctactgagcgagatttctaaggttcgttctctctatttgttttaattcttacttttcatgacatgggcctatagagttaacgtcagtgaatattatattaacaaccaccaacacaggacttcgaagaaatcttgggaaatgcaaacgggtacaacagaagattagaagaggcattgcaagtcggaggagggtttaagcatatggccgatttatggggtttgtccacttctatctaccacacttattgttcctcctcaattgtgtgttcttctctctgacatgattgtcgatcgttccatatatcgcttgcaggcagattcggggagctcatgagagaagtaaatatatcgcgttcttacggtccatcttccatagctgacatttctcgctcattcttaattctctatacttagggaaaggctgactacccagccaacccagatgatactcagatcacagacgcttcaacatcctccgtagcccaagatcaggtcccttcaaacactcgcttgaagggcaaacatacaaaataattatacaaatacactaactctagctctcggtcgtcaggaggtttatcatcagataggcacagagttgaatctaagagcttgttgagcaaacaagagatcaaatgtggcagagagtcgatggaaggaaaagcgtctggagcggacatcataccccttaaccagagagaaggcggcgatagctttctgtgttaagaattacatacatatgtttatctacccatgttatcaacagtcttgatgaatttcaagacattttgttgaacacgtaaagttacattctcgggtatcgaatcatgagcattgactggctggcgcttcgacagttccgtccttcgacagtatcttttccgtcttctcctctttcatcaacttcaataggatcccgatgatttttttctccagatcgagcaagataaactgagcattttggtttgtgtagagagaggttcgcgtacttgttagagaagatgggaggtcaagagagagaaggatctgaatagatagccgttttgctattattgatacacgagcagaagcagaagagtaagcggttgtagcatgaacgagaaggatccaatctcatttggcaagcgcatcaacgaacctattcttgaggatagtccgagagctatatcagatgacccggatctgaataagggtgtagccaccggtggtcgagtctatccatggcaagcagttcagaagagcaccaatgcaaatgtcaacattcaggaggccgagagcatatgttctacatcccagttaaacggatccttactcctacggcaggcattccacagctccactcttttcccaaattgacactgctggccctgccatccgaattggccgctccgacccaaagtaagagagagcctttaagacgagttatatgaaggaggaaagatggggaggatgggtcgagaggcggtaggagatgagtttcggttattatcgacgggcagttcatcttagcgcacaataggacgaggtcaagaaacgaaacgggatgatggcaagctaaatggctatatgtgtgtgatggtatatggctagaagagaggaaataacagaaaaggttttggcaacgcgcacgtgaatgatcagcgtcttttcccttgacttgtggcaatcccaacttgcatcatacgacaaccatcgactttcgacatcactttgctctcttcacatccttctttggtattttgatagagcacaccgcggtctcttcctgcaaaacatctctctatacattaggagatcaagatggattccgaactttctctcgaagagacaaacaagcttcgaatttctttgggtttggcacctctcggagaagggccggcaaccaatgaagaaggcgaggtcgttctcgataaagaacaagaggcagaggcgaactatcagaagcgaagagaggaagacacaaaggcagctgagaccaagtgagtcactttaggtttcttctcattaccccaagatgaagaggatgatatcggtctcacggttgaaggtggagaggattatcttcaattatacactcatcatccgttttgagataccatcagcactgaatctttactgaatgcttcctgttttcaaacagagccctccaggatcgaattaacaagtatgttccctcgtcctcactagtctccaagagacgcgtcttgtatctgatttttgggctacatatccttattctcacagagtcaagaacaaacgagagcttgcagcaaagttaacgggcactacccttggagaagagtcgaccggatccgctgccgcttgggcaaaacaggccaagaagaaggcgaaacagttagcagcggagagagccttggctgaaaaacgagcgaaagaccaggaagagttggatgagttagggaaggcagaattgtattctgaaagtaagttcaacccttttgcactatataccctgaatgctgtgagctatatcatcctttcaaacttttcactaattatttttcgttcttatttgtttttggtttcgtatagaggatttgagtggactcaaggttggacatgatgtagacgaatttgacgaaggagagcatatccttacgctcaaggattcacgtattctcgatggagagggtcagtatcttttacatattctccgtcttgccactctatttgacatggccatgttgtttcgtctcggttatggtttttcagaggacgaactcacgaatgctgatcttgctcgagccgagtttgatcgtaagaaggcagagctcaaaaaatcacagaactacaccggttacgatgatgacgaattcgatccctcaacgtcggcggtaggaatgaagaagaaagtgttaacaaagtatgatgtggatattgatggagagggcgaattggtgggtctaccttatcgcgaactgtctctgcgctcgcagcattcaggatgcttacatcagtatattttacgttgtggtgtgacttgtagggcttcagacttggtggaacagtggcacctaagaagcggcagttggcagaagacgaggacgatgagttcgactcgggtgtgaaccgaacacttcttgctggtggtttgagttatgaaagtgagatttttcctcaaatcactatcaaatctttcttgttcctttctttcttggctttgaaatctgaccgttaactgtatgctctgcgctcgaacagaaaacactgaggtgtccgattatcttcaggaaggagatatcggattcaagaagcccaaggtacgccttctccgcgttattagccctccgttttcttttcgccacgaaagctgataaatcacttttttgatattttttgaatactatggctgatcagaaaaaaaagaagcgctctgctcgagttattgaaattgatgaagaatctcgagctccgatctcatcaacaacatctccgaatggagaaggctcgatggaagtggacgggtctggttccggtccatccggcgtgtcaacgccgaacccgccggtagaaaactttgtggatgatgacgagctgcaagctgcgttggccagagaaaggagaaagaagaacaagaaagtcgttaagttgacagctgaggatatcgccagacaaggtacgttgttttcttatgaaccccactttatcgactttgttgttctatggctgggggagggaagattcttgttccgtcagctgacgtctgcaaaaccattctgaccccacagccgcagaacagaaagcagaggaggaggctgcagccgctatcgagcggaattctcgcgcggctgcgaatgacaacatccatttcgatgatacgactgaattcgtgagaactgtccaggctcaagaaccagttatcaaagtcatccggacgtccagggctgaagtcaaagaagaggaggcagacattgatctcaacgctatggctgccgatgggaataatggtgagggcgatgtcgatatggagggcgatgcagacgatgatgaggatgaggcactagccttagcggctcttcgacaaggaatgagtgtagctgagatgagggcaaatattgataaacagctcgtcaaagaagaagcgccagaacagaatttgagtgttagtacctgttgccattcaattcttggccctcttgtataacttgtcaactgtgtatatctggtgggttctaacttgtttctcggcttgtgttgtgatagatcggtactgctcaagaagcccatattggtcgaggaatcgccggagctctcagcttgttgaaggcttctggaaatctggccgcaccgacaggtgaagatgccgaccgagaacgaactcagaaggagcgagacctttggcttgctgatcgtcgtcgaaggttggctcaacgtgaattggagaggattcgggctagaggtgaaaacaaagaccaggcgacgagagagtacgagaataggatgagggaacagagggaagcggctgatgcgctcgagagcttcaagagttacaagccggacgttcaaatcgtgtatcacgatgagtttggtcgagagttgacgcctaaagaggcttggaaagcacttagtcatcggttccagtacgtcaacaattatttattcttcatctctgttatccaagagaaagaaatttcactgatgctcgtggttgttgttatcattccaattcctacagtggcaaaggttctggtaagggaaagactgataagaggctcaacaagattatagaagagcggaagcgggcggccatgtctatgggagatactagtatgagccgaaatttcaccgagaggcaggaacgaacaggagaggcctatatggtccttacctctggaaacaaagggtatgtgttgatctttccaaatataacacccctatcgtgcacgtctgacttgcatgtcctatttacaatatcctatcttcttacagcaccattggagaaacgtcggatggcaagaaacgaaagtagagtgtacagaacatacaaacgcgtgtgcgtcgggcttggatgagtctgtagtcttttgatgaacgatgaaggaggtctatgtcgtattcagatctgttgttgtccaaagcttcatgtgagaaatcttataggatctgtccgtgttcgacggggtcgctactcagacaaaccagagtgtcctattgtaaatgctacggaaataataacaaatacagagggttgatggtcaagaacatcgtccattgtgggggacacgacattcccggtgtggggggttttaaactattgtcgtcatatgtatgtagaataagagtaaccctaactttcccaatgtggaaaaacttgcagtcagatgattgatccttccggtcatgccggagttctccagccttaaaggcagcggggtgagtaagtaaatgtatcaactcacttccttcttatccatccatctaaacctaccttaccttttgtgtccgcgaaaataatcagtaatatgtcccttcgaaccaacttgctccgttctgctttgcgcgctcagcccaaagccatcccttctagggtgatggctaggcggtcgttcgcgtcggacggtaacttcaaggtgcctcccccctcccctgccgccgtcaacgcttccaagactccgtacgtttttatcgttttcgatctgacgtctcatatagtagagcagcagcacgtactagggactgatagagtcattcaactttaccttcacagttatttccttggaggattaggtcttgtcctcatcggtacgttcagaatgatcaccctgatcagtctttgacctccatctacggccaatcacagccctcggatttcttaacctctttatcgccatcttcatcaattcccttgtttccgccatatgtttgactgattcactggaactataacacacgccctgctcctttgaactcgtttaggtggtgcctactacttttttcagccgggggtatccgtcaaggatcagggcaagaaggttgataccgccgttcgatccgtcgccgcgtcggtagagggcaaggtcggacttcgacgaggaaaggaggactacgtcaaggtctacaaccgacttgctgagctgttggatgccgatgaggacaatgattatgacgatggtagctacggaccggtcttcgtccggctcgcgtggttcgttttgtcatgctttttgtctcagatagaccatctcttctgatgggtgatggagagatccttgtttgacttactttctctttctttttcttctttttatcaaaacaaaacacattcttgtttgcaggcacgcttctggaacatatgatgcagagaccaacacgggaggtagtaacttcgctaccatgcgattcgagcccgaagccaagcacggcgcaaacaacggtctgaaccttgccagggacagggtagagctcgtcaagaaggagtttgactggatctcgtacggagatctctggaccttaggaggagtggctgctattcaagagatggccggacctcacgttagtcaagggtttctgtctttgtttgtttgattccaacgcgaaggatatttccagctgacaaacatctcgggtaatcttgatcatgccctctcaggttccttggaggcctggacgaatcgatggattcgagtcagatgttactcctgatggccgactacccgacgcatctcttgcccatgatcaccttcgacagatcttctaccgaatgggattcaacgatcaggagattgtagcgctcagcggagcacatgctttaggaaggtcagtttatgctcatttcgtcgttcatatatcatgacctgggcactttcattgaatacaattctctatattgttctccaggtgccacaccaaccggtctggattcgacggaccttggaccttctctcctacaacctttacgtaagtgtttgttaagctattgacatgccaatgttgtctggtcttacggtctcctaacttgcgggttcctctatagcaacgattacttcaagcttttgtttgacgagaagtggtcttggaagaagtgggccggaccaaagcagtacgaggacaacagcaccaagactcttatgatgttacccactgatatggtgagttttcttgtgttctctcttcttgttggcatcaaatcgaaagttccaaaataaccgactgcatttatttattgtgttaggctatcgttaaggacaagtctttccgaaagacagccgaagcttatgccaaggatgagcagcttttcttcaaagagttcgtaatctctctgttttctcttacttccgatgttctttacagagagtagtctttgttgacatggcatgatcaacatattagtttctcggctgtgtttgccaagttattggagcttggtgtgcccacttcccagtgggcgggagaggcttggacgatgcccactctggatgagcaggcagaagctaagaaatcggcgtaaatgttaccatctctagttccgatctctgtcctgccctgttcttctcttctggtttatccacaggttccttgttttctgagctctttttatattttcgggtatttgtatcatgaacaaagatatatgaatctggtttgtttgtggaagacgaattcgtgtgaagtttggctatatcatgcacattgaagatggatgtcagacttgaatttcttttctcgtcaaccaagtttaaaaaataagaacgattttcgttcaaaaaagatgttccgagtagccgtgcaggtttaggtttgaagaaaaatgagaagtggatacctcaaaacagaacaataggatagaacataacaaaacaagagtatcactcttttagtctctatagagacaattcagatctagatactgattgagtatgcctgtgaaggtttgttataggttcatcttgttttcaccagttcgctccatcaattcggctcttggcatggcttttttttctttgggggcgatcgccaaagtttaatgagccgtacaggcatactctctacgaactccactgagttaaataaaacttttgaaaacacacgctttgagtgcgccccagaggtttcatccggtatcaaaaaaacaagagtgacagattcagaagagaaaaggagatcaatggaagaaacgaggatgtttgatttgaatttagcttcagcttggttcttctttccgtaatcatccattcaatatcatccggaattgaatgatcgccttttatccagctttatgggccttggcaaagagagtcagctctcttcatgcctaatctttctggctcaccggatcctcttttggtcaaagcttctttgatggtatcgtgtggatgatcgcggctcaggaggaatgtcacatatgttgcttgggtacgtgtgggatagcccgggagtttctctcattgtagatctttccaaaatacgcgaagagaacaacagagattgtcaaaattcgaggcctttttaatcctattctgtttaataaaaaatattctttctgttttgtagttatcgagtgatctgcaacacgtttccctcctcgaatgggtccttattcattcttagtcgacgctcacggtgggaagactaccgacgaaagacaaactggctaaaaacaaacaaaagcgggagagaacgggctgaaaagaaaacttaaatggaggcaaatgaaacagaagaatttagaaggagagacgagcgtcatttgcctctgcatttcacgcgaaccatcgtcatccccgttcactaaatacccacggatcaccactcacggccttagatcatagagatcaaaccccggctaaaaagcgttatatctcccgatcatattcaaaatcatataaactccgatggcgtgtttcaaacctttaacagacaataagccgttcaaaaatagtatacttctaggtgcaaactccagaggcgctatagttagattaaattcactcggtccagccgatatggacggaatccgagcaagaacctattggctgaatgtctctcttgtccttccttaatctcttcgaccaaaattcaggaaagaaagagggagtaaagataaactccgtgccttaccggttgttcggttggtcttggatgaacacataccttctgcacagcggcgaagcacgagaaaaagagaacttgcccttcatttcagagatccggtcggctggtcggtctttctttggattgtctctccatcaatcgatcgatcccatccgaccctccacctcttacttctgaagctgagcgcgcgcgtggtccccgtcccgaacgcccggacagcgttcaagaaaatccccgaagagaaggtgacagccggtatgaatccattctgtttccttttctctttctttccctctgtacatctcgctctttcggttcatttgacttttctcacttctgtttctttcttcccttttttttcgttcttgtgcttttctacccctctactttctgtaggttcaccaggttaaacgaccagagagcgcctgatactgtccgatggtcataacctagtatcgacttacgttttgagcttttctttggtgcgagcatctccttttcttgctaaacctcttcactcaattcaaacctttcgactccttgtcttcttccgctagactgttttctttattctccgaatcgatctctcaagttccggcatttaaccccagcccccttttgggactaatccgtcacctcataacccttctgtttttcctcatccgatccacacgccctttccattccatcaacccttggcttttgtatgggtgactccaaaacctcacgcctcatccagactgaccggcctccactgccttcagggacaacccgtcacattcagttggagacggctaaagaagtcaaacccagatcaggcagggtgcgtttcgttttccttggtccattttgatccttctcccaagttcctgtttgaaagggcgacacgtgcatgtacgagttcattcgtttctttgtcaacaaaggataaaagattttttgacgatcaagccttgacattgaatttatctggttgaacgactgcaataacacattgagaaacctcattagactacgactgacatacgttctttctacttttcttttccctcccccttttctgtctcttcttctttctctttgttccgtccaaaggcctcagcctgtgcttgtaggccatgtaaaaagtgagcatttttcgcttctgaatagtccgcgctcttatcccgctcggaatcaaaatgttcgcgcaggagagaattaaacgaatcgcttgtccgtccttctcgggacttttcattctttttatcttttgctatccattttttcccgtcttcatagagcccatctcgcctgtgatgatagtaggccgtgcaaaagatgcgtcactctgagcaaagtagacctatgtgtagacgttgttgtaagtttcggtcttgtcggtctgttttgcaccgagactagctttctgattttcctttgtctctggcgtgggtcattcatccttcactcctctcctttcagcaaaagaagcggggacgaccgaaacttcatgccaatcagaactccacatcagccaattcctctagatttcgaacgcctccaacccaaagaggttcggttacgaaccgaacctccagaatagcttcctcccagtcagtccggcaatcgacgtcaacatctcctcagaatatagggccatcctcagctccaatgtcaagagagtctagaccgctggctcaccaagatattggctcgtctgttctctcatccagttcgacttcatacggatactcctgttctgccgatagttcactgtcaccacgaccatcactagcatcaacaccagcgacaactatcacgttgatagccaccaccgatctgtacattctacgctgttcggcctcgtcgcttcaactcctaggtcgagaggcttcgtcgatgagccaccggtggctctcctcactgcttgtagaggatgatctttgggcaaccgaacagatcagggaccctctcacatatcctaccggacatagagttcgaacgagtcggtcgatcgaagaactgatcgagagattagatgacgccatgttggagagcccagtagagggaacgtcgtacccggatagagatgttcgactaaagagagctgatggttcatgggaagggtacaacatgaggatgcatcttggtcgagcaggaggtttagatcttgggttcgtttccaaatcatcttttgactatcgattaggccccacttatggcgtacaaagatgttaacttttttggtgtcttttcttttttgggggtggtacatctatactcttccagagatctaaacacgtattcgaacgcatatatagtaatctccctgcttcccctcctatcagcctctccgttcctgatcgcccaaacatttccccagccaaatcaacataaaaaagacgacgctcgttcgtccagtcactatatatccactcatccgagtccatcagccttctctgagcgaccaacacataaccagcttggtccttcgacttctaaccatcatcaccaccagagcaataaaaacggcgttctcattcctccatctgacatcgagttggccttcacaccggcatactcgctcagccagccgattaagcaggaccgaccgacattgccgccgatagcgcttctcacctcaaccttgccatcagaatcccagttgaatatcaaccatccggggcaactccgaccaatgtcttcgccttcttactcaagctcgctattccgtcgacctttcgacaccgatctaccggaccgagggggaagatcagacggaagaagagaacaagaacacggagtgcaggcaacctttttttcatcttcggcctcctctttcccttcgcgttcttcgtcgtcctcgttttcgtcttgtccatcctacgctgtctttcatgcacccatgaatcagaccatacaaccggttcatcctaaccgatcttcctctctggtatctttggtatctgaccagaggtcccccccgttcctctcaaggcgttcacacccgaattttcttccatcgacctatccttcctcagcctcagcttcttgcccattaaaacggccatcggtagacttagcactgagcgcgacccaagctcaaagccagagagactcttcgttttcaacagcctcatcactctcggaaccttggactagaccctcaacctcgagcgattcagaacgaagaagttcctcaatggttgaacttccaggtctcgagacgttattttctaatgaatctggacctaggcctggttttggaaccggctcaagatcatttcgaactagaaacgtcggccttggtgatggcggtgatgacgacggcgcggcaggaatgaagacaaggccaagtgagttgaggatatggagaagtgatgaggatgtcaccgggccgttgaatggtcggtcttgaggaatgtctctattctctaattggtttctcagacacacatagacatatacatacacaaacgctctccctcccgttcatctttttcctttccgccgcatcacatcgcatcgatcgccgcaatataaaaaaatccaaaggagtgctactagtttcctagggttcacagataatcccttcattccttatagttctggacttgtttctttctttgcatgtactataaacatatcttttattcgctttcttcgctttatctatctgtctatctatctatctacctgtctatctatctatctatcttttgtccaacgtattcatcccaatcctttccttttgtctttcgtgtatcatcgttctcttccaattctttctaacctctcaaaagatccattttcagtcttaccccattttgaatctcctccgagcaactctgcgacgaatctgtacaagcctctgtcagtacgagccacagctggttttctctcactttcaatagacaagtcatgattcttatggtctattctttctccacgtgagatacattgatatcaaaaatccttaatccctaggtgctacacggataaatacagatggtttcgttttttgtttgtttattcgtttgtatgcatgatctagtgcttggcatccaatttctgtagagattaaaacgagaatgtcaaaacaatggactaacgatggcaaggaaaaccaggtatactggagatgatgaagaacaggaaggagcgggaaaagaacgaaccttgatggcgagctcgtcctcaatctggagctgctcgtcaataacggctcctcgggaaggctcatttccgtgggatcgagcggcctcggtagcgaggggctcgggctgggcatcctttcgggcctgctccttctcggccttctcagcggcggcaagggtgttctgtaagagcagcgaaaaagaaaatatctggtcagactatatcgccgtggaagaaagacgaaagggaaaggaaatggggaatatcagactcaccttgatggacctctcatcggtcttgtccaagagggagtgagcgttctccttaccctcctcgaacttctgagcgtgagcgtctcggatctcctgctcctgagtagcctggtgctgatcctgctgggcagatccgtttccgtggtcggtgacagtggcggcgggactacacgaagaaaaggaatagaaacgagatggagccggatgcaatatcacaacgtgttcagaatattgcaagggaaagagtgggaggacgagaacagaacgtacgacataatgattagtttgttgttttgtaagggtaaaaaggggtaattctttgaaagtagttttgagtggtaaaagttgatgaagaatagaaagttgacccaagggaagacttttctggcctttatactaatcgagactttgttcgagaaggcgaagaaaagaaaaaaaagcgccccagtgacgatgtgatgacgtaactgatttcaacccagcgagtcaaaactcgatcactgggcaaccccagtcatccaaacgggggctccctcacggcctgaagtgcatcaagcgatggttgttgtctatagacgaacgatacattaatatcacctttcatctcaaccatcgttgcttgccatcttgtctcttgaccatgacgttccttctttgccttcctgggcgtgcgttttgtgttggtttgcctgtgttaattcacctcagcttaccttgcattcatactctttgcttacctcgcctcgcctcgccttacctggctttgccttgcttgccttgcttgccttgcctgccttacctgccttacctgccttacctgccttacctgccttacctgccttacctgccttacctgccttacctgccttacctgccttacctgccttacctgccttgctttgcttttcttaccccttgtttgctcacatatcctccctcacctcttttggttacttaccgccctgaaacgctgatctttcaggcatttgtgcctcttttgattcctcgccctgactgactcggcaagttttttccgacatctcatccttttcctccttgtttttgttttggtcatatttctcccctcttctacctatctcttgctctgatgatgcgtgcctctggaggcttccccttcccatacctcgatggtttataacaggatcgatattttttccgccagactcatctacttttggctttcttcgtccttctgaacaaaacatctaatgtcgcaagtaaactttcccctaggcaagacttggcctctagatatccagctgtgcattctctcccatctgtccaaaccgtccagacaagaagcgtgcgaatcagatatagactgggaggaaattcgtctgataaatgcccgtctgttcaatttgatgttcgtcagttgggactggatggtgagcaaacccatatttgtctgcttcatccgattaggatgctcaacctgttcagatatctctttgaccctcagatttatgctcgacgcctgctatatcagacgatcgtggttcagggggaggaccaactgcaacgattcttatccacacctatccctcttcgactgctttcctacaccataacattccatgctatcggacgtcatcacctccctggttcgccgacgtgcattcttgaacacataaccgacccatttagtgcgatgagcaagatcgatccgtggacccgagtccacgggctccccaaccttaaacacctagccctcgattggccacctccagaagagattcaacgtttaaacatagaccacggtcactggctatcccagttggtcagcttggagatcacccaaagagaagggtcaaggacgtgtcggttgggtcttccgccggtcatgccttgcttgaaatcacttatacttcgagggatcaatcctgtgttgggtacatcccttctagaaagaacgtcttttccttgcctttcttctctttctctatatgttcaggcttcatctcatatgtcgtgtaacaaagaggaatctccaccggccgccaagcgcgtgctccaaatcgggttgtgaggggttttatttattgtactttatattgggtctctatcaaatgtattctatattttgtaccttgcgcctatatgcggatatatatggtcgtcacttaatcctcatagaatcaattcagagaaccttgtcggattatatgttatttgaagcgagttctagtggctgaatggttttggatgcagtgctagctttcgtgtcggctcggcctacgccgtggtttccagttcgctcccaagcatcgctctcgtagaactcttgggtcctcttcttctctaatcattctcccatacataattccttctcatccttgctttcttcttattctgtttctgcttaactggattcgccctcttagcccatcatgctggcccatttgtctttccttacagttgtccttgtggttgcatacgtgagtgacctgtccttctgtgttggcttctgtcactttctatccggaaccgttcaggctaactcatcccgtctcctttgtctttgtgctatctggaatgaatccttcatctgcctcggttcaaattaactcgcttctgctgaggacatgttcgttagctctttcacaggtatcagctcgtttcggatcatctccttccgtttatcaggagtcactacccacggttcaatcagtattcaccactaaatacattcgaggaccaacgaaacgccggagtacgtctttctttatgtgatcagaatctttgctagtataaacccctagcaatttttcaagagttcctttccttgtctctgactcaagcgtcttctttgcttcattactccttgccgaaaccacgtgtgttcgactgggaaacaacagctttcatcttcaaactttgatctagagtcaaacaatatggccgctggagactctagacaagggcttgatgcagctggaagcgctgaaattcagcggatcatgagagaagaaggtgtctcgttcgatgaggttcgtgttccagacggcattttcttgcttgaggctacttgttgtcctaaactaagggggctcgaaggtgtgtatcgatggagagcgggtaactgacataaaggaggccttcttcttgtcctgattctgtcgaaccacaaccccaggctcgactcaggagacatcaacatctattggctcgaaataatgtcgatccgagcgggatgcctttggactcgaaagcaatcactcggctgtagtcgaattcacatccaaattctattattccgacacacccgccttcttgaccctcttcctgccagatccctcttctttctattattctatccttctattctgttctgttttgagaagagatagagactttagaaatggtatgtcgcgcctctatctatgggtttccatctagcatgtgagttggcacaagtacaacgaatggccgacgtccgtccctttctatcatgtcgggtctggtttatgtctcccttctctcggcttggttatcttcttctctctctatgtattcgaccattcgcatgcttttcggatatccttcctacaggtagatgtatatatatatatatatgtgcgtgtcgatgagtttagccatctggtaagagtgctagatcgggcatactagatgagacgcggctgataagatctgtacatgagagaaagactttggccatcctgcatcccgtttcatttcatcctcaaccaaccaccacacattcctccatacaatcagacatggttatggatctcagctgagagcctcatcgaacgctgactgatcaaacaagccatttaacgactgttcgtcaagattcttctctcctaaacgagacgttcagtggtgctttttatctgatttagatcagctctatcacaggttctgctcaaagggaccgttcatcttcagcatctttcaccttgtagaacgctatcttaagatcatatagcatcggctttctttagaatattccagcagacaagaaggtgagtgctctctgttcctatcggcttcctgctcctcttttgttcttttgattgactgacgatagtcgacatgttatttaggtctgatccttaaatcgaccagactgccttggttaattccctcctctcatcttatcttcttcttcactatcctcctccatcttctgctttcaaatgccacgagcgacccttccttcaaaccaatacaattgtcaaacagacgatacaaattcttctccgctccaaccgtcatattctccttcgatccagaacggcctattgtccgccgagaacttacccacctcgagttcctcttcctcttcacccgacctgtacctcctcagagattccggcacgtcctcttcgtcttcttttagctctctggccagtggatatcatggtttccgttcggaaggtctactccatatcatagacgactcgaatggtcactctgggtcggccagaggcgatcacggaatcggtctcgaaacagagctcgaggatgggttcgcgaggctgctagtgatcgatcagggcccgaaggagaccctagggatcggtttaaggttgagcctcgagacacaggccgatgaggatggtcagacggctgatgaatcgcgttcgtgatcatttctacttctcccttccttccgtcggctaatccggtcttttctgatctcctgcatacgggtgaatcttactgtttccctctctttttcttggatctgactggcgggctggaaattcacccggatgcaccgatactgcaggctcgttgaatatcactcagaaaacaagtcttcttgctccgaaccatcttcgtctctcggattacacatctgctacgacactaaaacccaacctctccttccctccctctccggtgtcttcatcttcgatagagaacacaatatcatcagccgcctgttcatcctccccttctgttccacagactccattcctcagacaggtttcttcaagatcgttcgtgtccaccacgactacgaccacgatttcatgctctcctgttcaagcgtatagttcattaccaacgacttctcgaacgagtgtacatccgtggcagatagagctggccaatcatcagacaggcacgccccataagcgcgctcgagcggccagcgtccgcagtttccattctagtgaggaggagcaagaccaggaagatgacgacgacgactactaccaccaccaccaacataggttgagaatggacaagccggtcgtcgacattgccgactcgtttggggagacctttccttccatccctcggagacgaggtcataccactcccttacctcagtcggctcaacgacctgaagctagttctattcatagatctccagacctttctactcgggtccgtcccggcttccaaccgcttacttcgacttcaggtcgacctctaaaagggaataaagacagggcgagcggtcctactaaatccgctcctaattcgagcttcaatctggctggtctgaatccgcccaggccttatacacatcgggcacggtcccgatgtaggacgagttcccaaccgagcccagtcgctgagcctgttcgttcaggaggggggttccgccaggaagtagcttctctgttcaagagttttgatacggctgctaccactgctgcctctgcctccgggtttcgaaccggcgtaagacatcaagatgacccttcggaccagacgtcatcttcttcgacgttggcgtctgatcaagcatcgaagatgattcctcggacggtaactgatctgatcaccgcaccggtcataccgattgctcaaggatttaccctactcttcatttctctcgctaccgtactggccctttcgacaatcatgatgggctcgtatggtctaaccgcctgggacgaagctcgaatccgattgagagacttacagggccgagtacaagaaggaactagacggattggcgaaggcgtaagagagggaagaaagctcgtcgattatgcgatcgaaggtgctagagttattggaagtgaagccggtgtcggcgctgatcgatttgaaagagctaatatgaatccggataaactcactggacggccgagaagatcgagcttcattagttcaagtcataccagggatcatccgttcgagcaagttcatacttcgctctggaatatcatcgggcagatcatccctataaagatgctgaggttccagtgcacagattcggcgatggcttctcctcccgaaggtgagcatcttcgaagaagaccatcgaagagacctgcaatgagtcagaagggagcaaagtcggcggcttcgaaggattccccatcgttatctgccttttctccttcagcatctttcttctcgccttcttttctcccaacagaccgcgcggacgtcaataccttcacctcttcggggacttctacctggacgacaacgtctaatagatcttccaagtattctttccaatcagaaatcagaaacccattaacggaccgatcgaccactcggactttttcgtcacctcttttgggaagtcctgtaggttcttcaaatccatcaggccgagctccgtctgaaagtcaacttaggtcaaaaacctatccacaataccaaccgaaatcccaatctcaaccgaaatctcaatctcaatctcaggcgaaagccaagaaacgagcgcttccacctcgaccgccattgaaatggttgatccctagcatctttctaactctgctagtcgcattgggcgcgatggcctatcgattttttggaggcaaggctgaggcgcacgtaggtaaagcaagggagagggagaaggcaagggagaaggcaagggagaaggcaagggagaaggcctgagaaagggtcagagtttgagtcggctgccgatgccgcgtttgaagagaaatgtgagctagcaaaggactcaaagtgagcaggcactttatcgaagactcccttcccggtcgtttcgtcatttcttcttcttcttcttcttcttctttttcttttctttgtttatttgaagtaaaataaaactatcgaattcttcgaatgcgcgacgtctctctacagagacgaatgcatgtatatccctcatctcttctattcggaaaaaaaaacttttccgtgcttttgttccaccatcgtaacgacctcaacgatcttattcattcagctatacgtatatgcatttactgtaccatttgtagaacactatccagtctataaactccgtcaatttatgatcaccctctatccatactcttatccatagccttggttgacgcatcaaattcctctcttttctttttcgcctccccttgtttatacatccagaaagagataccgttgcttctgtactagtatgtaagattacactctgttcagtttgtttgtatattgcaacctctcgtatctcgtacgctctcttctcaagattcttctatctctcctttctctgtaaggcgtccgtttactctactagtctcttcctcttgtgctttctcgaaacgagtcatggactgatcatgtatgctcctcaggtccgacgggaaaacaaagaaatgattttcaacatatatatatatatgaatcctaggaaagatagagagtgataatctttcaatttctaaatctatcgatatatatccgtatttgacgcatcagaggagagaaacaaatagaccaagaagcgagaggcgagggaatacgaggagggcaattggaagaaaaggggatctatcggctgattgtcgtttgaaggggcctttcttctttccttttagctattactacagatgatacaacgaatgagcctctaagacgattaacaatagagctgagctcaaacgagcggcaagcaagaccgatgaacgatgtgagggatgggacgaaagcgagaaagaacgaaggaaaacgcagacgcaatgagaaaagagaggaaacgtttggagaaggccctcacttttccttcaaagctttggtttttcacccaaggcaatcttttcaacaggtacatctccgcctagaccctctttccaacctgggtcttcggttgagtcataaacgatgaccggaggttgaaccggtaggtctgtcgagttgtcaaccagacgaagtctatctatgaacgcttttccgtccgatgaaggtttagagagtgtttgaacagaaacaggtgatttaagtcgggaattgtgaatcttgatagacgaaggttttatttaaacaaaatcaacatgaaaaatcagatgtcagcattcgagctaagcacttctcttcttttcaaagcataagggaagggagaagaacaaccaacctgtgctcgagaaacccgtcttccagtcttgatcctcctcttctccgctcgatgccacatcacgtcctcgtctctacaaaacacaaacaccacttctaccagataaccagactgtctgaactctgtcatcacccctcggaaccaatccgaacaggaaagagagccgtcaatgacgactgatcgatgctgttgcctagcaaccgtggtgagaagttcttggagaagagaggcttcagcatgaagcaaggttgatgcgtcgtcggggtttgagagcaagtagagaggtcgttcaggaagtaactgggagagtttatccgggtctatcctgtagagtatcatggtatcatgaacaccagtgaacgagatacagtcgtgtgagcaagaaattgaacgatccttctatacgcggtctgaccagtttatgatctatatgtttgtttgtcttgaggtaaggaatcaaaaaggaaacatcaagacataccacacgaaatcatcttccagccgaatccttccatcttctaagaaagttctcagcacatgccccttcccagcgcccatgcctccacttgtgaacaacgcgaccggctttgtcgaccgacctagttttgtggatgttccattacaacatcccggctccaaaggatcggcctgtttgtttggcgacttacaaatcagtgttgaatcctcctcgcagtccgagctattcgtacagctcgatgtatctttgccacttgactcgcgtcccgtcgaagaattcgaacttggtgtcggtgatcgagaggaaggatgacagaaacgacattcttctttatgtgattctgctaacacaagcgagacgatctcgtcttgaagcctatatagttgagtcgaacgcacaaacaagcccaattgaaatcggttgttgaccaaagaaggcgaggaagaaagaaagagacagggagagaggaagatgaatatgcagagacgcacgctcgccgttccggacttggattccgatgataagtataatccaaccgacttctcgcaaacccccatggtccatcatgcatctccggtcttgccagctcttctagactaagattcttgaaatcagcgtacagatcagaagttgaccgacggaggtcttcttgtgttagaaacggaggcgggctgccgagagtcgtcggagaaattaaccggttcggggatgtgaaaagcatgggtgaaggaaagagctggttggttggcgagagagtagtcggtttggatggaaacgagatacttcgagtaagccggattggcaagttgaatttcgtgctatcgttgtcgtttcagcaaaaaagaacgggagatgaagaacgtcgaaaacaagagaaggtgaaggaaacgggcatggagcattaagattaaaaccaaagaaatgttagttagcaagaataactggccgaaagatatagatctgggcttatccattctgacaactctctaatcttgagttgacaggtcatgaaagaaattgaagttatcgagagcacatacctaagtagccgcaggctgaacatcaaacaagagcaccaaatcgagctcggaattaaggaatgaagaagataaagagaacggaaggaaggttagtcgtaagaaagtcattggttcgctcggcttcgtctgacgttgtcgtatgtcacgtgatcggcaggcccacgcgcacgcaataagcagctcttagaatattcagatattcagacattccggcattccgttttcaagtcgaagagtaaagatcatgaaatttgtgagatgtatgtatttatatatatgtgattggcagacaacaagagatgctccaacatagaagaataaggaggaaaatgatggtaacaacacagatgcccgaatgcggatcgaaagcgaaagaaagggaattgagtatgagtttacaacaaagcaaagaccagcatgaagtgaatggaagagataaagagatagtccccgagtaagataagaggaagagaagaaggcgtctagattaaatctggggaccagccaaaagaacctcccgcgacacaccatcctcgtacttcttgaaagcctggttgaacatgccagcaagcttggtgacctcgctggtgaaggcatcttgcgacggccaggccttgagagggttcaggatctctgaaggcacgccttctacggccttgggaatggacaagttgaaggtagggaagttttcgtactcggcattggcgagggatccgttgtgaatggcgtcgacgatggcccgggtgtatttaagcgggcatcgtcggccggttccgaactttcctccggtccatccggtgttgatcaggtaacagtgagcgttggtggccgacatcctctcagcgagcattttagcgtaccgagcagggtggaggacgatgaagggctgtccgtaacaggtagagaaggtcgggctgggctcaacaataccgtcctcagttccaggggtcttggaggtgtatccagcgataaagtggtaggaggcttgctccggagtaagcttggagattggtgggagaacaccgtaagcgtcacacgtcaagaataccaagttcttgggttgcgagtgggagagcgaaccaggcttgtggccatcaatgtagtcaattgggtaagcacatcgagtgttctcgatgatgctgacatcatcgtagtccggcgctctgttggccgggtcgtaaaccacgttctctaggatcgatccaaaccgaatggccttgaaaatctcgggctccttctcagcagacaggttgatacacttggcgtagcaacccccttcgatgttgaaaactccggtatcggaccagacgtgtctgagaaacaacaaaaggtaagcgaggcggtcggtagaggcgagatatacagaaaaggatacttactcgtcgtctccgatcaaaagtcgcttaggatcagtcgagagcgtactagaggaggaaatcaaaagatagattagtgaatgaaagaagaggcatatacaatcaaaaagcgacgtacgtctttccagttccactcaatccaaagaacaatgtcacatcgttctcgtcaattccctcgttggccgaagagtgtaaactgagctgtccaaacttgacgggctggatgtagtgcatgacggagaacactcctttcttcatctctccggcgtactcagtaccgaggatgaccatctccattcgcttgaagttaatctcgactgaggtagtcgaggtcataccggtggtgaatctgttggctgggaattggccggcattgtagatcgtgaagtcgggctctccgtaagtctcgagctcagcctcagtaggtcgaataagcatgttgttctgcaggattaacataaacaaaaaagaatcagtcttggcagtactaagaataactgcattgcacctatgaatgcactcaccatgaagagggcgtggtacgctcgggaggcaataactcggaccttgattcggtacttggggtcggcaccggcgtatccatcgaaaacgtctgtcgaaaaaagaattgaaaatgttttctttagcgacagcgcaaaggatcaagcaaagcaggaaagaatgatagtacttacagacgttctctcttgtatttaagtaatcaatggctcgctctcggttgatctcaaaagtgtgctcgctaaagcaatggagaggcaggagcgaaggtcagtagatggttcaacagtagctgaacctcagaaaagtagaatgtaggacgtaggacgaactccatcttgatgtttacagatccccaccaaacatcgtctttgctggtctcctcgtaaacgattcgcttgtccttgggcgatcgaccagtcttctttccggaaaagttgatcagcgcaccggtgttggagatgatagctccttcgtttcggatggcatcctcgtagagggtggcgactggagcattacgcttaacatctacagagcggcaggagagaatggaggacaggtatcagaagagagtagctgtatagactgggacagctagatcaggcgacttacggatcttgtccctacagtgcgaaaagatgagacaaaaaggatgcgcgcaagagtagatgcatgaattttgttagtgggttaggtgaccaaagattcaggcgcctatgtatgaccgtctattgagagcaacaactgcttacatgtcaaacccggcttgggacaacgaagtgagctcttcaccgaggaactgtttcgagcgggaagtacaagcgagagagcgatcaagcacaagagccgggtaagctcaaggtcgtgtgcttcggaagacggactgagtgataagcgggggtgaatcttaccttgtagttgttggacattgtgaaaaagggctaggactgagatgggactatgtgtatgtgtgtgcgtgtgtgtgtgtgtattctgaggttaggcagaagggcaagggcaatgatgaggagaagaagaggaagtcaaggatggatatggctaaaggggtatatataccatggacgatggtcaatcagctggtctggcatcaaggagcggatatggaacaactgagaattctttctaccagaggcttaacccgaaaacggaagacaccattgttagctacaagagaatggaaataagcacaagagaggcatcattaagcgggtagaacatcagcatctagagcaacgagcactgagagtaggagcaacatcgaggtatcgtcagcacgagcagtaaagcgcctgagtgaaaggtcattcaagctcgggtttatcggatatcggtcagagccgggtatcatcggcagcactcgagcgagatgtaaccaaaatagtctttggcggattcccgctcgctggttgtggtgtcgtggttacgcaatcaagctactcgagatcagccgactaaagccttgattacttgaaccgggtctgtgtgtcagaaggcggtttgacatcatcacctcttgcgcgcgctgtctttcctcccgtttccggatcgatgttgcgcgcacacatctctatgtactaacatcatgctgatcaagagataacactggttgcaacactccgacatgatgatatggacgactgatcggatggatgctgacgatgagaccttaagatctcataaccacaatgaaccagtctgactatactcatgcccatgctcatagacacagacacaggcacaggaacaggaacacgcgcccacatctcttcctgttccttccttcagaacgacaagtgtttccgccctggaagtaagccacgggcaaaaccggagccgaacaatgtcattcttcctacaagagacatgccctttcgtgtgggcgtgaacagatagtgtctggctcggaatggaaaaataaacgatacaaagaaaagaaggcatgttctttccatttgtttgcttcaaaatacttcatgcatctccatccaacgttatatccgacgacgttctcacccgactgttcctcagatacgtcggtcggcctggagcgaaacatcgggaaagacttccgaaggcctcttgctcgatcccacaagcaaggtctctcttggctcttccaccgaaagattccgaccagcaagtcgacggaagaacgatgggagaaccagaaagggcacaaggtgagggtatcatgaaaatttatctcttctatctctaggcggcctcctggtcgcttactttcttctgacccgatctgagctcgcctttctttcaccttggaactccgaagcgcccgatcctttccccaatacgcccatccgtatctcgtcaaattcggccttctcaaagcgcgccattaacgcttcccagccccgtctgccgatgtcgccctggaattcctcgagagatacctcttagatccagccctcattttgaacctgattccttccagaccgacacttcgctcccattctctcttgtaacagcctcaccacgcgaagcatatgtttgcgcaacccctcaatcgccatcgactctctgtcggtccccccgaacgaaagtccgacgtaaaaaccggacatcactcgttcctccatctcagaaggcaggcaaccagctcccagatcatcgacgagaggaaaacaccagtccagtcgaaaaagcggtatggaaacacgtagaagcgagaaagaacgtcgttttgactctggtgagggatagttcaggagaaggaagaagacacagtctcagggcttctgtcaagggtgtccagagtgcaaacgagttcgagtactggtctgatgttgactcttctgaagttgttggccagcatatatgttgccattgactgacgatagaccaatgatggtcgatcaccccattccttaccctctcagcatacctctttctcgattgaactactcccaaataccatcatctccgacatgtataactcggaaacagctaaagagattgttctttcacaagcgcaagtctcttttcttctgctcaagtccctaagaacacttccgaagatgttatcgcttacttcttcgtcgaatttatttaccaaaccccatctcttattcaatcaccttcatttccacttcttgcgcttgctttttttttctcctctatttccaagcctgtaaaacgcagtcgaagttcgcttttcgctttgaaccctgcagcgctttgctttccatctgggtggtgacgtgtcatgctttcaaggatttcatcggcaagatcttttcttctttgaaagaatgtagtggatggtttgttgtacatatagaagaaagcgagctagaaaagtacaacgcccaaagatcgagtgacctgatcgaaacatacacgagtgaaacaaaagacagaaagacgagagaaatacatacgcgtgcacaagagaagcgtgggttatagtttcgcaacttgtggatgcagagaagtgtgtcgttcgttcacaatgacgttttctgttgagccttgtttcgtcgacaccggcgagacaatcggccaagctgtcaggtcagccattggaatcgttacagatcttgccaagtcagagactcgtttcgccgcttaaccgagacaagttatagaagaaggtaaactccgaaagacttcagtacgcgataaaatgtgactgctcgggtatttgaaaactcacctatcgcgttcgttctccttgatttgccttccctcctgaacgctcctatcttatctgcccaactattcagtttatcctcatcgacttttggatccaaccctacgagcttagctttggatactctccggcgtaaggtcagaccaagttcggcaaatcgttggagagcattttgcaaagtaaatgtggagatggattctagtgttgatagatcccccttgttccccaattcaaacattaaactcgtcacgattttatgatcttttaatcaagacccagtgctagaaaaggtgaagcaagataggactcacctgccaaaaaagtgtttttccaaacaactgaacatgactcaacagatccttctctgacacccatcgaacataccctgactgtcgtcctgaaccatctttgggctccaacagacttatcagcgctatggctgctagccagtaactctcgatgaacggccagacgagaaagcagaaaaagtcaaatgtttcccttccattgaggcgttcggtctcgctaagcgagacgagctctgtttcgttgtcgaacgaaaccacacgctcttgctaagaagtaccaaacaaagagaagccaatgctgatatgagaggttgtgcagaactgaagatctataaagtataggcctctcacaatcaaagtatccatggtgtttcgcacattagcttctatgccttgtgtggagaagacgaacttagagggaaacgatatgaacaaccgacaaacactggtgcaaactgaggaatggcagatcgactcacttctagcctgagaagatccgaaagaaatttgacctcggagatcaaatccgtaagcttcatcgcgttcgaggcctctactttcttgacttgaaggtacagtgtagccgagaacagacctgtgtttcgatggatcgcatacataaaatcagaacagttgaccttcctcagacacatgcaagaaagacgtatgtcaaaactcacattcgctgacgaacaaatgtaacgtctggtttctgtatagagatagctcgaacggtttcaaaggaaataccgtatcatctatcacttcgtttgatggtttctttccgatcacatctttcatgacctgtagagttctgaaacatgtgcgcgcgggtcaaacaggaagattagagacaacacagagcacaagcagatgaaaagcgatgacgatagcatacctgttaaccatctcgggcacagtctttcctccaaaatggactacacggccgccccgccgaataatggcagcaataagccattcaaccctccgtatgagatctttagtcgacacaccctgtcaagaaaagagaagatcgaaccgagggtaatgagaaaggaaggataagatagtggtcgaatcgattgctagccatctccaagcagatttgaccaattggcatatgaattgatgtgcctctcggtcgacttacccgagttgttctcaatgtaagtagcgcggttgcgactaaagcagatggcatagcgacactcgcagctgtatcaagccagatcattaccagatatatttagtgagcatgaccgaaagactgctaatcgttaattacagtatcagagattgtatgtgtatttcgcgctttcttaccgtttatgtccgaaagcactttgaaccccagataacgaaggaaaaccatcttgtccgcttcattgcgcttgatatcgaatgtctcagtctttccttcatgcacagccgtcaaccttcgcgctgtttgctcggccatagtttcctttaacgagtaaggtgtttgaaaccgaacgtcaattctaccaagtttgaggccgagaacagaggaggacgaaagtagaccggagagcgattcaggctgtttgggaatgcccatcatttcctcctttcaattttttatcaataagatctgtgagcactctatcgaatgagagtcggatgagcaaatctacttaccacataacttctgctctcgattactttgtcgtactggatgctaaccggcgccaagaggacatccgtcgtacgatctatatacaggtatagcctaaatatcttcacggtataggacagaaagatcgaagaatactgcttaccagaaataacagcattcaaaatatcctttgaagtgtagagtcgcagtttcagtctatgatgttgtagaagtatcagcagctatgtacaggaaagagaacatttacctttagaattccaaattttggaggaagtaactttccacttcgagaacgggtcccttcgatgaaacattccagattatgcccacgctcaagaagaagcgagatgtattctctgttcaacacgtccatcatcgtttcatccagttaacatccatctggatctcattgcgagctatgatatcgggaagaggaatacagaagaaacactcactttgctacaacgggatagagctcgtcatctccccagcttcttcggataaacattgctccccctctgcgcagaagtggacctaccactggaagattcagattgtttcccgcctcaaaaaggaccaaaccagacagagatggaaaatcagctttgggtttatgcatcggtcgattacatataagtcactcactactatgtgcggaagtgccaaccctatacgaaagcatctatgttgtccacgacaaaatatttcagccaaacgatcatatggctcaaagaaggaaaaaaggatcctaacagccatgagatcaacagataatcgatgtgtgacttgtgacatggcaagaagatgatggcccgcttgttctttgctgcaacagcggccacctccctaagcttaatattttgaaggaacatgtgtcaggacaatgatcacttgaattaaggaacgtccgggaagaatgaacattactaacttttactagttcttcaacgtttacatgaattccagactggtataatctagccaacattttttgtagaacggcaccgtagactctaagatagacgggtcagtcaagggagcatacaagacaaataaacggagaacgatgatacgcagagtaagaaaggatttcaagttttctagattctatgaggagaaaggaggagcgcgcacctgatcaaccgaggattctctacttttgctactagctcacccgccatcttcttcgttacttcattcaatgccaatgtggccttctcctctagcttttccttgtcttgacccggtcgaagtttcatttcttgtactttccttcgagccagtactttgatcctcgatctaacatagggcgatgtcaagagatcggccatgatagatgcatagtaacctggatatagaatctgattatggagataatcctcaattagttacacaacattagaggagaggcggcttgtgaggagattaaagtaggctcaactgatgctcctagaggctagacaagatttggttcccataatccagcggttacttcacaaaggattatgacctctatcaagaaataattcaagaaggaaatagacctcacgttctcgtaggatctccatcgtcttccggcaacggcatcatcaagctgtctgagaaaagctatcggatccgacgtaacggaactctcatacttctcactagaaatgaagccccaagacatccggaagaagtgaccgtccggtcatcattctgaatatgagtttaaactcgtccaaacagcttgcgttgtagaagagcgaagggacgatcgtcaagaagatacccacaaaagatccttcactgggtgctcactgtcctgaacgtcaaaataaatcgggtccaatgtcggtttaggaagagacgtcgtcatttcctgagcggtttctttcgtatccaaactatctatgagtgtcgaccgtagaaaatcaaaagatgtgtgtatgattggcgatccaggattagagacactgggttattatccgaaatgctggaccggcaataatgaaagccgatgaaccgtacgttacctaaaatgaaacgtttaatgactaaatctgtaaaaattgactttgttctacgtctttgttcatctacttaagtagtgtcgatcaaatcaaacaatgcaggaacaaaacaaattcatgatggtatgtttataatgtatcgatacggctagacggaaattgaggaggaatggggtaaatgagaacaaaacagaatagaattgtgaggcagatgaagcaaggcaagagggggcccttagttatttacacaattggaagaatagggagagaaggcaagactgtagaaaggcaagacggcaaaggaatcgccgtgttctctagatctatgatttgtagaagaggcggctaggtcgccgcggtgtttttgggggggccggacatgtagaacaagaaatcgaaagagacagataagaagacaaggaaaaagaaaagtggtgaaagagcagatagaggataacaacaagaaagacccaaaaagaaaagtggaaggaaaaggaaagaggagaatgaagagatagggtggtaaggaatcaggatgagaggatggaggggaccgaaaaggaggtggatgattagggtcgaaggctctactcgagcggcccttgtctcctctcatcacttatggacacagcgagctctatctgaccagatcgtataccaaggtaagaggataccggagcaatcggcttttaactgctctcggtatccttcttctcccacagtttgctgagcacgccttcgaatccttcctttcctagtgctgcattggcgacgaatcgttccagcgacacagtctctagcttgtcggccacagatttccatagagaacctcgagcagagatctctgccgtctgggagaagagcgttgatgattttggagaggaatgggaaggagagtaggtgatggattcaagtacagtaaggtattctgtatgttgagcgggacataacagtggatggacaggccaatagaatcaatatcagactctatccaatttgatcggccaaggtatatgcataacacaaggagtagatgaatcagataaaagaaatgcagatggaaccacggacgtacgggacaaggatagattgacagagaacatcgtcatcttttgcgacaccgggtctacgaacgagacctctcgaacgtatgcatcctcagttccacctaacatctgcgatgggccaaacgccaaggcaaaaagcaatcggttgataggttagattgttatatctagtagacaaaattgatatttcgtaaagtatcataccttgatagcccatctctgatgattagaatgagaaagaaagttggatgtaacatcgtgagcaatccggccgaaagcgaacgttacgagaggacgggacggagacggaacagaagatcaattactcaccggtgcgctttgtttgcaccctataacgcgttccctaagtagaccaaaccatagacatatgagatgaggcattagttattacagcttgaatgcatgcaaagattgacaccattgtggcaaacgattcggtacaaagaggaaagaggggaagagcagaggggaagagagggttaactcacgtccgcacaacgccggtggcaggatccaccgtccggccaatcgtatccacactgataacatgggccgttgccgggtttggatacttttgccacacaccagatacaaccttggaccactcgtggctattattcgggtgatatgtgatgccaattcaaagacacaggtgagcatagagaacattgagaaacgttagtggtcgagtggtggcccgacaagtgtcaactatataaagagaaaggcaagaatagaaagacaaaagaaaacaagccagaggaacaacaggttcaagataagaccaaaacacttacgggaagctgaaagcctgagagaatatttgaaccatggtttcaaggaagaaggaaataagacaaagaaggagaagaaacgaaaagttatccgatcgtaagaagaaaggaaagaagagagaaggggagaaaggcgcaaagagttgaaatgaaggcgctgacgaaaagagcatggaaaaaatcggatcgtcggatcgtgtgcgcttggttacggtcatcacgtgtaaccaccgccatgctccgctgagctcctcagtctccggaaagacgccttcgatcaaaggtagtgagcgtcctatggatatcgctttgatcgtttgatcttttgatcttacttatagttctgttcataattggaaaccccgatgctctgctctgctcaatctgctacaacaagcggatcatctcataactcatcggtaacatcacttggaaagctcggtatggaacgagcaatatcttgaaatcccgaacatcacttctgttgctggagattccgatgaggaagaaggatat

SEQ ID NO: 1313 - DNA, 2860 bp, Xanthophyllomyces dendrorhous
tatatcacactcctgaacgaacagtgataggaaacagacacatgagagaccgatcctggccgttacatctgctggttatgtattctttactgttacaacgtttgcgctcaaaaacctgttgtcttagagtggtcttcgtcaggtgcatttcatcatgtttataatcgtacatcaagcctagcataagataccggagagggacagacagaaagaaagaatcaagggatcagagaactaggtagatagtcattgataaacgaagagggacattcataccttgatctaaattcaaacggcttattcattttgaagactttccagcgtatcgacccactgagccacagactctacatctaaccgcccgctatcaacctcctggatagctcgaccgactgctatcgctccctttattgatccagctttaatccagacttgagcgttcgttccgatggcgcactcgaaggcaactcgcgaggaaagagatctgaggagaggataggatggaaccaacagcctgtacattcaataaataacaaataaataagaagacaaaagtaaaagatgtttattatgtctggttcaaactgactgcaaagaagaagaagaactatacaaaccttctggacatctgaagagaacaagtgaccgtcataccttccttcaactcgccaaacccgtcagattttctggtggtcgcatcaaaacactccaactcaggctccatatctctgttcgccaatgatatccgagcatacaccagggatccaacctggtgcaatcatgttcggttacgcgaacaacgtcagagtgcaagattgtcagtcgaacttgctcaatcattccagatcaattagggatatgagcacagattagtggaaggatcaccttgaggttaggcttgtttcgcttagtagcaccttcaaacgctagagcatctagagaagcgtggtgggcagagccgatatctactcgataaccttcaccatgacgggcaatgacggtcccgatgactgactcctgggacgcaggcacgtactgaaccatagtacagacaggaacctagttttttagagatgcattctccagcaccaggcaggctatcgaggctgaaagacttacgcgttttccccttccttccacataaattctctttcctgttttgtctgatccaaactgacctgcctttgtggcaatcagaagctggttcgtggacgaactcgaagaggcagttgatgagaaccgagctgatgtttgaagagttccaggaccaagtttgctgatagaggaggaagctaccggtaaggtatctcctggaagaaggatttggagagatgtcatgggtattgagtctatgaaacagtcggagggtaggcctttcaagagatttaccaccctgagtcctgataaaaaagctgtttaagccagcgtttgagctgcagtaagcttggttacttcaagctgctagggttatgatcatatacttcagtagctaatccgaggctgacgccatcatcagtggctttctggcctatgctcatatcaggctcaataaaggtttcagatcgattgtctgttcgtaacccttttgcggtcgcgtatggacaaggtaggttttagtcgaacgcgaccaccttcaacatcatccatccttttctccctctctcatcatccttgatagtcttctcctttgtctacctttctcttcctctttatcagcctacatctataacacacatcacatcaaaagaaccatggccggtccagctagcaaaaagggttcttctgtaaagaagaccgaaggaagcaaggtacgtgtcgcgttctgatctactgcctgctcgtggttcaacatgtcttccttcttctcacttttttcacttctcttccttccattatctttgttacaaacggggctcatcggtatttcaaccgatcatcgcttcacaacttcaattctcttgtatcctatacttatcattctggtggaacttttggtggatgggtgaatcactcaatcgatgacactaagttcgaagtcggagacaccgttctctgcaagatgagaggctatccagcatggccaggaaaggtttgtacatgtctcttctctttctcatacgcgaactaattgatgctcgattctggcccaagtcaaacgcgtcgaacgagacattgccgcctttttcatgatattcactcagtcatcgctcacttccgtttttcctctgccaatggattggtgtagattgtttcggacgactccatcggagatgacgtgaagcgagaaaggccgtctaagggtcagttctggtgtatccggttctttcctaagggagatcagtgcgtgcatttctacctgccttttctcatcctaattaagaatctacccgttcattcatacatctgtaccagctgttaaagcgcgttactgatgtctcattacctcttttcttctcttcaaaaaaaaaaaacaacaaccgtctttcccttgtcaatcttcttgaactgtctcccgccacgcgactttatcttccatccactttagctcctgggctcaaggccgagatctctctcacctcacctccgccgccatcaaagagtacgtcaactcagccaataagaaggcaggcgagcttctcgaaggatacaaagttgctggcgatccgaccgattgggaggccgagcaggatgaactttccaggcaggccaagatgtataatgagaatttggatgagcttgatgacgatgaggacgagccgagcagtactggaaagaggaagaaggctgcctccaacggagagaagaaggcaaagaaggccaaggtggagaagaagcccaaggtcagttctagatataataa

SEQ ID NO: 1314 - DNA, 28930 bp, Xanthophyllomyces dendrorhous
  misc_feature (327)..(336): n is a, c, g, or t
aataataataaaaaacttctcattttctctttgttggcgatacctttgtctcatctctccttgatcaccgttttcaatcaatcccacgcacagtctgatgctaccccaaaaagtgctaagaacaccaagaagaacggcaaagtaaagtcggctgccaatcttgagtctgaagatgaagccgagggcgacaagccaaaggaggccgcttccaagaaatctgctggagtctccaacgatcagagtaggtgtttcttcatctctggttctcttttgatgaaatccaggtttctaatgggtttactcatatccatctctttttttttcttnnnnnnnnnnctcctcttatcataattttctcaacgcgtctcctcatttcaggctctcttgaggccgagttcgtggttttcttcttctccagaaaggtacctgcaagtttgattaaccatttgatttgtattttgcgacacgttaacagcgcccaaaaagtgaaggattggcgacacaagcttcagcgtgggttcttgggaaagcttcctccgcaagtaagtcaaaaacagctattcccgggttttacggcgcgagaaaccctttttgacacgtgtttgggggtatctatcatctcaatttccaatttatcaggagaaggacatgcctcagtgccacgaatatttcaacacgattgaggcttatgactcgatgacggttgagcagctccaggtacgttttctatatgccattttgattgacttgttcattgaatgagagatctcacagattattccttctttctgcgggtcaatcgatactgtttacatattcgaaaactaaatagacttctaagatcggcaaggttatgcgaaagattgctgctttggacaacatccccaacgaaaccaaatacaacttcaaggagcgagcgagcaagctgatgggcaaggttcgtatgctcatatatatcgttggatctattttcatgggtttaacatctcaaccaacttttatcccttcttcaacaccgcgccaaaaagtggcaaactcagcttccttctggctctgctgccgaagaggccggtacgcccaccaatggggcttccactagcaaaaaagccactgctcctgaatcgaccaaatccaagtctgacgacaagccgaagtcgaagtccaaatcagctgcgcctgaatctgaatccaagcctgtgtcgcctccaaaagaaactgcgtccgaggagaaagatgctgctcctgaggccgagaaggaggttgaagccgatgccacggagaagactgatgcggacgttgtgatgaaggatgaggagcctgtttccgccgctcccgaggcgcaagagaaggtggaggaggctgagcctgcaaaggagagcgaagacgttccggttgttacggaaaagaaggatgaggtggccgccgaggatacgacagaggccaagccagaggaagctgtaaacgagactgctcctgcagagagctcctaagcctctgtcgactgtcctctcgctctcttcgtcaatttgcttctactggaggatggcgagggtctttgtttgtcccctgctcgagccaccttcttgtttcccttacattctggtctaatcgtctgaagacgattctttcccttccttttcttttcgtcatctggtgcgctctttaccaagttttcactgattcttttactcccaaacatgtgcttgatcgacttgatatcattctgccattttcttttaccggagcctccttgttttgtttccttcttctaacatgtacatctcttaaatggatggctccctccttactatctttcatgatcttcatccttctttgaaatattcttttcctcctgtttctttcggataaaacacattcccgcttaagctggatcacactggtgacttgatgtcgaaatttgtctttcaggtctcatctcaatgatcccttttctattaattgagaatgatttgtctgaaatagagtgtcttttcgaaagagatgtttacaaaggagaacaaggctgaaatttcctccagtatagagaacaattgaataagaattacttactctgccattcaatttctctctatcacctcctgttctgacgttgagaaacacgcccagcgtgtatcatttcagattcttctcaactattgaatcctcttcaatatttaagagaaatgagttccagagtacgtcctctctagatgtctttgtttgatttgctatcctgctcggttgtttctccttcttggcccaacggcgcttgtgtcaaacgaccgatcggtagcccttcagcttctacttgttgtttccgtcgagcctggttctacattgactatatgcacacgctcatgattatctttgaacattctcatgctgaattataggcggatgcccttgctcgtctcaaggcctctagacagaaaaaagattcatcgcctagtgtatcgtccgtcgactctcaatcattcaacccggctgtttcttccaaaaacaactcgtcacggttttttccatcccaatcaaactcgtcttcctcttcccttaatggaaatcaaccaaacgttcttgtactaaatagtagtagtccggtcaagactaaaggatttctggattacgatgatgacgagcctattcccagatcgtcagcctatcgatctcaacccccttcgatcatcaaccaacatgcttcctcttcctcttctacaccagcgagttacactcaggattatattccccgtcctttcaagcgtcaaaacacatcctccagagaatcttccactaagccaaatccgttttcgtcatccgcacccagtcctgcacattcctcatcttccactcgaccaggaacaagtgctgtgagagcaaaggtgatcgcaatgaagttgggagactctggagaagtgattgatgtcgaccaatcctctgacgagctagcgactgaagactttcctgcgctcagcgatctcattcgaccttcaggatcaaattttaaggggaaacgtatcgtctcgaacggtagtgatggcggtggcgaagacaacgagacgatggccgaattcatcaatgatgatcctgtctcgatcaatagattcgcctcaatattttcgcatatcccaaagaagagggtcgaacgcgttctgagagagaacggcatggaatcatcaaaagcggcagacatcctgattgggttgagtggaaacgatgacgagattagacacgtaccaaagtcatcaacgatgaagaaacaatctgcgatctacgccaacaggaaggtatccgatggaggaggggcgagaatccaatctggatcacaatcgacaagtagatcttcaagaaatagagtttcgttggacgattcggatgccgaaagtgatgatgattttggaggaagctctaggaagggcaggggcatgcagaaatggacgagggatgaggatgcagaagagcagagcgcgttggtatgcagaatatctcttgactttaggactttgtgaggatgatggtatctcacctttgttttccgctcttatgatcatcaggactggttcaacagttgcgatcatcaagaactgttgaatgtgacgtgtgagttccatgttttagtctgatcataaggcttcacatacttctttgcattcgcataagtattccatcgactaatttgtactatggttgctatcatccgtattttaatcagcatgctccccggaccaagcaactattatcgtttcccttcgaccatttgagtctgtcgacgatcttcgaaccaagatgaccaagaagaaaggcgtctcgccccgattattcgagagctacatcgagctcatgttgggctaccataaggttgatgctgttctcaaaggatgtgagatggtcggagcagagctggagctcgcaatgagcgcattcaccaacagtcagacaaagaaggaaggttctgatccaaacgcaaatggcaatgggaagggcgccttggggattgtgcacgccgaagtggatgtcgagcaggcgcttaaagttgagacagatccggaaagaaggaaagcactgaaaggatatatccaaaaacagcctgaatcatttactgaaggaatcttactgaaggattatcaggtcagttgtgcacacttttaggtttaatctcaagacacggtgcttgaaaccaagctgaacgcactgccttcttattcttatctagctatttggtttgaattggcttaacttacttcattcgaaaggacttagttgcatcctagccgacgagatgggtcttgggttcgttgcctgcctctattttcttttctcgaagcataaagcctgactatgatcccatgcttctatagtaaaacaatccaagtcatcgcgttcttggctcacttaaaggagaggggaaaacctggtcctcatctgattattgttccgttagtgccattattttccctactaggaatatggactgaaactcacatgtgcaatctttatctcatcagagcttcaaccctggagaactgggctcgagaatttaacaaattttgtcccagtatcgaagtccagacgtactatggtccagcaggagagagacgagatttggcttatcaattcatggaggatgaaaacttggacgttgtaatcactacctatcaaattgctgctggatcgaacaaggatgataaaaaatttctgaaaaagatgggtttcaaggtgagcttcgatcgacttgggcttcatcgaggtatatgtttactgagattatccctttcattctaattcttcagtcggccgtgtttgacgaagggcatcaactgaagaactacaagtctgctagatatattggactcatgtcattacctgttcaattccgtttactgctcaccggtactccgctacaaaacaatcttcaggcatgtccattgttgatctgatgctctttcactctgtccagaatatgtgctaatagattctgtttactttgtctgccggtgattccttggaatttaacaggaactagttgtatgttcacctgctctcgctgtttcggcatgagccttcgtctaatctatccacctaactttgtttcgtgttatgccttggatcgaatagtctatcctcaactttatcctacccgattattttgaagacgctgaggattcccttcgtgcaatcttcaaagttagcactgactcacatgccagcttgttatcaaaacagcgggtatcccgagcgcagaaaatgatgaagtaagctcaaagatgtcgttgttacttgtcgttttgaagaagacaagaagacacacgcgagcgagagtactgatgtattgcacgatactttgttatgtgttttttattatcattgatatcaactcttagaccgtttgtccttcgtcgacgaaaaaaccaggtatgatctaatatatacgcccatggcgttttagcagaggaatcgctaacaactgttcgtctttctgtcatcaggttctcaaggaccttccgaaaaagatcgttcgggttgaatggtgcaagatgaccgaaagtcaatctcaattatatcgagaatccgagatttcatccagcaaacttctcaaaacgttagctgacgatgccgagacgaagaagaaagaaaagactcggaaacgagtgcgggacgatttggagattgacaatggaccggtggtggagaagaagactggcgattcaggaacaaatgttctgatgaaccttcggaaagctgcaaaccatcctcttctgttcaggagtcactattcagatgagaagttgaaggttttggcaaaggatataatgaaagagccggaacatagttagtcctatctttctcaacgctgtcacttttggatgcaatctgattatgaccttttattgggtctcttgtcctttcacttgtgtttgtagtggcgtccgattacaacttgattattgaagatatggaggtaagtcgcctcttctattgactatacattagtctgatctaataaacaattcttttctattttcctaattcgctatgcagataatgtcggatgccgaacttcatcacatgtgcgaaatgtacaaggctactcgaaagcactctctacccccggagtgtttcttagggtaagtcgtgcttcgattttgcctcttgccctggctgaggacagttttgctaaatacagatatcccttaccgattgtgtttatcctcgaacagctctggaaaagttctcatgctcaagaagattattgaagattgccaagctgaaggaaaacgtatattggtcttctctatggtcagtccttctcttctcattctattttattcaacaaacagttcaaacgcgcatgggattactataggctcaactgtatactactctcttcggtagtttactcaagttctcgatattttaaagaaagtgcttgaccaactgggtgttaagtggatcaagctgacaggcgagacgaaagtggacgagagacagagtctagtcgatgaatttacgaacgatacatcaatccaggttttcctactgtctacattggcaggaggaatgggcatcaatttgaccgctgcctcagtagtcgtcttgttcgtttctttaattcttcatttttcttggcctctatcagaaatctggtcacgtcgaagctcatattgtttgtcataacgtttcagatatgatcaagggttcaacccacataatgagaaacaagcggcagacagagcttaccgaatcggtcagactaaagatgttgaggtacgatcactctatgacttttcttgcatctgttgacaaggctgtagaacggctggaatgagaaaacaaaagctgatcttgcttctctttcgttgttacggatgatatattcaggtcatcaccctcctttcaccgggaacgattgatgaagatatcaacgatctcgctctatcgaaactcaagttagacgatgctgtggccggtagaggtgaagatgaggagagcgcggaagcggaaggaaacgacgagttagagaaagagagtagagtgaaggcctcattattgagcacgttgaggaacaagttaggaacaaagctagaggattctggaaagtaacttggatggtgtttatacctgttctctctttttttggtttcggttttttcttcaaaaactatatcaccctctctttcctctgtatatcgtgtctgtcttctgacttgcatccctcggttcagctcttttatatcaacaaacatacaatttaccaccgatagttctcccacatctcctctattctcatcttgctcgcttccatctatattatgtacatgtctatgcttcttgttgcgcgtgtataagtctgcacgattgtttaccaagctgaccaggacataggcaaggaaataaagaaaagggacggaattgataaattgcaggcccgggaaagaaatccgtcgccttgacgaccgaaaaatctacaaatccagcccatcactgaaattttcagcccagtcttgttctaaaagtataagaactcgaaaagagccttgttatcctttgactctcaattttcttccttcttttccttcgtttgttcttttcagtttcattctgtgcgactatatctgcctacaaattgaactgtactggtgagtgtctcctcttctctcttttttcttaccatttcttctctacccctgttcccaccagcctttcctattcttccttaacgaagccaccacatctaccctcctcgcgagggtacgagagcatggagatggatgaaaatgatgatgcaaatattccatgctaatacagaagctctgcccccgggtagcttgccgataactatattcgctctctaaagcacctctgattatctgtccccctcctttttgtttcttcgaaacttcggcctttccgttctgaacaaagctatcttgcaggttagaaatttgagagctgactcttgtttttgtttctgtcccatctataccttctcgttccgtctattggtcttggaaatataagacggaagaattgttcgtggtattatgataaacatatcaatgataacacattcttcgaattagaattggcccagtacttgagaatttccttgagcatttgcacatcagaccataagaacaaaaaatgatactttggttatctctttcggatcatgaagtgagaaagtcccttctgacaacgacgtgacctgtcacaaagaagatgacggtcacaacaatcggcaagaagaatcgtaggacgaaacttggtgccactcaggaagctctacagagagggaggacgaaatcatactatctatagcattaaagcctttttgaggtgtttagttcaatttccctcctaaccttccaaatctttccgatgacagcaacgtatgagagagaactcaaagtcgatacctcaacaagaaggcgtcacggggttctatcctagccgagtagtagttggcaatcctaagagcaaaggttcagcgagagagaaatcttatatttagtctctatccatcttgtggtacaaaacatgaaacagagagaacaacgaacgtatcaacgacttcaaattcattcttgacgtaaaaattccgagcgatctcgtttccaacctgacagtagacaaacactgaaccgatcttctgaccatcgggcgaggtgagcgcttgagcgcgatcgagcacatgcttcaacagcagggcgcctagaccttgagatcggtatgccggaaggacagccaatgtgagaatatgaagatctgatgttgatgatgaagaagaggtagcggaggtagcggaggaagaggtggtagtggtagaaggtgggaaggactcgaaccgagacgagattgaaccgacagggacatctgcatagtagactgagggatatatcgtacataaataatataatcagatccatgtccggacgatatgtacattcagatcgaaatacagattccacatacccagcttgttgaactcttccaaagaggcgtctaggatctcggtataatatttgttactgtacgctacagggaggatctacaaagaagggtagataaagaacatgtacgtttgagaggtgagtgagcatcgacacgtaagtcataagcatcgatgcacttttatctatactaacagcactgtttaattttctcagggttccactaatagcagatcgatcgaggagcgaattaagattaaatcgtgtccgagggaggttccaaaagataaagaagaagacaaagatgagaactgagaaggagaaagcgaaattgaagacgacggacggacacattgttaggagtaaacgaagacagtgtaaccctcgggtgaggtttgatagtcttcttagagtcaagagaaatcggggcggatacagtagactttgtgtccatcgaggaaggatcagcagttgtggtggatgaagtagcagcgctcatggttgatgggaggatggctaggtttgatgggatacagacgaagtgggaatagaagatactgtatgtatgtctggttacaaaccaaactgtaaccatcgcgttcttccttccagcgttcctattcctgttcctgatttccttccctgtccctttctctttctctctgcccaacattcatctggtgagcatcttcggacgaccatctcttcttttcgttctgaatctatcggttggttgatctgctggagaagaaggcctcgtcagctagatacagacagtttacaatcgctcttcttttggttttttcttcatcctgtagcaccaatgtcgtccgctttagaatacatcaacccacgagcagaaaccgttcggcgagctcaggctcttcaggtctgtagtctccctttgtttctctcctctatgtatcctcaagacggacaatatggtgtgctgccgtatgctcaagcccactctgtttttcggctctgttcaatctcttctactggctcaaacgaacgtatcttttaggtaaatactactggagctgtcggtctggccaacgtcgtcaaaagcaacttgggtacgtttttctccccttttcgcctgtctagcagtgtataggctgtctaaacagagtctaagctgatatctgcgttgtacggccctccatatataggtcctcgaggaaccatcaagatgcttgttgacggatcaggaaacatcaaaatgactaaagtatgatcccgtcttgacttgctttttttttctttgcttagttttgttccaatctgaccgtgtcttcccttctcaattctgtatcatctcacaggacggaaaggtcttgctctcagaaatgcagatccaggtagattatctcttcttctctcggagagttgttcttaatactcttccgcaccttacccttgctcatgtgcatatagctaacgcaacacatttctaatcgtcaaaacagaacccgacagcagccatggtggcacgaaccgctgttgctcaggacgaacagactggagatggaaccacctcggtcgtgcttcttgttggagagctcttgaagcaggctgagaggtatacatcggagggcgtccaccctcgagtgatcggagatgggtacgatctggctatgaaggaggccctgaaggttagtcttttcatctgctttcgttagctgagaaggaaccttcccagcattgttgtcctcctgtggctctctgagtgttgggttcatgatatgggacggttgctagcttcagtgaaagcattatctcgagaaagaaaaaagagatgtgctgcatacgtcagaattctaacttcgcttggtctccaaaacatatacacactctttctcattatctacgtctacgctcgctttcatctcgaatcatggtcgacacaccagttccttgacaccttcaaaattccttcaaaatccgatcgaccaacccttctctctgttgcccacacctcgctcgctactaaactccaccccaagctggctaccaagctcgcttccgttgttgtcgatgccgttctcgccgtccagcccccggcacccgccgagggcgcgaccggtgttgatgcgttccagatgccgatcgatttgcacatggttgagattatgaagatgcagcacaagatggataccgagactcagttgatcagaggattggtgatggatcatggagcaagacacccggatatgcccaagagaatggagaactgctttgttttgacattgaacgtgtcgctggagtacgagaagacgtacgtacctcatgatttcttctctgacatcttccacaatatacatcagataggcgaagtgtcgtactcatacttgcatgctcttttctgtccacagggaggtcaactcgtcgttcttctactcttctgccactcaacgagagaagcttgttgagtccgaacgacggttcgttgacgccaaactcaagaagattgttgagctcaagaacgcggtgtgcgatcaggatgtgaactcgaaagagaagccaaagacgttcgttttgatcaaccagaaggggattgacccgatgtcgcttgatgtgctcgtcaaaaacggaatctttgcgctcaggagagccaagaggaggaacatggagaggtttgtctgttgtttagcggttgtgctcgtttagactcaggctctccttactaatttttattgttattgatcgtaggcttcagctctgctgcggagggactgcccagaactctgtggatgaccttaaacctgaagtgcttggttacgccggtttggtctacgagcacacccttggagaagagaaattcacatttgtggaggagtgcaaggagcccaagagtgttacgatcttgatcaagggtcagtgctctttttcaattcgctatagcgtacatgactgtatatcgattctgattacggtatcttgggaaacgtgaaccattcttccatgatccttaggacccaactcgcacacgatcactcagacacaggacgccgtccgagacggcctccgagccgttaagaatgcaatcgaggacaagtgccttgttcccggagcgggcgctttcgaggtgtcttgctgcgctcacttgcagaacgagacaaagaagctcgcaaagggacgagccaagttgggtgtcgaggctttcgcagagtcgatgctgatcttgccaaaggtccttgctcagaatggtggatgggacgtccaggactcaatcgtcgctttacaggttagtctctcctgttctcctcagcttcttgctccctgtaaactgacatttgaacacgttttcgtttggggcgcttacaggatgaggaggctgagggacacgtcgttgggttaaacttgaagacgggtgagcccttcgacccgatttcggagggaatctgggacaacttccgggtcaagagacagatgatccattcagcgtacgtgctttcgttcatacctctctttctacagttcttgttcgactgttttctacatcgtattggcgcttcgaattggatatctaatactactgttttgtcgtaacgggttatgaacgaacagagccaacatcgcttcatcattgctatcgtgcgacgagatcatgcgagccggtcgatcgtcgtaagtcatcatttctgtcacccgttcatagcatcattattcgttctgtcctcactctgtttcattctccttttcacatcccataccgtagtctcaagggggacggccagtaaggtagtttagtcaaagaaaaaggaaatcagtaaagcgagtcagagaagaagagctataggagacgagggaagattcttagaggggcccttgtatccttatggaactgaaaattacaacacgaatcagaagtcgagcctcttgtgctctttccttttcaggaatgtcatctacaatgaaggccataaaaaccaaaggaacaacacgagtttacatgaagaacatagtagacagaaggcagaggaactgacaggaaaatcgataaggaagaatcgaaaatcaaagcaaggaagaatataaaagagcgtgatggaagcgtacggatagacagctgatatctcattgtgtctgcgagagaagaagcgaaaacgaagaaggcgtcaagagagaaggagaaggagaaggagaaggagaaggagaaggagaaggagaaggagaaggagaaggagaaggagaaggagaaggagaaggagaaggagaaagaaaaaacaaagagtaagagaaggcatgatgaggtaagagcgagtccattttgagaagaaaacagaagtaagagagcacaagaactacacgaggagagagagagcgaggagagaatgtatttaaacacacaaaaaaacctgtttatcttttcggtttagctgagatgaacagatcatcgagtgaatccgacccgtcagattccatgtctttgtcaactccgtcttcatcctcagattcagaaagactatcgacgagtcccttcctctcgtccgcactatcaataccaaaaatgggaaacccccaggaacgtaatcaactactgagtccggaaggatgaagggaagagaaggagacgcatgtgaggaagaaaaagaggaatacgtactaataagtctgggcttccacctttttagataaatgcgggtaatcctttccccgatgagaaactcgttctgattcgacatgttgtgcagagctgcttttgctgtctctcgtgctgtgctcagtcacacgtacacatatgcgcgagacggaatgacaggtagatggaggaagaggtaagaaaatacaagaggacgagggatgtgtaagagaaaaacatacgagaacgaggatgttgacatggcactcggtgatagtggtagtttgttgtcattgaatgtctctgactcgaagtgaccgaatttaccctatatccaccaaaaatagacaaacacattttcggtcaaatctcttcgtatatactgctaagagctccctttgtagaataagcgcagatctcacaatttgaggaggagttgaagagacttgtggtccgaacaatgaaggatacccgctcctttgatctcttgtcgaaaactctacagcatccaacgggtagtcttctggtatcgacatgatcgacatgtctcctccagaatttgatcgtatcccttggtgatatgtcgggctccgtactgacggcgagtgaagttgagtagaatgtatcgcttcctctgggtggcctgcccgtccgacacgatggacagtatcctctggatcaaatctcagcgtcccttgtctaggaggttgtgaatggtgtatctggacttgttcgcccggctgtgcgtagtcatgttccttgatcaccgacgtgtcagcagagcttgttcgagagggcggtcgatcggtaagttggtagcggggtatattggataacgcatatggatccctaggatcgtatccagcattaccgttgggtcctctagatgtttgacggctgcttacactacctgctcgacgagatcgagctcggatgatagatccaattgcaccgaagcctcctctgagggcgtccacaccaggttcctccgttccggtgatcgccttctcttgatcctctgttggacgctgggcagcgagcaaaatcgttgatttccgatcaagagacgtgagagtctttggatcaactttgctcatctggaggatagtgataccagcacagatgactaagaagcccagcatgatggtgattatctgtacagcggaggctttcagtcctttgtataggatgatggaggtaaccagagtacatgtcgtgaacgtcacataataggttggagtgaccatagacgtattaaacagctctaaggctttgttcaggaaattgatctctgtgagtagtgtcccaatgacgaatacctagattgagttcaaaagcgagagtcaacataggtcttgttttgctaagacgaaagtagaggataaagctcacgaagagaaaccagaagaaccagaatgtcacttggttgttgcctcgaatactggtcagaattgaggccccaagtccctgggtacagctgaccgacagtccaccaatcacactgcaaataccaatatgaaccaacatgtttgactttccgtactgtttagaaaataacaatgacaaaatacactgttaccggccaagaaccagtagaataacagtatggctatagtttcaggacatacccgcggaacgaggaagaggattgccagcacagcggataggatcatgagagccgaccaaactaagaaaccaggggagataaatagtttcatgaacggtcggatctctgtcacactctgctgttcgggagaattgagagcaatgaccacagagccaatgatacacaacgcgcatccaatccaacctaaatgaagttagaagaactaagtattgagtacgtgttgttgtcaaagaatctgtaaagattgtacgagtactgtcgctcaccaaagaaagttagactctcattcagaaagaacgacgagagaatcgcgcacacgaccacagataaagctcctaaaggctgagatttagttgcaagaacatccacaaaaaaaaagagcctgcacgttagctcatagacagatgtttcctccgaccgatctcttctttttttggggggaggggttttgagaaaataaaaaaggaaaggaaagggaaagaacgaacagtcactagaagcgcttctgtgaatgcatctgacagtagccgaataattctgaaagtggatcaatttgataccctctttgggtattttccaaagaacgatatatactgacaagctacaaagttgaatcttcgtagtagttcgagacgattgtccacattttcagctttattcgtggacaaatcggtatcaaaacggtgggcttacatttctcctagaaccatcagcgtcatctgttagacatgcatgataaatcggcagcatattgagtttacatatactctcgtcttctctggataaacaatcaagtgaagatagcactcactcctatccaccatacccagtctttgagatacgcatgtccttctccagctatcgatcccgactttgcctgtgctctaagtagccccttcttcttgattacgaagcttgctgtttgcgtatcagaccagaaacaagagcaaacgaccagatacgcgtacacttggcatatttagctttgtccttcacgagcgaccgacatgttctaagtttcttcatgcatgcaacgctctggagaacggagcgatagacagataaagcataaggcgaacgtacacccaatgaaaatacctgataagatggccaaagtgagcccgatgattctggagccaggacaagcgatcgttgtcggcgcgagttagtcatgaacattcagatgccagcttctcaatcgaacgacaagaaaaaacgaagggtcatatacgcacttgaaggaagcaggttgtccagatgctacaaaaatccatgaacagggaaggagattgcaaagaaaatttcgaaggtgaatgggtatgtgtgttttgatatacgcttctgcggctgagatgatcaaggggcaggacataccagaacttgtggccgcactggacgcagacgcggttgcagacgtcaaggttgccgacacagatgatgacattaccctgcttggttgtctatcaagggagaagaaagccaaggagagaatcgatgagtgatgcatggccgcaggaggagaaccggctgagctttggcaagctcgcggaccagagtatatgatgaccgacacctagagggtagctcgcaacgcgatgtttcaaggtctgacgaatgagctcacctggctgaaagctggggagctctcacttgagaccgaatatgaaaacagatagcaagaactaggggtccagagagatactatgggatcagaagcctacttgtgaggatgcaagtaaaaataggcgagggtgagggtcgaagggtgatgaagatcaatagcaaagaagaaaaaaaagaaaaaaaggaggttttgtttcataacatcatccttcacatcctcagaccatcctcagaccatcctcagtcgttcccatcaccatcaccatcaccatctctgtctttaggctgtcctcagaacatgatctattcactctatatatacgataggttggagccgttctcttttttcgccttgtggtgatgtaaatctactaatcgtttctagtcctgatctcctcgttcacttagacactgcgatatcgtgtattatcaatcttggcatcgtcagactcccttccaacgagcttcaccaggatctctccttcccgaagtctctcctcacgtatcactcagcccatccgacggtcagatcaattcagcttctgcaccaaagaaagctgttcatacaccatcaagtaatttcgctgcagctggttctcccgctcaggacgcgggtaagagcggggctgtcggatctggcaagggaggtctaccattcgatgaagaggccaagctagtttatggtgtggtgctgagcttacggaatatggtcaagaagctcaccggaaggtttgtctcttgatatctgggaccatgttcgcttcccctttggttggtgtagtatgcttataatcgctctatatatgatacccatcatgctctctgatctcaatcaccttcgcttcgatcaagtccgcaatcaaactttcaacactacgccactacgtcatacgctttacatctgtttgaacctccaaccggcttgaaattcatcttgttgacatcacccagcgtggactcaacatcagcccgaactgctttgcgaacaatgtggggcccatcaggagcctacggtcaatgggtcagtccaaacccagagaagggggaaaccgatggtggagaaggtggaagagaaaagagaaagggactggacagcgagtgagtgattcgtaatttatacatctctcagcatgcattgcgcttacgctgacctctgtattttcgtctatctctctgccatgatcctacttctttcgtcagacaattccgactagctatagatacccaaatgcgctctatgccatactttgcaacaccttgataatatagataaatatatgaattgtccttgaaagcaagccgaataccggtttgacctacgatgtgatatctatgcgtaaaatcattccatacaccttatctctatctacaatatgttcgtcaatcctatgtgacgtctctgaaactgccatgattctcaagagaccgtgtatgttgttggatagaacagctgaggagagagctggaggtcagagaagccggtatccatggcaacgtctctgatgctcaccggagatagccttcattcgctcgttcaacacccatcgtccacaaccgctctgtttgctctcctcgctctcgctacaagatggaatatgacttagatcctcgggtggagatcgtcagtgctatcatttattccttcttcatatgtaggaatggtttgtctcgcacaaacgaggccacctaggtattccttctctcccaacccaagcacaactcattctgctttcttctccatctttcgattgatctcgcacagacaaatatgatctttacctggatgatgagcgatgctatactggatattgctttagaatcgcacgctttcattcgaaggggaagagaagtgtgtagtatatgtggtttgatgtgagtagttgggctattcactacatacaactcttgagtatgaggtgaaagggattgaattatagtccatgtcgatatatcaacatatctgatcctttttacttcttctcttcggaccacagttgcaaacaaactggctgtatgtgattgaatttcctcccttccttcatgagtttgagagaagccgactacgggctcactcgggatgtcttctggctcactttcatgacctgggctcatcaaatatatatcaatcacacttcacctagcccacgctcctccgatctctacgtcggtgaacagatcatctacaaactctcccgctccaaactctcgagcgtcgacgcctgctccttcggctgcttttccgtcgtctgtatcgaaggacttcaacaatccaacgacagatcctagtagtggaaatgtattttataactgtattaactgcaaccgacccgttcgtcaattcctttccccttgtaaccctttgcctagcccagaacacactgactcacttctttcaagaatgataaatcttgcaacgaaaccgggatgattgatatgatggcgctcatctcttgagtagacggttagcaatcgttacgcaccccacctgtctaaatgcttaggactgggtcaaaacagacgagccactaccggacgagcggcaaccgctcaaagagctatgtacgtctctgattcattaccgccctgcgtcatcctccatacagtactcttgattcgtttttaatcgaaggaaactcttcgggttcgatagaaacggaggcgatcaggtcggaggatcagacgctgagcagaaaagtaaggttttattataccaaaggcaacgtagctttatctgctgaatcgcatgttgccccatcttcaatgaaaatgataaacagacagattcctatctgattctagatacaagaaggtgctctcttcgtctccctgtttctcttagttcacctttagggtgcatacaccaacctccatcatttcgatataccttacctctgtgttgaaactgaatctaacatcttgttgatttatataaaacaatttttgtaaaaaggtgtcgacaatatccaaaccgcccaaacccaaaaagacaaaggcggctgcaaaaacacctgtaccagcgtctgctatgccagcttcatattctacaaagacccgtacgttttatgatctcttacttggtcttcatctcgcgctaccccgtgtctatgccatcttgtatgaccaacatattatttcccatcgtacctctcaaatagtcccgggtcaacaaccgtatacggctccttcaaatttaagttatgggaatacaggctatccaaatacccttagtgatgccgggtttgaagaagacgatgatgatgatagtgatccaggtggttctgtcgtaagcagaatagggaacgaagtcaatggggacggggaagaggatgatatacccttgaatttcgatggtgactatatgggtacgtcactttttctcctcatttctctttcactccgatatgtttatctgattctgtgccgatgagatgagggctgactctgaaattgtggttttatgcagatgtggacggagacatggtgtatgtttcttcttcctcttaccataacatcgcgttgtttaactgaagcgctaattcaccatatgctctttcctcgcgcgcgcatctgtatacaaattggattctacagagacacagacagctcggacgattgaatgacgatgtttttccacggattatatatatatatatatatatatatatggggggaatccttctgccctcacaaagatgaaacaagagggagagaacacagtgcagaaactattgtagaagaaaagcttacatattcttctctgtgaaaagtagaggtcttcttcttcagggtttcaccgagatgcttctttaatcccatgtttacagtgcttcaaaggcaatatgagctggtttccatctctttgcatcacgatccaattgagtaaacaaagtccccataacataagacccactactacgactactacaaaacaattttctgctacttagtttttgacgcagaagaacgctaagccttctctagctaacgcagtctcaacctccagctgcctctcgtcttcttccatccatctatcctcctttgataacttaagagttgctcgtttatcaggacctgcttcgtgtactttgagtaggttctcgaactttgtcctttttgcaatgagctcaagcatcttccggggatcagaatgaccagtaaagatgatgagacctcctcgagaggaaagagaactgtggaccttctcgatttgagcgttgagagacgtcagaatcgatgtcacgtcaggagagctgttgatatgagaagtggtggcgatgtcggcttcggcgttgatggcatcagtatcagtggtgattagggagggggtagatgcgactgatgcttgagattttcgagcccctgatggtttattgaaacggatagggaatctcgtcagccaaaagctccgaatgagccacttttgcccgaaaactatgtcttcttgacttacatcccaatccttcgctcaaagatgtcaacctgccaaaagaaaaccaatgggatccgacgactttactcaactcctcaaccacctcgtcatctgacgcgcagtccttcaaggttgttacttttgtttcttgagtgaggtatctagctgggtttcctcggtcacataacgccgtcagtttcggctcaccagaagccttggtggtgcgttgaattttttggaagattggctccatttcggcggctggatctccgaaggcgggacctgaaacaagataaatgatagagggtgtttgttcagtgaaataaaggagggaagaaaggaagaaggcacgtaccgaacttgagcttcaaatgcaaaagctccaaacacgtcctagcgtcttcttcagagtcgtgacctccagtgctcctctggatatcctttcctaggaacgtctttgccagccatcgaagagacgtctttagaggaggtcctctaggatgtttaaagatcacagcggtatcgatacaccacggatgtcttaatttgattgcctttaaatcggattcgagcgagtgtccaagtaagatcgtcgggcgctcgaggagatggaggagatgcgcttgaatatcaggcaaggtcagtgtcgcggtgtcgagagcttctttggtaattccggaaaatctggagaatagcgatgtttagatcaatttttgaggcaacggtttcttgtaagatcagataccgaagagaaacgaatatgatacgaactgagtcaagtaatccgttacaggtttcgaaggcttaacaagctcatcataaatcttgtttctactttcgaactcaactatggagattcgagccaattgaggaccctctagagtcatacactaaaaatcccagcacaccaatcaaagagaaaagcgttagaacaggctctcggaacaatcattgaaagaaatagaacaagtgaacacgaaccatctcgcagtccaaagccaacaccgggattttgtcttgcttcttcaagtcctctagttcagacggcgttcccccaaacccagtctcaacccaaccatcctcatccgcattcctgccttccttatctggatagtactctttgtatataactctttggccatcagacccaacggcgagtccagagtccacaggcaaaggcctcgatcgattcaagatttcgcctgcgtcgtctggattcatattgggcagcgcgatcggaccgcttaaaggagaggaaattaaatgagggattggataggagtggtctttcatttcttgccgggtgagcaaatagtgggagggtagtgttggaggaagagatgttgcagcccctaaaaaaagttattccaagaaagtgcccgttagaaagagtagaccacacggccgggttgtttcagaagcaacatgtggagcccaatgctaccaagaagagagacctactaagcagcgcttctttgtccttctccttcttctccttatctttcaagcttagtggactttgtagaaacgctgccagcgcgctatgcaactttgtcctatctcccggacttctaaccggacacgcatgactgaacaacctctgaaccactggtaaatttgtcaaaactccactcttgtgagttccatgagctggtgggatggcgaaaggcatgttctgagtaacagcctgaacaggagcgcctagtagttgagggctgattcccggaatgaagagtacggttaatgaagcaatcgatggtttgttctcaacttgaatccatgtcggcttaggggcatctgagacgatatgaagggctagatctctaagatgctggttgaagatgaagaatatgaatctgacattgtgagaatgcacgatgattgatgtgcaaatattgtgtcaagatataaggcactaacagcaattccaatctttcttccatgactaaacccattaacgacgaattgaaatgagggaacgagcatctgttgtgccaaatagataaccaaacgtattcagtttagcatatattatcattatttgtcgactcggtcttgaagaggaaagaaacccttcaaagccgaggggagactaaaacaaaaccaacctgcagtttggcctcctgcttctttctcttcttgtcttttctacgttcttctcgatcaataggagacggggatgtagctgctcgtttggctgaattcggtggtgaaggcatttttcttaataggccatgaccagattgaaggtgggtaggacgatctgtctgaaggcggagggaagtgttgggccttttgctcgaactctgagggttttctttgcttgtctctggcgatcacgtgcatagtcacgtggttcaagagcacttctaggattttatcggagaacaagaccactgtcctccgaacgtccattcaggagacgagaacacgtcgaccatcatgcttttctttctaacatttgattgattgaggactcttaagtctgatatggcatccttaagctatagctcatcagaccgtacctagattacttctccctggaagacgttggtaatcttgagagagacccttgcctcgaatcctttacagaccttggacttgacctagtaagcggaacagttcattttatggagaggaaaagaaacttaaagtctaaagacaaagatgggagggtgactactttgcagagagtgaagaaaaacgaaagaaacaagaaataaagagacaaaacaaagaggacaatgaaccgcaagaaagtgcgaagattaagaaagcaacgtcaacccaaccgagcaaacctcttcccctaaccgcgttcataccaccctctgcgcgacagtcaccaataccttctcgttcgcgatctcaatttcctcttcgaatagcacttttgcactctcgctcttctgagcgtagtccaaagcagtgcttctcgtctccctaccgatcgcctcctgattagcttgaatgacaccggccatctgctcgctcgcatttcggtagaagacatcaacgtcatctgtagcctgaagcccggccttcttcctcaattgttgaacagaagcaataaatcctcgggaaagtcccttgagaacgagctcaggagaagatcggatatccaacacaacgatcagctctccatcctctttagcctcggctttgtcgcccatacctccgtggaagtcggtgttaccggtaaagtcaacagaggcagtgacggtgatgtctccagtggtaagagtttggccagcgacctcgatcgtacccgtcgacttgaactccttgacctggtccgagctcaaagcgctaagggcagccttaaccttgggcatagctcctcggagtcgtcgaccaagaacgggccaatcggccaaagccttgtacacaacgttcacgtcctcctctcttgaagtgtatcgaacgctctcaatgttgagctcagaaagaaggtagccctcgagacccttgacatcggccaaataggcagggtctgggtggaagatgacaagctcggtcagcggggtcgtcttaagatctagcgacttgtcgtctctcagctttcggccgatagtgatgacagagagcaaccgtcggacagcgacctgaacggcttcatcagcataggcctccttgggttccgggaaaggaaggaagtggatggatcgaagatcctgagtggtatcctcggtaggagggatgaacaccttgagtcgctggtataagctctcagtaatgaaaggagtgaaagacgacatagttcggcagagagtgaagagagcctcgaacaaagtgttcaacgcagtctgagtatcctcaataccatcggagcctttcattcgctttcggttgaatcggatgtaactgttggtaagttcctcaataaggttgatcaaccgagggataacagtgtatagtctgtaggcatccatttcctggtgaacaattttgatcaacgactggcaccgggcaagaacccatcggtccatcacgttatccgaaagcttcgcgttcggatcgtacttgaagtcaattccgtgtgtcttcttaaggatagcaacatgcgaggcaaagaagttgtacgagttgacccaagggagaaggactcgggagataacaagcttaacgccctcttccttgaagttcaaattatctcctcggacaataggcgagtttaccaaaaacattcgaagggcatcagctccgtatttgttgatcacctccacagggtccgcaaagtttcgtaaactcttggacattttgcgcccatcagcagcgaggaccaaaccagagcagataacgttcttccaaggcgccttatcgaataggtgagtggccaagacaagcaaggtatagaaccatcctctggtctggtcaattccctctgagataaagtctgcggggaatccaccctcaccttcgagcttctccttattctcgaaggggtaatggttctgagcgtaaggcatacttccggactcgaaccaacagtcaaagacttcctcaactcgtcgaaggacagtcccaggggtcttctttgaaggaatggtaagagcgtcgatgtcatgtctatgaatctcagtgatgccggtcttcccagtgagctcttcgagttgagcaatggaagagacgcaaacgacctcggacatgtcatcgctgacccagagtggaattggggtaccccagtatctgtttcgcgagatgttccagtccctagcgttcttgagccagtttccaaatcggttctctccaacatattcgggaaccctaaagacatagtaacgattgatgaaatgttagggcgtaatacaatgatgcagaaataaatatagtggtgatatgatagatggacgaaccatcgggtcttgttgttgttggcaaccaatcggtctcggtaatcctctaccttgaccatccagacaggaatcgccttgtaaagcagaggagttcccgatctatttgatattcacacaaccaagagtaagtatctcgtcaaattattgagatgtgccctgacagaacataaagagaacataacaaaacacgaaccgagggcagaagggataggaatgcttgaggacaccctgcacgatgagccggcctcgcgttttaagaagcttcataatctccttatcggcatcctaagaaatacccaattttaatgacacaagattagctaatgcatttcgcatctggcccagagtgtttcttctgatgcgatgtagatagaagatatacgaatacagttaagtagtacgaacctttacgtagacaccctcaaagtcaggcacctggtttgtgtatttgcccgtttcgtcaatagggcaaggaggggtctcatccttggtgataataccgttctcaattgcgattcggttatcgtcctctccgaatgctggagcttgatgaacaagaccagtaccggcatcatttccaacgtagttatcacaaacaactcggaaagctcggtcttcaaactgatcgttgttcgagtaacgtcaaaaaaccattggacaagcaattagcaatatcacttcttgaatacctggatgatacaatcctggcgcaagaaccaagaaactcagacgaacctgctcgacgaagtaatcaaatagaggctcgtatctccaacctttcatgtcctttcctaggaacgatccgaccttcttccatttggccttgtcttttccagttgggtctttgtaaagcgtcttaagtaagtcctccaaaataatgaagtttcggtccttctcgacatcatgaatcttgagataggtaaattcagggtgaacacagattgccaagttggaaggcaaagtccaaggtgtggtcgtccaggcgagaagagatgtcgaaggatcgtcaatcaaggggaaagcgacggtgactgtatataaatttgacaagaaagattgtaatcaggggacctgcttagggtgcacgaaaactgaggcgacgaaaagttgcgagacagtattctcaccagcagggtcgttaacatccttgtaggaggatccagcctcgaagttcgagagaggcgttcggagtccggtggagtacggcataactctcaatcctcgatagacaaggtccttgttgaaaagctggccaaagacccaccaactgaacaagtttcaagacaaagaagcaacaagattggtatgcattatcacaacacaaaaagagaaagcttaaaaagatcacttacacagactccatgaaagtaggatcaagtgtcttgtaacccttctcgaagtcaatccatcggcccatcctctccacagtcgatttccactctccagagtatctcatcacctaatgcacatggtagcccaattatccatatgcaagtcagatccaccgcccacccaaagtgtcaaatccggaacccagttatagaattcgttagccttttgaatcggtaatgaactcattctacgaacgaggtacatcaaacattatgatatgagagacgaacgatagatcgacactcgttgttgtaagcctcgattcccatcttcatcacatcctccttcccggtgataccgagtttcttgtcaatctcatgttcgacaggaagaccgtgggtgtcccatccgaaccgtctctcgacgtggtgtccagtgctatgggcatgtcgggtgataatgtcctgttggattgtgaaagaggtgaaggcaaacagcgtcaatctcagcatctcggtgggcttttcactgagacagctcttggtttcagcaggtaactacaggatctgcgagaggcggcttgaacgcccattaccccactctctttccatttcctctcactagctcatttttcagccgacgtgcatctcaaatgccgcccaccctcgccatctacggatacttctctctgaggtgtgagatactgatcagttaaagtttgagtaacgaaccttgacggtaccggcaagcaagtgaccgtggtggggtttaccggtagcgaacggcggtccatcaaaaaaggtgaaccttggcttgccctcggactgcttgagcgaagtttggaaagcatcaatgtctctccagaattgaaggacagtttcttcttccttagggaagttgaaaggtcccgctacatgttttacccaggttgatgaaggggtacaatcaacggaaggaaggaacgaatgattcgagatgtagtccggtcggacagacaaatgaatgatcattttcgcatagggcacaagaaaaaaccaaagaaaaagagaagagtaaagaagatgagtttcgaaaggcacaacaacagctaccaaactggagcctctctaagatgctcccaccagtctaaccaagtgctcgatacgtaccgtttgggggcgggaacgacatggttgttgtattacgtcttctagaaaggaggagagaagaaaaaaaagacccctaatccactcatcgttccgtccgtttaggagagacgactttaggcaagggcgatttgaacgttgtcacgtgatatgattgtaacccacacctgtgattgttcgcacacgttgtctgtaacacgctccgacgcgtcgcgtgtgtgcgctcatttatctcgtttcgtccaaaagttcattgatcttccaaaagcatcagcatcgatcgtcatgtccttgtcaaagtctttggccgttcttcctcagggtaaggagacgtgttcatcttctgctcacaggtttaatcgatgagctcatgactgacgcgcgt

SEQ ID NO: 1315 - DNA, 30316 bp, Xanthophyllomyces dendrorhous
attcaatccggtgccgcaaaggatacatctgcctccaatcagttctggcgacttccgaacccaaggactggccttccttctctttatatgccttaccggcgggagtgcgatggaaaacaaggaattcttgaactgcaaaagattagcccagacaaggaacgaagttggttcgtggaggatgaggttattcaaggttgatactatcttcctcctcctctcgtcagacgcaaccctctaatagaattaacttacattcgttgccggtatgattcgctctcacatgtgtatgcttatttgtcataaagacggaaagctcttgttgttcactccgatcgaccctgtgttcctcttactgccggctttagaagccgtaagctcactttgatctgctcccggtataatccttgagctgcctacctctgatggtcgtccgatctttctcctatttgttgttcttgtaaactctggcaagtaaaatagactaccacatcacctcctcgatttcttcttcccgatcaactttttagtactgcctcaacccatccttcgttccttcttgcgcctccgtttactccttcctcaactgatcttaaagggaaacggaagcaagcagatagaggggaagagagtgatgaggctggaaagattgagtgtgaggatgtgatccggcttggggaactagaaggaattgaggatcatctacttaagatttgtgatgttttgggtatatcttatcttcctctcatctactcatctttctttccctccttgtagagcgctaatttttatatgtgtttcgcctttctacttagaattggagccatccaagatgaaagcctatagattatcgactctcaagcttcaagcgtacctatccaagaaagttaacaggctttcagtaaaagagacattcaataggtttccagctcttaaacgaggtctggctagagatggtttaggagacttaacagaacaaggacaggatgattcacagaaagaggagagagatcaactggagctcgtcagacaaggttcgtcatactcagcaaattcttcttttttgtttccttcatcttcttttttttctcatgtggcgcatcgctgacctagtgtctgttcacttgatcttgtctcctttgctccttattaaacagaagctcgccttcttcagacacttcaactcctccgaccgtatctttctccgcaaacctacacctccattctcaaactcttccccacccctcatctcacaatccacttgtccaatctatcttctcacccttccgtcaattctcaatcaacaactgaagaccttgaatctctctttcttgataaagccaacgaaaccgagaaagctctggcggagaagaaaagagctgcaggaccgatcagtcaaggagtaagcaagttgaagaaagtagatacgagaggaatgagtaaaatcagtagctttttcggtaaaaagacgagtgttgctgaaggtgtcgggagggacaagaaagacctggagacttaaacagtcaacggaaggataagtgcatatacatgtgtgacttgaatagtctatgatagctactaggcatgtgaacgatgaacccgaatctctacgtcgtcgagaccattgttaggaagaaaacatgaatcatctcaagaaggaatagcccagaactactttgttccttctacacccgtctgtaaagaggtcccttcctccattgatcaactctagccgccaaacccatcttccagccagcaagtcctcctccgccaagcacgacaagtgcgcaagctacccatccaagcgtgcctagaccttgagacatcgaaggagccggagttgattccaggtcgatagtttcgtcagaggaagaagaggagtcctgtgagtttaatttcgatttattacgatttccgttatcgtcgccgacgagtgatttgggttgtcgaatggaaacgataaagagacaagtggtggaaaagatagaaaccaaagaacaggagaagatttagtacgaaccgacctttttttttctcgttttcgaaaggtggggactttaaagctcctctcgaagaggtacctctttgccagtctcctcgtcaatgatcttctcgatctcgatctataggttattttcaaaaggagtcaggctgatatttaagcagaactaggcatcaacaacgaggactaacttctccagagtcagcgatggtgacagcctcgacaggcttatctcctcggcccttaggcacggcttcgatagctttgacaacgtccataccctcaatgacctttccaaagacaacatgtcttccatccaaccagctctgtaaaaagacgatttttattcgttagaaacctccaagtgcataaaaaggaagcagcgtccaaggacaaggaacgtgtgaacgaacagtgacgacggtgcagatgaagaactgagatccattctgtagaaagcagatcgatatcgaaattagagaccagagaaatagcacgagacattagcgaagacattggatatatacagaaacggacgacttacggtgtctcgtccagcgttagccatagagagcgttccaggtccggtgtgcttgagctctgtaaatcgaagtaatccaggcgttaaaatgaagagctttagggtaattttgataaggaaggggatgagaacacctactgaagttctcgtcgtcgaatttgttaccatagatggactttccaccagttccatcacccttagtgaaatcacctccctggatctactcatttgagatcggaataccaagtccaggctattatcagctcgtgtcgggcccagatcaaacttctactggaaatagtttaccatgaagttattgatcactcggtggaagctagagcccttgtatccgaaacctttctctccagtggccaaggcccggaagttttcctacgcaagtgcaattcgagcgatatcatctgacacgtcaatgactacgcaacgggcataatcataggatcgatttgatgaatgcagatacgtacaacagtcttagggacagtagctccgtagagtcccatagtgatccttcccataggcttccctccatgctcgatgtcaaagaaaacctatgaaccaatgtgttagccgtaagaaaagaaataaactaagcactccaccttgtatgtttacgatgaaaagcgagatgggataaagaaaaggaaatataatatgaacgcaccttgtgagtaatcttgggtcccttgacagcctcagcagtagaagagaagagccagatggaggacaggatgagtccaaaaaggagaacagagatttgcttgaaagaaagcattgtttgtgatggttagagatggaaagagaaaaaacagaaataagaagagtgtaaaatgagagagcggatgaataaaaaggggattaaccctaacaccaatgaatcctatagattgtatcttctttccaattgatcatctacatagctatccacaagtctttctggcagaaaatagtgatgatacctgagcaggcgacaggagttttcaagaagtgaaaaaatcgaaggttaaacaagatgagcgtagaagatgaaaagaagagaggcgcacatcaatactatggatattgtgctatgaagttgtgttcaggatgagcagtaagggaactttgagaggagagagaatgttacatgtcccgttgaatagactttgatccatccattcttctccatctctcttcactctcttcacccctcctcatccccgtcgatcatggcagacttttcaacagctctttcgacctggcgaggtacatgtccttttcgttcatatttacatctcatgtgtgcttagctctttccgatcagaaccatcttgctcattgttttgttttgttttgttcgcttacttcggctcatgtgtacatcatgcatacaaagatatcaaccttaccgacttgcaaaagtccctggacacaaccgccctggaactggttgagaaccagaaggagaatgtagtaggcaggaagaagctcgctgaacagaccagaggtgagtgctcgatcacataacctatttcccatcttcttctaatcttggtgatcgttttgatccgtctgatcactattctcctattcatgctactggatgtctgctctacccttgtctgattttgtaaactaatacactagagttcaaaaagatcccgacggatgccgaaaagctcgagtccatcaagtctttgttaaaagcctaccagtccgagattgaccagctcactagacgatcaaaagtagcggagaacgcctttctaaatgcttacaagttgttggccgaggcaccggatccatatcctctgctcgatgcagccgtcgtgagagccgatcttaatcttctgctatctcgtaacctatgactgacagtgcgccttgtctctcgggatctgggtgagcgggtttcatctcacaggaccaaaccgtaaaagtcgccgaagctcaagtcttggagagcgaactgggaaggttaagggaggagaaccaagaactgaaaaagcaggtcggagagattgctggagctgaagagaagaggaaaaaggctgagaacaaagtagacgccttggaggcgaaggtccgtcatctccttttcttctgagtatttggttgtgtaaagtttggactcacttctatcttgtcttcacaattgatgcttcatgcatcgccattcttgcttataatattgaacggtatagatggaagaactgattcaagaacgggtaactcagaaggagaacgaactaaacgccacgtatgatgaacgtatgagaaactacgaagagcggttcgttttgtgtcctttcttgttgtttcctgcctcttgtctacttttacaacggaaaggtggcatccaaacatattgttgtgctcaaaatgtctctccgactttggtttgagttcatagagaacaagatctgaacaaccaacttcgaacgactaaatcccagctgaccgaccttcgcacaacctcggattcaacccaagcccggctaatcaaggcgtctcaacagcaggataacgaagtagtcggtcggatgagtgagctggacatgcttatgggtgatctggaacgagccaacggacgtgtcggtagcgtggaaagacgaaacgtatgtcaaggttttttcaaaagatcaaccggatggcgcatttaataactttcttctcgcaaattggtctgtcatgtgatcatataggagatcctaagggcagagatcgaaagtgtcaaatctggttctcaatatgccgaacggtctgtcgttttgttatcatcaatctctgactaaccgtacgtactaagcagtcatccatccttgctcgatgaatgtatgccttaaatagggtcaaacagttggagtcccaggtgtctgagcttgaatcagaatccactcgactacttcgagcgctggatctggagaaagactctcgaagctcgtctgaaaagacgttgcgcaagaaaatcgaggaccttaacaaggagatcggtctaaaggtgcgttactctccttcttaagctctccatcttatcaactcggatcagctatcgctgatgccgactcttttcttctcacttccgtctttgatcttgtgataggctgcggagattgaacatcttaggcaacgtgctaaagaatacacagattacgatgagatcaagcgagaattagaaatcatgaaagtgagtcttgtactttgttatctccggcttgttcggagaaccacgtatattgatttcttcctttcttgcaactctataaccagtacgtcgaattcggtgacgtcgacttgagcgaggaccttgagaatcgcaatgaaattcagctgccaaacccaaatgctgctaagaacaacaagatcaaaaaggaaggagagtctttggaagagatgctaatcaggaagaacagaaaagtgttggacgagctgacaaagcttagggcaagtccgctaatttttactctcgatggtggtattcagttttcgattttgtctgaattcacctaagatttctgtctctatatctgtttcaatccaggtgtcccaagaagaatcttcaggagcaaccactgagcttgagcagatgcttcaaaccgttcaggccgagctagagagacaaaagaaactgaacgagcggttggagaatgacctactgcagatcaacaaacccaatggaggagctgtcaagacatcagtgtcggatgcacacagtggatcgaatgaagctggatcggcagttgggggagcaaagagtggagggttagaaggattagagattggtacgggttcggttagtcgcatcttctttcaagatgcgttagcggcttctgcagacacatcaaactgaactgtcctgtggacattttttggacttgtgctgatgcgcaggacaagacgagagcttctcccgttccgttccaatctggaagctctgataattctatcctccctatcgttacgtctcagagagacagatttagggcaaggaacgccgaactggaagaggtttgtcattcatcaacctaactaacgtgttatcaggaaagaaaggggtctgactgtatctcaactctgtctcttcaaatatgattcttctaggagcttcggaaacaattcgagtctatttctgagctcagaaccgagatcaagtctcttcaagcagataacctcaaattgtatgaaaaagttcgatatatgggttcctatcgagaagactcctctgctgtcgccggtccatcaagctactactcaggaaactcgtccagtaatcttaggactggtagtggtggaggattaggaaacttgggcatctcgggtttggcaggagggaggggagatgaaattgggaagtacaaggacaagtacgaggattcgatcaatccgtttgaaagcttcaaaagcagagtatgtaattcttcttggttcatcagtacttaaccctcgtaggcgtccatttccgtcctcatgatgacttacatcatggatcttgaaattcgaaactttgattcggggtcttggcaggaagcgcaaagagcgattcaggcattgaacccaatagaacgtgcagtctttgcactctgtaggggaattatcggaaatcgacgcgcgcggtcaatctttgtcgtaagttttctctatgactctgtttctcttggccttgtctgagctatacagtctgtcgactgactatctactcttcatgctttgatgcgttgaaaacggattgatgtagttatatgcggctttgttgcacctgctggtgattcttagcttatggggttcattggcgagtggcggtggagtagatatcagtgaccctgttcagatgccgcctttgaggaggtgaaaggcgaggatcatactggacttctttcataacccatctctatactttctcgcagtattccctcttgtggcttttggttgacttcgtagacgagttaatccttcttttactcaccgtctcacaaacaaagagaagaacgatgactcgttggtcagctttctttgtcatgtcttctccctccatacctttctccttttatctacatttaccttctattgtacaaagattgaacgaggaacatatgaaataatgtacaatttctacaaacgtcatatcagtgctgggatttatatattgatacagctttcttcccaatcagaggaccgttcgtctgacccagaactcatttttggcgaagcttccttcgactggtctccaagggggaccttgcactatctcaaatgtgttcgggtcaaactctgatttctgggtgttggttccttcaactccagcatcggatccgaaaacaacgagcctccgacccgcctgcctaaccatttccctttgcctcgccctctcttcacctgccttctgagcatctccctctgacacatcagacttcgagggcgaagaaatttgtcgaataggatcaaaaacttcggattcgattaattctgtagagataggcgtagccgatcggtcgaggtgggtcaaccacgcttgatggatcgttcggtcgatcggttttgtgggtttgttagatcgacagcgagccgaacagtacttctggggcgtatcggtagatgactgtgattttgatcggggtgctaccgagcgcacatgaggattcaggacaaagacatgagctgttccatgcttgagaatgaagaatagaagaaggataggaagaaggtgatgcatactgatgactctggcgcaagatcgacagaatacgttcgtcaaaggtgacaagggagggggagcgggtgccgatttattcggtcgcgaatgggtcatcctgatagacagatacgatgtatgcttatactgaaaggttagaggaaggaaaataacttggagtcgattcatcgatcattcgaagagggaattcgagaggaggagaaggcaaataggaagagagtatgacgaggaggatgaaccgatgacccgctcgaaatcttctcacgactaatcttacccttcttctatctatcgtcgaccttctcatccaatcggttcacctctcctcttgtccttaattcttccttcgctagcacctcttcaaggcagcctgaagaacacataggcaagcgagcggacggaacgaaatcaaccgattaaagggatatcagttcactccgatcttgacggactcctttcaaacctcccgttctccagtttctgcttctattctacaggcttctcctccattgatgaacggtggaccatcttttcaaggatctccgtcgacagcgacgacaaagacaatgacctcgcaaacccctgccgcatccaggatgggcgctatccaacaaccctataccaggcggacgcctaaaaggaaggcaaaactagagtcttcggttgtcgaacctgtcgttgtctccgcgctagatttccgggtaccaagctttgatcaacctatgaccggcagcctggggaccggaccggcagtctctcctcttccctcctcccctcatgccactcaatcatccaaggataaaattgcgaacacgaagaacatccaagcgacggctgcttcgtccttcccatcccctccggccgattcgtcgttcgctcatttctcaaagaacccagccgtgattcaggccgaaaccccgaaagcgcctgcgttggacatgaatactgtcaaaacgaaagctcctcgaaatcctcagcctaggacggagcctagagcatttggtcttcaagaagctccaacgttctacccgacgtgggatgaatttaaggaccccatggcgtacgtggcaaagatcgtcagtgaatatggggcggaaaagtatggtattgcgaagatcgtaccgccaaatggttggcagcccccgttcgtattggatacggaggtcagaatttccttttttttcttgcccaggttgtgctgattgatctatagctgtcatcggagctgtttctgatcggttgactctcttttctttgtattttggacttttgtagaggtttcggtaagttgataattctgcatgttacattcaacatattcattcgctaatctatacattgtactttatttctaaatgtggcccttcaacggatgtactcaaagcttcaagacccgtctaatgaggctcaactcaatcgaggccaagagcagagctaaaatcaatttcttcgagcaattgtgggtagcaggagttctctctgtctcaacgttccttgtgtaatagaagagttcaagctgatattggatactgttcctggatggttgtctggaacacttcttctccagagtgatgtttcaccagcaacagggaaaccctcgacttacggttcccgttgtagatcacaaagatgttgacctgtggcttcttcggaaggaggttaatcgattggggggttatgaacaggtatgggcttattgtgttttgctctagatgaattatcactcattggcctcttctctctgttttactgtgaatttatgtcattcaaaaaggtcaccaaaagcagaaattgggcagagattgctcgtgctatgggtacctctcagccttttgcttactcgatccgaaatgtctatgccagaataatccttccgtttgagcagtacgttgctcgagccaaaaatgcccgatcgcctcccaaaccatctgcctccacatccgttccgtcaaacaatctaccaaccttcacctcaacatcaaatgtggttactgaaacgcctttcagtaaagctgggaacggtgacaagctgccacctacaccagttagcaccggagggagacctgtgagaggtgcggcccagaaaaagatgttctcatacgatgaggatggggatagcagtctatcggaaccggattcggatacggatgctgatttgagcagaccggtcacagctcccccattatgtttgtcctctcccagtcatcaagtttggtcttaacgagcttgctgggaagtgagtctttttaagctaacagaaacggtttgtttccgctattatgatttatagccaagctgtcttcgctatctaaaaaagagattcccatcgtgaaaggagaggtaagtcttgtgaagtaccttatcatacaagacccacgaagatgatactgatggacactgtcaacacaactgattcctcgaccagcaatgtgaaatctgccgtagcggagctcatggtacaaaaattcttttatgcgacggatgcgacagaggtccgtggttcactttgaacagttgcacctcgttcttgtgccgaaggactttagctgacgatatgtgtccacggtgtgaactcaggttatcacatctactgcttggatccaccattatccgctgtgcctaagaatgagtcatggttctgttcagtttgcctgatgaacgctggagcagagtttggatttgatgaggtccgttggttcttataccgcctatcgttctcccgaagctgaaaaagcttatttctctgaactcgacatcctacgttcttacgttcgtagggagaagaacattctctttctagcttccaagctagggataccgctttccgaaatcactggtgggcaactcacccccccaagcaaaaaactcaaccgccagtccctctcacctttgctggggccaagccgattctcgacaatggaactgagaaccagcccaatggcgagacacagaagctagggggagtagatgtatcagagcatgacgttgaaatggaattctggcgactagtggagagtcagacagagacagtcgaggtcgaatatggagcggatgtacatgtgatgttgcatggcaggtacgcatcttccccctctttttgtgcagacttgccctctcaactcagaatattgatctaattctcggtaatgttcatttctacgtattcacctccaaatattactagtggcgctccaactaccgaaacacatcctttagagccgtactccgtggatcagtggaatctcaatgtgatgccaattgtaccagactccgttcttcgatgtaaggctcatcaatgtttcataatcggaggtcgttcaaacttacttaccttcgatccacatatatagatatcaaaaccaacatctccggtatgacagtgccctggatctatgtcggatttgtctttagtgctttctgctggcataatgaagatcaccatacctccagtattaattatagtgagcgtttcatatcagcttgtattgtgtcaattactcttctgaatgttatccggtatgaccgggtctagtgcattggggtgagaccaagacgtggtatggtgttccaggagaatacagctccgcattcgaagaggcaatgaagtccgaagcgccagatctatttgaacagcagccttcgctactcttccaactggtgacactgatgaatcctggtcgaatcaacaaagcaggcgtgcctgtgtatgcatgtgatcaaagaccgaatgaatttgtggtcacattcccaagagcataccatgctggcttcaaccacggggtgagctatgcagtttcttctcgtcgtcatgggaagcggtctgacttgttttcttcctttcctttcagctcaattacaatgaggtaggaaattaaagatcacacagattatggttcatcaagttgacactgattttcaagggttttcgatctgtaggcggttaatttcgctcatcccgaatggctagagcatggcttaggctgcgtccaaaactgttagtttctggacaatgtcagtgtttccctcatacttttatttacccgcgattttttcgaatatgtagacaagaagtacaacaaaccacccgttttttcgcacgatgaactcttggtgtcgattgcgactcactcgaaatctatcaagacagcaatatggttcgtcaacctttccagacatcaactttgatcgataggctaattcactccaatgtctcatccattaggctcaaaccacatattgaagagatggttgctcgagaactcaaggctcgaggtctggcccgtattcaactatcgactcttgcatcttgtaaagaagaaatccaatcggaagacttgcctgaggaggaatatcagtgttcttcctgcaaggcttactgctacttggctcaaatcagatgcccctgtacgaaggagattgcctgtcttgaccatgccacggaactttgtcaatgcgatctgaacaaaaagtcattgcgattgaggttcacggacgatgcattagtggatatggaaaagcagatttcagatcgagcagctattcccgaaggtacgacttatcttttttagtgtgtttttttccaccgaggttcatcatatatccatctggtttgcgtatcacacgctaattgggatttatgatttggtctgctgtcaaactgttttcttaagtgtggaaggccaagctagtcagcgcagtctttgagtccaagtgaccgtctcttcgtcagcttcggacattggtagctgagggcaagcagatcagccatactctccctgatctggctcctctggaagtgtttgtagagcgagcaaacgagatggttgttgaagcttcttcctttacggttcgtaaactacaaagccgaaagccttcaagaaagagccggtccgttggtattgccgccgaagaagatctaacagctggagaggaattcacgtcgaaacctggtatcgacgctgtagttgaccttctgtctcaagtggagactcttggatttgaagcgcctgagatcaccgctttggagaatttcttagctactgcagtcggattccagtaccgtgcgacgaattccctgtcaattccggacgaacagcaatcaataacggactgcgaggctctattcaattctggacttgctcttggtctcaatttaccagaacttcaggcctattcctgcttggttcatcgacttcgttgggttagagatctggaagaagtcgatgaaactacgttagagatgaaggacatcgacacattcatagagagagcgcaagcctatcaggttcggtcggatcatccattcgtgctcgacttacaggcgaaaaaggtgtcttctcattcttgggcaggagacgcggatcaaattcttggatcaacatcagccgatatggctgatctagaggcattgttggcgagaagccgatcggtcgcggtggatgcagatcgattacaccgtcttcagctattacgatccagggtaatggaggctgagcgtaatgtgcgctcgatgttagactctctggcttcttccagagatcgaatttctgttactcgggatgctcaacggctcataaaccgatttgaagctaaagggagaagtcctattccagtttccgggatggaggaactcaggaatgaagtctcggcctacagtcaattcttcgacgaggtcaacactgtcataaaacccgaattgaacgacaagtctctgatggagcagcttcacgcacttctagtcaacgtcaatactcgaacagacccggcagacgatcttcctctcagtctgcccacttctgtttccttggtcaccaacaccacggaagatgcaagcatgttcgctccctttgcatgcgtgtgtcggctgccacagggaccagacatgatcagttgcacgcgctgtgccgttgcatatcatagtgcttgtgtcgaatcaatccaagctgatgcagccaaagaaccttatttgtgtctcgtctgtgagccatacaaagttgatctgagtaaatccgccagactgatcttggcggatctatccaaacttgttcaaccagagttttttactttccgacatccgcccccagagttcgaaatgctctctaccatcgttaataagacaacacgtttcgccgattttcttacggctaagctccgatcaataagccctcggacgaccagcaacgtcgaagaagttcttcttttgcgtcattttctcaggaaagttgaagggttatgggtggacattcagacttcatatactggtgacaagccggtcagcctacgcccagccatcattgcgacccttaccgctctagagaaaaatgagccggctgcggttgtcaatccggcttcaacttcgggtctggtctcagctgtctttcaagaaaagaagcgagtacggaacagaaagccaaagtgggagatcttgcatgaaacccctccccatgatcaaggttgtatatgcaggctatcaaaagaagagacgatcgttacttgctcgaacgctaggtgtaagtcgagtggtccgcctgttgattgttcgtacttcactgatattggctttatccttctaggcgcccgaggatatcacccgtcttgtgctttcattaagccggctgatttccctctgccaaagttcaagtgtccattatgctgcattcaaactgggacccggtacaaatacgctatttgtcttctacagatgaaaggtatggtcttcatttacgtaaatattttctaacatacattagtgctgatttgctttgatgatatgatttgcgtttgctgcagagcatgagggcactcgtcagttcgtgaatgtcaaagcgacactcaacgcactcgacaccctcatttttcttgatttggaaatacttgaaggccgaccgtacatcgtttatatcgcgaagacattccatcctggatttagatctgaaattgaagaagggacggaacctccgccagtcaaacgaaagaaaccaatggtagagagtttgggttctgttaccaattcgccagttggggaggcccctcctacacgatctgttcctccaccaacgctacctcagatagtgcctccgcccttgtcactctcctcatcttcgtttgcaacaaccactcctacatatataccaccgccattctcaccttcctgctttcagcctccacctccgcctccgccaccatcataccctcctagctactatccgtctcatccattctctagtcagtcttacctaacgtaccaagcgctaccacccccttcgtcggtaccaccaaggttctattcgagtcattcacagtattacccaccgccaccaccagctctttcgtcttcttcattgtcctcttcttctgaattgagtcatttgcttaatccgattcaagagcctctgccctcaccttcgatcttgcttccgcccacacccgtacctacgtctttagtgacgcctgcacttgattcgatacctataccaacaaatctaccagctccttcagagcttttttcaaataggtatcagccaacggggcattccatcaagaacagttcgtctgattaccaggagccggactctctgccgcttatgaagaaagcggagacggagacgatggtagctggaccaacggtaacggccacgacgacggcagtggcgacgttgccgactgcaatgatgtcaacgccagctgtggaagtgacggcggcagcagaagaggttgcatttccaccagtgtcgccagcaacggagatgaaaacatcagaatcattcaatgatacggcaaagtcctcgagtgaaaccattctgaacggatctaatccttctcgagcttaagagtatgtatagccttgggctttacagggatgttcacgtttcatataccttcagtggatatgtgtctacttcatcatttccctttaggagtctacagctttgattgttccctttcttttgtctttctatcgtgtctagcctttgcctccgatacaggtttcttttgcctgatcgtccttcgatttacctttcgtctctccttcctccttcttttctttctttgtattctatctttagcttgtttctcgtcttggcttgctttctcgatggattcgtttcttttttctggatgcgctttttataagacattgcggggtgttcgagtgaggatttccacgatgattatgtcgtcgtccttctcccttccggtccgttgacgatctatctaatgagtacagagaaattgagataagaggagagctatgggtgtacaactgttcttttcttctacgaaagaaagaggagataaagaggtatgctggtgtttatcagatctacaaaattgactctatatgggtgacacggtggaagggaaagggagaaggaacgaggcgctggggaaaacggaagaaggaaaggccaagggttgtcagatttactcgacgtaaggctcgatggagatccttttttctccagagattttccaaatcacatgtctctctctgcatcaccaaagaggagttaacgacgcaatcaattagtttcccgatttttttaataggggtagaaggaaggacacacagtgtgtacatctcgtacgattgtgccgctagacgcatagctttgatatgctcgggtctcgaattagcggctctggcatgtgctcgactcttctcacagtaaacaatgtgtacacagagatcagcctggactgttaatttcttttctaagcacaaaacgggggcaatttagatcggtctcacctcccagatacaagttgccaaattgacgccggtgattatatccggcactccgtaccagtacatcaatagcttcaaatacccacacagcgtccaaggcaagttttctgatcaacctcttgagtgcgcgggacaagacaagggtaaagaagggccgacttacacctccccctttcttggcttcttcatgtgcgagtgaatctgctgtgtatagtgcttcgtcgttgatgaccaacctgtttcgttttgatctgaacgccacgcagtacctatcttgcccggtgacggaggtaagtgtctttgatttgattttgttatggagcaaaactcaaacggacaaaccattctccttcgatatcttcgtcgagctgaatgtcttcccagttgaacgcatctttataagacacctctgcgtatttcccactcaacggtctgaatgctctcagggcctcttgaagcttgaaggattgttcagagagcgggacttctggtaccggagggatatatctttctggctgacgattcactccgttgggtttagtacttggaatgggagatatatgaagagattgagcatagcggtgtgatatggacgaagtagagtggtgtggttgagcgacgagcatggtcaattgtccaacaccgtatatttgtggggaagtcaatcgttaaagcagttggctgtttgtgttttctctgtagatatataaaggttagcaaacggatatttcgtgatttagagtcattctttgccaacctgtccccgttcccgttcctccttatgctatcagaggaacacataagcatcagccaggagcgcaagagacaagcgattcccaccctgttttctcggtggtggctgaaagaaaacagtaccaaaagatgatgattctggcgtcatctcgcgtgtgtaccaaggggcacgtgtttcactaacgtcacgtgtttgcatttcaatcctatctatgtatggtgtaaatcaaaaataaatcatctggacttgaaattcgcccggctccagagatttcgtccaaaatctttccaaaatctcaccgtcatcagcaacgtgagcagcccaagaggacgatggtcgacatcacccaggacgatgaacatgatttgctatccattcaacctcctccaccgtcgaatcaagacgtagatgatgacgatgatgcaggcaacaatgaccatcataccgatgaaagtcgtcaccacgacctctctcaccaccacgatgtcactctagatgatgctcactctcgacaaaaccaggctccagaccaagacctagaccaaaaccaaaaccaccttatccatgcgtctctagatattccagcaggaccatattcactctctgagctaccccaagagcaggaatcacatctgccgcttccttctcctccagaccatgaccgaatcgaaaacgggaccggctcggatcgcattcaatacgttcatctgaccccttcgtcttcctcgtcctcttctcccgcgctgaatcatccatccggtcaactcgaacagcatcaccgtcaactgtcggaattttcatcatatcagagtccggagcccagctctcgatcccgacagccttctcaacggatagctcaccatcagtctcaacagacacatcagtccagacagagcgcaggtcccgatgctctggtgccgaagagaaaatacaaagcccgttgcaagtggtccgcgcaagataaggggacgctggttcgagaactagtcagacaaaaggacatgggtaatcaactaggtagtggatttctctcggaatcctgggtgtctgtggcgaatctgttggctgggagtgaggacaagagcggaggggacccgaagggacctgacgaatgtaagagcgcgttttctagggtacgttgtctatccgaacaatttcaacaagactttctgcttcggtcctgatcatattgcacgatcgctgacgcttgaagaacgcttcgcttcggtcctgtctttgttattgatcgtatagctgaagagggaatttataaaggtcagacagcttaaacgttcgttcgcacaatggaacgacgaggaccagcgtccagaggccgaaccagccactatcaaaacatttttggcggttcgtgctttgcggtttttcatttgtctcgatctcgcaaagacacatcaacaagtgtttactctctctattttgttctgttgtccctttgagtcaatttaggctcatccagttgtacgtgatatgtttctctcgcctggactgaagccctttgatgtgtcatctaacacatttttcttaaacagtacgcgccctatatcacaggttggccttttttcaactcgatggaacacatcaacatgggtgtcactacgctagatgcttctatcgccaagccattagcaacaaattctatcaactattctggagcagagatggacaaagcagaagagtcggatggagagagtgttactagcgatgtttgccctctttattttatctgctttgcttcgtgctctgcgcttgttctgctcgcgtgtgatattggctgaaagggtcgaccttttcattatgtaggtgtcctcatctcggctgacggaacgaagaaaacgaacagcctccaacgccgaacttgacctcattgactcaacctccaccgttggcggcatatctaatcacaccgctattaatcctgagggcaactcaaatgctaacggtaaacagctgacgggagggccaggatcatccaaacggagaaacacggtggctgtggaggatggagaggttgggaaggagagtccatcgattgtccgacatcgggctagagaactcttggtacgtctcttccgttttgttctgtttacatattcgttcttgaaattaacttcttgagcggaaataacattaaattctcagtggaaagatgtgaaagaagaaggatggtcattgaccgaacaggatatcatcaacgttctcggtcgattcgatgttcgcccttccctctttcctttttagacatgtttccagtcgcctagttgaaccgtgaatctctaacgatgtctttcctttggttaaaaatcaggaaaacgtgacgtacgcagaaacgtatgctgatatcccttactttacactgcgactcctctaccttcagtctatcatattccccaaattgatttgatttcaggagtcgggtcctccttgagggaggtttctttccccttgttattccttcttcgtacccttatggctatcgtttcttgagatgtatcttctagcttaatcctctcggatctttgttgtttcttcctttcgatttcttctttccatatgtccgttcgtcaagttctcttgactatccagttttcggtctgtctttctctgtatgtctacgtaatctacaaataccctcagttctctttgcccattgtacgcacacaaaataagggggaaaggaaatgtagacatattcgagcaactttcttcatttataaaacgctgatgcgcgcgtgtgtgtgttcttgtacgctataagatttctttccctttcgtttaactttcgaaccatacggtgagatagagtatgaacctcagagctctgtccgtctgttcttgatatccaaaagctcgacctgtcattcgaacgagaaaccaagacgagtcaactgacaagattccttgtttccctcttttttaagaaataacgaaagggaaatggaagtgaacgaacctcaaagacaagagctgcgttcccagggatgacacctccggcaccccgggcaccatatcccatatcagcagggatgatgagtttcctcttctcaccgatgcacatgtcgagtagaccttgatcccaacctaggttgcgagatttccaaagtattcccccgtcgggtttcgatgtgaacgacaaacaagacacgggtcagacctgaattctcttctctagtcccgatacagaatgtcaaagaatgtgagaaagaaagaaggatgagaaagaaaggaaacgaacccttgatgacttgaccggcgccgagtgtgaaatcaaaaggttggttcctatcaagtgatgaatcaaacttctttccaccgtcgtgtagcgttccggtctgattgtcagatatggattcgagacgcaagattcgagatgccagtcgtttccaagcgttccgaaaaggagatttaagaaaaaaataaaattcaaaaaatcagcggagttcgtccttgaatgatcttaatcaagaaagatgggagaacgaacgtagtgcattgatagcttatcgccttttcgagatttcaaagagcacgactcgggtttgaacttgactcctactcaacacaaaccagacccggcccaacgatgcacacgcacacgcacaaaaaacggatcaagagaatcaatcaagtatgatatcagtagtccgtctgtgatcatcaagtgctcgaaaaacaaagacgggactctaagctgaaaggtgatatatttcaaaagattgttcataccgatctgcaactttttgatcggaccctcaggagcggcagcggcggcggcatggtcatgatcaccatgtccggcgtgggctacgacaaatatggccgagagaaggccgacgatggctgttgaaaagaatctcatgatgaacgatgtatcggttgtgtcgagacgggtgtgagatggagcgaagtgttttaagatgagtcgagttttgagcgaaaagagttggcctgttttggcgtttcatactatcttacgtaaacattccagcacggccccttttcgtgcgcgagcgaggaccagagtgagcaagacgtcctctttgcgcactacgattctagcacaggatcaaaagaaaactgtaacagagggtcatcccatttctagatctcactgaccagagcgaggtgaacgaggaaaagtaagaagaaaaggtttaagtaaaggtagagagatatgtgaaagatggtttataacaaaagatggtcgaataaataagcaaagaaaagagagaagaaaaaaacgagaaagccaagtttgcatcaagcaaggctcactcagagagattcaaaccaagatgagatcctgctcatcctgtttctgactaaagcagaagattaagaggtaggagactagcgagcaatccacactcgtcagcacgcgaaaagagaaaagaaaaagaaaaagatggtgggaaaattaacaaggaaagattgagaggcaaaaaaactgcagatattctttccaagggtggagctcaagaccgccgaggcccacggccaccagggttcatggacgacttattcaggcatggtttaagagtgatacttcttgacggcggtcagataagcctgtccactttcggtgagcgcaccgtttgaccaggcgggccagacggtgccaagaccgtcaccgttgctcatggcgtaaccgatgactcggctgtcggcttcaaagatgtcaacgatgtcggcgatgaaggtgttgatagcagtctgatcggtgcagggaacaaagctagaagagtcatcgacacaggcaaactcgttgaccatcatcggtttcccgtacttgttgtaaaagtaatcgagatcggccttgacgccggccatggagttcttgttgatgtgaacgctggtaaagtcccagtcgacctcgatcaagttcttgaacggcgtaagccaagtctcgtcgagttgcttgcacatcgaaggcgaaccaagaacagaaccctttgctttgagtggcccgacgagctggttccaaaggagcgctccagtgatctccgatagcccagacgagccacttcctgcggcacaatcgggctcctcaaatccaaagacgaatttcggagtgtaggtgagcgctttgaaagcggccagccgagaggcatcggtcgcgtcgactgttcctcctccccaaagcatgttgaccgcgatcggagttccggtatgtccggacgggttggcggacctatgggtagatgggcgtgtgtaagagaagacatatcgaatatcaataagaaatgagcgagaagagaggactaaacagcgtgacgaaaaaggaagagaggagacgtaccagtcgtaccaccatccgatgtatggagacatgatatcataggtgtctccagcagagattccggctttgttaccgttgggaatccaggcagagtacgtgctggtcgaggtggccgaagcgacggcgctagaagcggtggaagaagccttgaccgaggaggataaggtggaagagaccttgaccgaggaggaagaggaggcggcggcattggaggtagtggtggctgcggcggcctgaacgatctgggcagtcgaggtggaaacaacagaagaagacggggaagatgagtaagatgatgcctttgaggtggcgacggtggcagcagtagtggttgtagcgaccggcttggaagagctagcagtgtagacagccgtggaggaggaagaagaagaagaagaagaagaagaagaagaaagaacgctggaggaagaagactttgctttgcaagctccggtcgttcgcttcctcatctggacggatccagggagctgtctgccatgaatatcgaacagagggctggctgccgctcgcttattgttcagagctctgttgtggtttctgttaccggctgttccatggttggctgccaggccaaaggaagaaagcacgagaatagctgctgcggccgtgtttgtgaagagcatggttgagtgaacagagatggggatacgaagagtacgaagcaagaacggatgggtggtatgacgatcaggtataagaaaccaagagggtgggagagtctttaaagaacgtgtggacgttgacttgcaactgaggctcaacggagaaaaaggggacgaaaacgaagacgaaggagaacgagggatgtggatgtatggaagtgaatgagtgtcgacgatagaaacgaggcgaacgagatttcaagaaagcaaatcgaagacgaaaacggaaaatgagggttgacgatgagaaggaagaaaagaaaaacaaaaggaaattagccggcaggtaaaaaaaatcctgttcgcctcggtggccccggccggatcaactttggttcctgcgttcggctgccatcgatctctgtccatccggttcttgcttctcacacagcgtctcacatgtgttctcattcctgttctcatctgtgttctcgcacacccactcacatacacattcacatacacatacacatacccatctctcccccagcacttcctccttcaacatcgacagacaacggcaacaacaacaacaacaacgacgacaacggcagtcatccccactgggctgcagtctgcgcgcacgcgcgcggggtcgaccctggctccggatccgggcgaccctcggtgtgacagaggacgaggggcgagagcacgggcgtgggcttgggcgtgggcgtgggtgcgagcctgggcctgggcctaggccttgaagggcgatcgggggtgttacgtaagatttcattaaggggaaggaagtgtctcagggttcgcgtcgtgtcgtgtcgtgtcgcgtcacgtaacgcgtgacgcgcaaagacgcgtcattactttccacgcgccacgcgtcggtcaacagatcggttgatctctccctcgcgttctcattaacgatcctaacgtttgcgctctcgttcactcgtcctcgacacatcacacccaatcactggcccttagtatgagtgaagaaaagacaaagcagacgctcgcaaagctctttgggcagcatatcctcactgacaatgctctccaagcagaatgcatgtatctttttctttttctcaattcttgactggtgttccgtctggtaccattccgctcactcactcctactgactctctttctcactctctttctcacaggtctgtccattctccgcctatatgcccttccacccgatgaactgtttttcaaatgggaagccttcgtactcaatcacctaaagccctcaaagtctggtgccaacccggtgttcacgttggagaacgcaaaggaacttcataaagaaatccagagagaagcccttgccaagagatccatccccggggctggaaggacacccataggtacccatcaggctggatcaatggctcataaacctgccaatggctctgtcaagagacagtctggtatttcatctggtctggagttgtgagtctcatgtgcatggtcgggatgatcgatgcggtttgcgggacttgactgacgtttgatctcaactctatcttcacctttccctttttgtcgttccttcttcctcaaacccatactctagcctcgacttcaaccctgccactccttctgccaagaaacctcggccatcatcgtctttgtcagcttctaaccctgctcgccaacctaaacaggagccggcatcctccccgttctcacttcctcctaccaacgcaacacccagactggaagccctcgccaggctcaacccatcaatcaagacagaacaaattggaacgccagagaaagaaggatcaaactctgtgttttctagcccatcggctttgtaagtgacaccatcaagcctcgtgtcatccggagaattctggcatagccgctctttctataactatctccttgttgtatccgttccatccttacagaactccggccggatcgaaccagtttcactccaggacgaacgctctctctactaccgacactctgaacgcacatcttgaaccagcccccattccggccatcccgctctcagcaacgtctgtcaaaggcagaatcacgttcagtgccggggccgacccaaaggactatgcttgtaggctctctttctttcttcatttccaattttttgctatttggtctgtttctttcctattttcttttttcttgactgttcactaacaaaaaaaaaccatactctttagatcgatacatgtttgaaaaagtttctgagcgaagcgaaggtatgactttcatctttactttctacccccttgtttcctcctcgctcaccccaatccttacgacccttccttttgaaagtcctcgactcgagaatcaacgaccttgctactcacctcctcagcgcatttccttctcttcccgaaccagccgacccatcagtcccgacatccacccaaattttcaccgtcggtcaaatcacaatcgatccggaacaaaccacttcgaaactcaatgaccattccctcgtccttcaaacttcaagaatcgtaggcgctggtggaaggatacccatcagattcactgagggatgtaaagttagaggaggaccagaaggtgtcggttctgtcgggctgttcagtggtggcgtctggggtttcatgggaagaaacggaagtggacgggagttttgggtagacgaagtgttgatcgttagtctcccttggctttttttttcttcgtttgcgcgcatatcgttgaaaccaaacatggcctcaccctgttttaatcttccttttctgttctcgctcgtcaaaaagcccccgcctccgccgttctcgtcaacgcccgcctcagaaatcctcgagatgcaacacggtccaaagatgggttctcagccggtctctgtctttgctgcctctggaccgttcacattagacgctgatttagagtatgagcctcttgaagcgctggtcgaagaggtcaagcgttgcaggccggattgcatcattctcgttcgtgctttacttttccctttcgggcctgcttcgcgcatacactccctttgactcatttaacccctctttcaattatagatgggcccatttctctcctcagcccatccttttgtcaaatcaggaaacctgactctatcacctaccgagatatttcaatcaaagatctcttcgagactgaaggatattttggataccgttgttggcagtcagatcgtcttggtacctggagtgagagacttgatcactgatcaggtctgtttcccacaaggaatgttggacagagatgtcgtcttgccgtccaaggtgtgtcttctccagcagagtaaacttgatatattgaccttcttcgtctgtctcttttttttttcttctttttttttttcttacccaaactttttctttctttctgttttctttcatcatccggcacctatcctgccttagagggtcagactacttccgaatccatgcctgatcaacatcaacgaggtcttcatagggatctcctctgttgatacactcttccatctaagaaaagaaacgttcttcaagcaagcaaaggaagccatctcgaccgagacgagtggtggtggagggataggagatttgatggcgggtgtctgcaggagtctcttacatcagcgatcgttcgtcctattttgcatccttccccctttttcccttcccttccttcagccctcttcttgagaatcatcgggcttgctaaccaagatgaaggttcctctctcccctatatgtgtctgtccttcacattcgcccaaaacagattttatccgttatatccagtcccgatcgaagcgagcgcagatgtgaacctcgatctgacacactatgatctcctaaagatggagacctgtcctgatgttttgctacttccttccaacctcggcaaattcgctaaagtctgtccctcttttccctcgtctttctttaccttcttcttgttcttgatggcttgtctctccgctgtcgatcgaacgtgatcctgatctaccctcgttatggctctatctattcgtcactgaacagatcgtggattctgtgatcgtcgtcaacccaggaagactctcccaacgatcgtccggagggacgttctctaaattcgtcatccatccgatcgacaaagagtctctcattagttctgctcgttcagcagccggcgcacaagccggaggtggtggtcttggcgaggaaggggatgtggagcatgaggcctttggaagaattagagttgacatcgtcaggatctagacatttcttcatgaaggggtttcttttcatttctttctttcctttcagaggagggtcatacttcgaattcgctttgacttggtttgatgcaactgagagaactagagagggaaaccatttgattttgacctcatcgtcacacattgtcaagaaaaggcgctgttctaaaggaacagaaagaaagcaaggggaaataagatcaggtcgtcttccgttcctctggatgaacccttttcacagctccgctcggccaaccggactttagagtcaacacagaacccaggagtgagagatccctaacaggttcttataaagcagctttggtacttccaccctcatcaccaggagaggcagcagcggcccaatcgatgacccattctttccctagtccttgttgaggtccaacttcgatcccactacctagttgcattccttcttcttccggtgcggcaaaactattcacgttcgtacatgtagtagttcgtagggggaaagacaaaagacaaagacaaagagagagaggtgttattggcaaatgaatatgcgcgcatcaggagagttgaaataagaatggactgagtagcagggacgttaccaggctcttagagggcaaacggaaatatagcctagtttgcagatgaacacacaccacatcaaaaattaaaacaaaattgagaaaatagacaggggaatctagacaatctcttaagaaaactaattccaaagacaaaccttgatcgatcgcccaggtatcagttcctacgggtacggtggacgccaatgggttaatcaaaggatgcatatcaggtttgaagtgaaacacaagttgttcatccgctggaggattcgtcgggtccactggttccttagttcccgcgctaggcaacggtttgaatagactagcatctggtgagtccgaacgaagtcgatagatagatattaaacgttgtgtcagtttggtgtggtccgcgtagaattcaggcttctgacacgaacagttgtttctccagactcttgtgaagaacactcttggatccttcaacttctcctccactaatggcaggtttacactgtagaggtcgatctcttcttttctgctagcccagccgttagtatctaccccccaatcttcccagaggcgacggatgatctccacactagcgatattggccagtcggagagactcaggagtgaacgttcgattcatgatcccgtacgacagcgcgatcgaccgtgtccgagacagggacccagaaagagcagctccgatcgtcccggaagaaagagaaaaggcagaggaagagttccgaccctgcatgtcgcatcaagctcagatgagcttacactgacgcagctcttgtatagttgcgaggtcacgtggaacatagaacactcacaaagttgggccctgacggatcgattgagttatacatgtataaattcagcaccgagtcctgagctgtttgtaaacgggacagctcgaagagcgagatccaagcagttcgaacttaccagagatgaccagatcgatctcgccggggtataggttgaaaagcgagatgttggtgcatgtagccggtgtctagcggcacgaacaaacagagtcgggtcgatcaagcgagtgatcaaatgactattggttagatctgtcttacggaatgctagccataggctccaatcgtatcaaacaggtactgactccatccaacagaatccactcgcctacttcgccttccttcagaggtcgccgaaaaggggttttctcgccctatatacttcaagaagaccggttagcagctgtctttgtttgtctttagaaacaaacctcgaagctatgaagagacccaagcagacaactaaccgctccttcaggttcagtagggtagtagtagttggctgcgatgttatcttggatctaaagttatcagagatgcatgtttcagccatggcgcaccggcgacaagggttattcgcttggcacaagatgcctagagtcagagaagggcaagagacgatccacaaacctggtaggcctttccgatccacgacttctgactagaaggcacgactaccttgacatcccatcccaaggtcttctcaagcgccctggcaaatgaaaagatgtttggtgactccttggtagacggagggccatcatcactgagatcaagagtatccgtcggtagccgaagtgatggttagagaagaggagatattctagaggcgcagaaccgaatgaaggaacgcttacttcgtgagtagtactctcagtcttttagtactcatgacttctctttgttcttctcgtgcgttggagagaaggaagaaagagagaaagagagaaa

SEQ ID NO: 1316 - DNA, 23856 bp, Xanthophyllomyces dendrorhous
agagaaagagagaaagaaagaaagaaagaaaggaagtggaccgggggtgagaaggaagctgaaccggaggcaatgaagatgatgtcgttttgctgtgctcgtgcgtgatctccaacgccacataatcgccaaccccacttaccccatcgttatcagtccattgcatctcgaacaacatacatccacaacacatatttgctagaacacacacgcacacacctacacatacacacatatagacgtacatacactatgaacaaacatccacaagcaaatcagacaggacctaggttgatacttccattggcaaagcactcacttggaccgttcgtcctgggtaggttcctcagtcagattcagtcagaaagctagtaaccaacactgatctatgcgattcacaacaaaggatcaaccctattttcgacgctggattttctcagaacatccgccggtagacaatcgtatccttgggtccatatcaagtacgatactaaggtatatgctctcctgcgtcttcgttgaaaacggaaaaccgagttcgctgatgtacagacttcttgttgacaggctgtgtcaaccacaccaatcctggttgtcctacttccttcgatccacctcgtattcacttcccctgaacaagtactctgccaaatccatatactctctctgcctcttcctacactaagcctaacatatcatccgtcctcatccactcaatccgatccaatatcgctatgtacacctgatcgcccactcacattcggaaccacctcggcagttttcggaccaacgttcaacgggagtccatcggagaccaacggagcaaaatcgccttgttcaactagtggtagaggagagggagaggtcaaagaggtttggtatcctgggctaggatttagagggaaagagcctggcgagggagaagaagatattgaggggaaaggatggagggaagagcgagtgaggagtattcatctgtgtgagagagaggattggcggataggtttgagtacgtttgaagattcagactcggaaagagtatggaaaaggttgaaattgaagaccaagaaagaccgagtcgaactagagaaggtgacgattgatgtaagttcccatcacctttcttgtacgtctcagctctgttcaggcatgttgatcgagcttcgcgctcgcatgtctttcataggcccataatagatctgccatactctcattccttccactcacaattgggccattacagatcaaattgaacgaaacaacctcaacagatcttctggtcgagcttggtccaccgctgcggagtttttggaaggaagactctcgtctgaggattcattatttgggagactcggaacagagcgaagatgaggatggatttgatggccagggttgctgtgtgtttttccttttttttatttatcagaagatagagtggttcgtgagtgtgctcgctaaactggccgtttgtctctttccgaacttagatttctggaactatcttcagtatggaattgtaagcaacaccctgcgctccattctctttggccttctcagcgttaacattcaagtaaattcaactctcccttctcttcgtattcaatcaggacttccttctatctccctctcatatggtgatcaaaatgatcttccactcgaatcttgtaagatcctatacttcaacttcctcgttcgaatcgacttcttatgtcctctcgcgcattcgaccgtactcgttgctaaccctaattcgtttcatttatacagcctggctcggtaacttttggccgcttcgagcgttgtccctggaatttttcctcgagcgactcttcagtattggatgtgactcgtagcgtgagcaattttgtttcatctaacagtgcgcgcacgtcaggctttattcactcaaccctcctacttttttcttgtacctttggttgctaggcggccgtcctactagaaacgatgtcctcttcgctagaatctagagacccagaacaccacggtactaccgctgaagacagccatacgttcttcgggaaggaaacgttaggtttagggatggaacttgatcgggcaggtgaaggctggggacaaggtgttcttttggaagctagcagtatgtttcctcttgacaagcaatgtgacacaggcgtggcttgaaaggctgaccagtctttgagggtttacctctttgttccatgttcgataagcactggttgctgcatcatcctacatcgtgtttgaagttctggagtctggatttgtcgaaagcgtcatcatgtcctgagggcaacctattctcatatcttcctcttctttctttcttttcttctttctatctatctctgacacatctcatcgttcacttgtatcaacaaacttattgcttgttcacttgcctgctttactgattgaccaacgttgtaagaagaatgcatatttcataacctataaacacataacatacaaccccatattgtattccatcgcatttttataaagggcttctcatctctcatgctttaccgtcctatccggtcatatttatgcctctgctctttctaccgttgttctcttggagtgtctcatgcatgtattgcactaagtgaaaccaaattattcataacagaatctatgtacattgaaggaagaaaaaaacgagacgagcgtgatagataaatgagacgagacgagcgagcgggcgggcgagtaagcagataagaaaggaaagaaaagcctccagggcagatacacttgaacaagaaatagaacaaacataatagggatgtataataaaagacgaactcgagcaaacgagaggacgtatgtgtttagtgtaagtggattcgagaaagagaagacaatcgagaagataagagaaaaaaaaatacataagtcgaaatcaaaatcagaagaagaagtccggcttagaaaagagatcgagcgtccgtacttcatcacaaagaataaaggccttcagatatcacctccttttagcttccttcaaaccgcggtatgtttgacgttcaagaagaggaagaagagaagaagtagtagttccagttgtatgtctttacttgggacccttggaatgtatacgaagcaggagacacggaagctgtgacggttccgtcgcgtgtcatcgtcgcgctcattccagatctattttcgataaaggaaagaaggatggaccaaggttagatatagaaacccgttcgaatggcgagaatgaaaaaaggggaacgaacccagattggagagacgcatcgagatagttgattcctgcttggacgtcatgagttgatgagagactcccagacgtgagtgtcactgagcctgctcccgatgcaaagacgagtgcaaagaatttatcctcagtctgacaagttcatttgaataaataaaaaagaagaacgacgacagaaagaatcagtaagtttgtgatctcttttcagtaatcagcgatcagaatcgagattctcacccattggtaaccatccgcgggcccattctgacctccggtcggtcgtccacaatcatcagctgatgcgaccgcactgttcgaatgaggtcgcgccgaaagatggataacatcctgttcgatatcagggtacgagcccgatcggtacgcttcagcaaagtactgattgacctcgagcaaagtcgtgtggttcagaccgtcgacccagctttgagagtttggctgagctccctggataggtccaagataactagattcgccataatcgttccaagtcagagcttcaacaagttggacttggtctcgcttctcgacgagaatctcccatcgtttggcgaacaagaacccgtcagaaagatagatccaattcttgttccagctattgggtccgtaatgggtgaaaaagacaggagataccgaggccatgtaaaccttatcgtcgagtgcggatacgtatgcttcgtcatcgacaaaggtgatgttctcgttcccagtaggccaagctccgttccagtttaggtgaccatccaggacgtcatttccagtgagcgtggctgggtcaacaaacacactaggaaggaaaaacatatccaaccctgtgctcgtcttgaacggagtcttgacttgatcggtgaacccggcagtccagtcagagtctccaaatgtacatgtcgatccagcgaacgtagaaacaattggcttcccgtcataggtcgcttggtttgggtgagaagcgtacgtagtggcgagagagaggatagcttgggcgtctgaagcggatgcgcagggaaagacggacatgtcaaacgagatgaagatcttgaaagaagacccatacttctcggcggctgcataagctgaggcgagttgtgttacttgctataagtaggatcaaagatgaagaggtttgtcgtgagacgcatcattcacccagtagggagaggaaaccaaacgaggagaacgaacccatgagtcggtacccatgttggcggcgaagccatcgaacccgctctccttggcgagtttgatgtcgtcgtaccacatatcttcggtataaggatatgtgtttcctagcatatgatgactggggagataacgcgtaaggtgaaaatgcaagatttgatagaacgtcgcgtaagtaaacagagggcaaggccaagacgaaagagaaaaagaaaatggaaaagactgacacgtaaacagctctgtcggtagggccagccgtggcagaggatgaggacgtggtcgtagcagtggcagctgccgaggcagacacaacagcagaggaggtcgaactaggctgaacagtaggggcaacggaggtcgcagatgcgatggatgtcgcggatgccgcgacgacggaggatgtggtggacgggttgaggttgacgcccacgcttgcatggacaccccaatggttcttcctaccgacaatagatttgacgtgtccttggccaccgacccgtcgaccaggcagatgtgatctcgacctccggagtggtttgtgatgttcggcagaaacgtcggaggagagcaacagaagcgcgagaagggaggacgcgatccaggataggttgggagtcattgtaaggttggtcggttgtttggatgttctacgatacggctacctgagcgaaaagagtgagagcaaacccaagaaagaaggtgaaacagactaccagagtcctgaagagaggcaaagagaaggtcgacgaggaatgaaagagtgaaggaatggaggaatggagataaagaagacaaggaaaggaaagaaaaacaagaaaaatgaaaacatacgggccctttaagtaatcaaggggagggaacaatttggaaacaagcgggaacatccttcccgttaatcctcttacttttcctagatcggtgcatgttggtcaagcgggaagccttgttagcatgcgataaggatgtgtcggtctgtcagttggttgttcagtcatttggtcggctattcagccagccaatcagttagtcagtcagtcgatagatcaatgaagtcggaggatagatgatccagaggatgcaaggacataacgaaagaatcagagagccagtgtaaacagcattgtaaccatcctcatcaaccgaccaccttcacatatgtcggccaacctaccttaccgtatactcgttggtaaagatagatgcaccgtccggttcgaaggactcgtccagggaactgataagccctggctcggtgtcgaatgggatgatccgagtagagggaaacatgatggcgagaaggatggtgtaagatatttcacctgtcggtaggtccggtctccatcttgctctccgtgtttggacaccttgaactgatggcaggctgataggataccagctgccgggtcattcattcgacccacatctgtgaagatcattcgtcctactcctttcttgggaaccttgaaaacccgctaccgaccacccccggttgcaatgaattcggtggattcagatgtctccccggttgaaggtgtcttcctgggcgggtcaaatatcttggtggaagctcccaacctggacaagatccggcggagattaatgaacttggttgcgctcagaaccattggagtagatgaagaagccgttgctggactaggacctggtgaggaggacgagatgaggtcgatgggcacatggggtatgctttctctgatctctttcttcgtgtcactttctctatgcatcgactaatcgaccaatctacccttctatcattggctgtgttcgtagaatcaaagacacttaacctggcacacactctattctcaaactggaccgaggtagctcaaattgtcaatgtactttgtcgtctagaaactctaaacctcaagtaagatccctttcttatcaccgacttccatccgcctcggtacaaacaagcagttgctcaccacgcgcattcacttatcaatcagtgccaaccggttagctactcttcgggaacctgtttcgctcccgtgctttgggcaacttaaatgtctaatgctgaataataccttgatcacatgggaagaggtcagttgcgccaataaacactttatgggcgacgagacagaatctggagtctcttctttctttcctattcatactacatgttttggatttatctatcatgcaaaactaggtacttttcatagagccttcgcttccaaacttgacatcacttgagttgtcctcgaaccgaatcgaaaagatatgtttcccggacgggaaggagcgggagatatttcctcggttagaagaacttcgtttggagtggaacgagtttacttcttgggacaatctgaacgggcttgttacattgagatcgtaagcacagtctgtcctcttttcgttgaacataactatcgcgcatctggagccgcgcgactttcctggagaggaatgaatagtgttgacgggatggtcctcctattgtcctggtacagacttcgccttctctcgctatcagccaacaggttgcccgccttggactcgagcgtccggtcccttcctccttggttaaagttcctcaatctagcgaacaatgttgtcgccggttggaaaagtatagatgtgctgggtgaaaaggcttttgaactggaaggcattgtactacgagggaacccactgttcacatgtctgtctctgtttcttcttttgctctgccccattttcttctcgctcggctgactcaatggacactcatgaacatgaactgtctggcgcatgcagctgtccatcaaggcatgctaagagcaggggtcattgctaggttgggatccttaaggctgatcgatggaagtgacgtaagtaccaatgaggtgtttgatcatttctctggatgttatatacctggaagctagctttccctctttatttttttctatggatattgatcgactggctatcatgatctctttcttcagatccttgattcagagaggaaagatacggagatgtactatctttctcggaatccgagttttccagaaaatactcctggacgatccagatgggattcactcgttgccagtatgtttctcctcttctctttggttgaactactcctgttgtacggcttttgacgttagaagaggtcaactgattggaacatatcgttctactgtcttccagaatacggcgtatcagagaacccgactggctcgatgtcaacaaaacctccgaatgcttccacgcttggtgacaaactcatcagtgagtcagccatactgttcttcttgcaccctgaataacacactcagacaagctacatcatcttcgaaactcaacctagacatcaatctcatccactcatcactgtcttcaccgacaatccttcgagtattaccgagcatgaccctcaagatatgcaaactcaagatatcccgactcaccggcctcaaaccggccgagttccagatcgtatacctgggaacggatgacgaaatcgcagagcatgtggaggacatatggtcggatgagaagaagacgctgggcgagctcggcgccgagcgcggtggaagaattcgaattgatgtgtgttgatgatctaaaagtcacgtgcgccggataaaggctttacccgatggtctcctcgacgactgcgcattttcaagcgccgggtgaaagaaaaaaacgaaaagggaaaaaagattccaacccactcttcatcgaccatcaaccactcactcgttctatctcatagcttgcatactctttctgggtagagaacagaactctaggcttcacatcggaaggttgaccttgcgaaagatctctatctcctcctttgtccaatctaattgcatcaccatggcttccagccctcagggttagttctctctttggtctgttcaacatgcatctttttatttctattttcttttatcttcttctgctttgtttctctcttgtttcttcctgttcccttgcaatggtagatggacatgagtcttcaatcctaacgacgcgggtgtttaatgggatgggagcagctgggcgacgaatgagctgacagggatggacagcaagccagctcaagctcgcatgggtgatcgagcatacgtgtgtttgaaatttagaatactcagcctaacgcgtcaccggcctcttttttccttgttctcgttctctcccacgacttggcactcatccaatactctatgttgtcttgcctctcctcgttctcaacttgtatacaccgtagaccaaaagtcctcaggcttgttccaatcggcatccaaaagctcaaagtctgacacccggtccgccgcgtcaggacaagcagaggacgttcggctagccccggtcggtcctacggtccatggtatctcggccggagcttcgcaactagggggagctgcccattcgatgacatcggaggattcttacatgggagccttcggaagaaattcaaacggaaagccttgtgagctgtcttattctgttttggttcttcgcctccgtctctatgagtggtctgcattcgagatcaggtagcaggttcactgacacttagttcggcttaatagcttcaccccatgcaccattctctactgcacccgtgtcaaacaaatacccatcgcgtccacctcattttgcctttccccagcctggctctcctacaggcttctcctcatctgcagctccgggcgcgcacctgctaggcaaccctcctcggtcatctggataccctcatcaactcccacacaacaccggtttctcctttggaataggaactagctcaatcaaccctcctcgggacccaggattgttccaacagacgagctctcagcactcattctctatacctccttcttcaaaggaacccatgtcgagacttctaggattcaacgcaggaaatacttctgctcactccgcgacaaagtcatctggctcctctattcctagcccacgctcgtcagaacagcctatttctccaagcaaggacgataccaacaatggtgccagcaatcacgttcaacgatcttctgttggaccctcatggtctggtcagtccagacgatctcccatactaggagacgccgaccgtgagactcgggagaaggaacacaaagaaaaagagaaggtcactcgatcacacatcgaagtactgaaccgaccagcataccgatcgaccccttcgtcttctccgcccatacacgcgaacaatccgaaagatgccttgctacttcccactgggtcgtcacaacacccgcctgcgtcgtcgcgatcttcagcaacgctagcctcttctgcacggcctcagtctggagaagatagacgggaagttatccgactgaacgccggttcagaatcaaatcctattcaggcagcgggccagcccatcctggagagaagagagcctaggccgtatgggttttcgtttcacaacccatctgccgtcagcccggttggtccattgccaggtgttggcagttcatcgggccacaagcgttcggaagggatcaagtcggcttccggatcgcctgtccgggctggttatgcttctcattctgggatgacttctctaccatccccggcaatgccagctgtggttcccgttccggcttcccggaaatatggtctcgtgcacgcgacttcttctctccctcctgtgccgtcgtccggcggaacaaactctcatagtcaatcaggtcaacagcaccgccattcctctgggactggaggcatgaaagtcattgagcctatggatatctcctcagggtcgtcaaacctttctcagcagtctgctcactcgcattcccatcaacatacccatcatccgcattcacatcctctccttcttccgcctcaacatcagtaccagcatcagcatcagcatcagcatcaaccaatggtttcgtctactctgctccctccaccaccaccaccgccgccggcacctcctccatctatgatcctttcgaattctaacagttctactagcgcatcctctcgtaaatcgaaatctcatcgatacaccgttcctccgtcaattccttcatccaccacgacatcttccctcctccgtccagaatttaacccgactctgctctctagcgcacctaatccaactgttcgatctccattcctcatctcacttcccagagaagtaccgtatctcggcaagttcgtttacggaggacaagggtggatcttgccttgtgaggtcggggaaaaagctcatgagttgatgcgtgtgcctgcgggcgggggttcggctagatccgctcggggtggatcaggaggaggaggtagagtcgaagtcatcattccgagcggattcctcggaacgggttggacgttaaagtccaagatgggcggtggcggaagctctgtcgacaagccatccatctttggaactgatggttggaacgcgctggtcgattcgatcgggagagaaagaagtttgtggggaacagaagtttatacggacgattcggatctcgtcgctctgcttgtccatgccggttggattgtacctgcatctgagagtgacaatgtgaacgataaacccgatggagctcgagtcagaacagaagcagaagcagaggtggaggcagaagggcgggaaggagataggttgggtggcaacgggaacggccgtagcagtgatagtgatttatggagagagagcggagcgctaagagtgacgttgagggtggtcggtcgattgattaggtatatcggaaccgaacgaaatggcgtgaagagtagaggttgggggaacggacatgatggtggaagtttggtcgtagagggtgtaactagggttgaggtttgtctttttcttcttcctatttcccttttcctttatcgttctggaatttcttcgtgttactgatctttctatttttctatttttcatacgcgactacagcgaacgaaccggacaagctctctctcccgacgcacaaaaaaggctcgaatgacacaagcgatccaactccggaccgaatctataaaggaagacaattctgcggtcataaatattcatgtatggggtggagctgggtaggtcttttttttcccatcttttagtcatatacgcattccgctcatcgatatagtttatctcgatcgtctctcttacagattcaagtattctcaagcagggatccaatcttcattcaataatgcgttatacaacgcgttcgcttctctctctcttccgacagaaaacgggccgttaggcgaggttcccgatgggtttgatacagggttcagaactcaggatttatatctggaaaaccctgatgagcggtacgtcgtctgggcgcatcttttgtctatcatcggccatgagtcaattggatttgtctgatcagcttttcattcgtttccgttctcctcgaatgctcgaacttaggtatcgcctaactctctccacctcgatcgagagcgatctatcaaccgggacaaacagcccccgattctcgatatacgtccttccgaaacggtcttctaccacataccctttccttcgcccgctggattcatatgtatccccgatgcaggaacagacagcccaaaaggatacacacatggcaacggagggagaaggcaaacaggaggaacttttaggagaatcaaccgtcggcccttccgatcttgaatgggtcgagatgggcttggtcgttcgtgactcatcctccgtctcatcttcttcttttaccgctggcgctactcttggcgaatctgcgaacaaaatcggaattgaaggccaaatcggagatggagaaggaaaagaaggacaaggcgccggtcaagttagaacaggttggttctgcaagatcgagtcttactggtgggcccctcgattgtcggaccggacagaatgaagagagagagagaatcttctttcttccaatctgggttcagaccgaacgtcgctctagaaccctcttctcttttttccttcttgatgctccaaatagttataaagagttggatggaaagccaaaaagaagtaatataaataatgattaaagatctattcgatcttgcctttctctatttgctttgcccttgacttgttcttggtcacaatcttaacgaaacgtagaacgacatgaactggctcttttagagaaaagaaagcatacatagccatgagagttcctttgggtttcaaaccgaacccgtaaaagagggcaagaaaaagaaacagaattatggttcatcgaaactaggttgttcgaacccatcgaatcctaattcgatccgattgagatttccgacccaggcatgggaattgaaagagaacgaatcccccataagcaaggatacaagagaatcagaatacaacaagcagggtttgaagaaaggagacagaaggaagagaagaaacagacctgataatcgacgttcttgacatgcttgaacaaggtccatcctatgcatgtacgagcacgcattccgtagcctattcgagcacaattcgaacatgacacagaggtgagaagggaaagaacggttaaacttgcgctcgtactttccgaagcaaaagaagaaaaaacagtagagacaggactagagagaaaaacaagcaaaaagaacgtacgtgtcccagagaacatcacttcctattccctttcctttgactccatcgatatccgagttaggatcttccatcgattccacgtgttgaagtctcagagcggagagaacatgttcggctgcttcggagtatctctatttccgtgtcgtttggttgtttttggtggtgacaatccgaataatcagatatctatgcagagctaggggaggcgaatcgaaaagcaacaaggaagaagagacgtactttgaggttgatgcatgatattcctaggttaaacctgcaaggtgatttgaaccagccagaacgtttcgtagaaaggccttctggatcagcgtctcgagataccatacaggaaatgagaggagtctagagcagatcaaggaggagagaacgctacctggctctaataaatccaggccgtaaccctaaggcagcccaatacaattcgtaggcctcttgagctttcccatcactgagagaaaagaggaggacgagatgttcgaaccggtatcagaacggatcgagttagctcacatttttcaggtttgattcataaatgggatcaatctcagagggagggcaaggagacttactttgcgagggttgcgcctagacggttgtacaattgccagtccttgtggagcatcaaccaaacggcaagtcaatcattggcctgttgacttgtttttcagggaactaacgaaatgagagaagaaggaaaggataaacccacattaggcttcacggagagagctgtcctgaaacagtcttgggcgcgttgatactcctttggtttgggtgataggaagaagaggaagatgagcaattgcctcatggaaggaagatgaaagtgaaaggcacaaggtgcaagtatactcaccgctgtcgagctgaacaacactccgagtgcaacctgaacctctggatcgatttgactttgattccccaatctagccatggtgatcaatcgatctaccaactctgaatgtctcttcgcgatcctttccgccgcttctgctcccctttgttcagccttttctctctctcttcctagatcggcatccgtctgatgaagagagcctccgagtcgaagtggttcataggcaggcacagcgttcgcatagacgttcacccaatcttccagagtactcaacgcagcgaggcggtcattatcgttcgtcaacgagaccgccaaagagaggtatgcctccgggatagatgggtcgagtgagatagatttcttgagggcgagaattgcttgtgactctcgctgatttttagaaaacaagaagattcgttagaagaccgattatcgggctcgagaaagatctgaagagattggcaaaagagcacaagagagaaggacggacctcgttttcttgctgcttgacccctagttcgaaccatgccctcccattcttcgggtcgttcagaaccctagcctccatctctaacacgcctttccatccttcttgatggtcgctctcgagcagagcttgctgctctgctctccatccgtctctcagccaagggtttccgttttgaaatatatactgttcctgcctatcgaaatcggcatcaccgagtgtatccgatccttggaggagccggttgatttcttcttcccttgcacttgattgagcaccggggacgttgatgtgcataggtccgttaaagaacttgaaagcttcgtcttcatcctcctcctcccatagagagttagaacccaaaacctcggtagccgatttaagttccggttcggtcagtgctgtgtaggcactttcttcttcgggtcggcctgattgtgtggctaaggtcgaaggcatattggagatcagatgttcttgtcgattgaattgggcgtcccaatcgtcaaccgtccgggcggaagcggtggcggtggcggcatcgacgctaaatggttgtctattcaagagagacccgccggtcatcgtctgaggatcgaacgctcctgactgaaatccgagatggccaaagccgtttggttgagtgtaaaataactcggagctatcggcggtggtggcggccgcagggctatcaacaacatgcatccgttctttgccttttcctcgttgagcagaagcgaacgattgggcccagccttcctcgccttcccttccgagttcaaccacatgctctccttgaacatccttcgtcccagcggcaaactgttccatcagacccatgaaggcagagtttgccattctgtttgctaccggatctgccgacgtccggtcgacccgctgaagcagcaggtccgccgtctcggcaagagaggacgacatgaggttttctctctcggccggagattgaatagatggagcagagtagtctgagctgatttgagccgggtgtgaaacaaccggatgagggatatgatggtgatgcattggcacagacggtgcataagaatggaaggcgggctgtgtggggaggaatggagggtctgttggtatcagaggaatgtttcgtaacatctttaatcagttgaatcatcaactatcaactattgatctttgggcaagaagacatgaagcacacgtacgatatgtcggacctgtcaaatgatgggtctggcttgaagggcctgcaagagcgaatgcttgctgtggagcccggctattttcaaatctaaggagaccgttggttgtatctggatgagaagagaagcaaaatgagacttccacttgatctgaggtcgagagggatgggttgaagagaagcaagcgacttactggatattggtggacgagcatttgcagtgattcgagctcgctcaaatgcctcctgaagctctgcgtctccgcgacttggttgtatgaactgaaggtgagcttgttgcgggctgtactcggaagcccatctggaatctgattggacgtggttgagaggtctgacttgattttgttgatgctgatgggtcgacgggccaggagatggggcgatggttcggaacgaagctgcaggctaggaggtaggaggtaagaggcaagaccgaaggatgacagatgggttcagcttgagagtgtctgagacaggatggagtatggtctgagcaagagcatcgagacgaagacacacctgtctggaaggacctgctctggagctgccatatatgtcctgtggtgagatatgaggttcagtagtgctaacggcaaaggagatggtaagagaggaacaggatagcctaccgattgaggtcctctgtcttgatgaaatgttgacgataatttgttcaatggattgttgactcccttgtctcctccggacagcatggcagggaaggacattttgtgtgtgtggcagtagtagcggtagtgtcagaggtgatggtggtgatggtggtagtagtagtagcagtagtagtatgagcagcagcagaagtagtactggcgagagcgcgagtgcgagaagtaaaagtaaaggaacgagcgagatgatcgttcgcgtaggaaacagacaaccgccggcagaccggctattgtggattgccgtgggcaagagctgtgcttggctgtatgcagcacgtgatacttcgccctccaacggccgcgaccggggtccctctgtggcacaagcccgtccgaggccgggctggcgtttgctggtacctgaaaatagagttcacatgttcctgacgtactaaatactgacgatctgtttatgaaatctaaatttagatacgaagatgactgtccgccctacgtgggtgcgtgtcatcttccaaggacttctattaccaacacatcccaatcgctccctccggcctccgttcatacgaagaagaagacgctaaggtgatggtcataccactttcagccgttactcacttcacacagacccaacttgtgctcacactacacacccctatcgttatagagactacacacggtcggcccatgctaaccagatgaactataagcctcgtgttcaagtctttggatacgtgggttcagcctaaaaagtatttgatccatcatcctggccatctggtacaccgtccctccgactaaaaaccgtcttgtccacgttgggtctggcatattgatcttggccaaactcgctcatatcttgttccatccgatcacccccacatggtccattgggtccccactttaatggatcgagagagatgacccttataaagtacatactcttttctgcttctgcctcttttcatttccccatcttcttgctctacaactctttctcacattcagcatacttctattttctctcttatctctgtccttgtatctattcctacccatcatgatctctgacaccgtcatcgccattcttgccgtcgccctcgtcggctcgaccgtacaagcagctcctgtcgatgcgaccgcgacctcaacctcaggtattatcgcggtcccaatctcaaagagcgctgctcagcttgctcgagaggccgacccggtcgtatctctcgactggctcaagaagaccaaagctcaggctcaatagtcagtgttttcattgccactctttgagtgtaatcttggtctcgatttgcgctgtgcggacatggttctgactaggcatgtgcgtgtatgtgcgtttcgacatatagtaagcacaagcaggccaacgcccggcttcactccaagcgagccaccggagcatccgttttgaccgatcagggaagtgagtctctctggactggacctatcaccatcggtggacaatccttgtgcgtttccgtcatcaagtcttttttttcttcttggtagtatcgggatttaggcgctaacgtacgtttggtaatcgtattcgggttccttctcttcctctagtactgtcgactgggataccggttcatctgatttatggcaagtccgacatcattctattctatctatacaacacgctctcaacctgcttcatttcacgtacttctcttcaatagggttccttcttcggcctgctcaagcgctgcctgtaacgcacaccacaagtataccttgacctccactggaaagaaggtaatgatgctcgctcagtcttcgaagacctctcgcccaaaagctaacctgtcaaggattggaaatatatagcaatccggcacgttctcgatctcctacggagacggctcgagcgcttccggtccagtctacaaggacaacgtcgtggcttccggactccaggcgacatcccaggtgttcggggccgtcacctcagagtctagctctgtgagtgttttcctttattttgtcctactcgtcgagcaaaagggcccaggatgtgttctgatcatgtgtattcgttcacctcccttgtttcatagttctcgtctgatccatctgatggaatcagcggtctcggctggcctgcgctcgcccagttgtccggaacatcatatttctgtacgtagtggaaagctcttgtttctgtgtctatttgttttggtctttttctaactctggtttggatttctctctttttcttcatcatcaagggtctctgatcaaccagggtacggtaacctccccagtgttctctttcaggctcgccaccacaaactctgagctctgtacgttactttctctttcttgcatctcactcaatttgattcatgctggtgctaacctaaagtttccttttgttttcctcttccgaaaagacttgggcggaattaactcggcccactacactggtgcgatcacctacacgcctgtcactcagaaggcctactggacgatcgcccttggtggagtctccggtatgtctgctcgctcgtgtttaatttctatcagcaactctcaagttttgaactgcaattcacccgattgatctcttttctgtattttcgtcggtttcagtcaacggcgctgccattaacccctccgtttcgagcgctatcattgataccggtcagtcgttttcctagttgtatgctgactaggactttgagctgctcttctcatcctcttttcttttacacacacactgcccggtttgtaggaactaccttggtgtatggtcccactgcgggagtcgctgcgctgtacgcaaagattccgggatcggcttcgatggctgatacctatggatccgactatcaaggttactacaccttcccttgtaagttcctttccttcctcgctctccctctttttttttccttttccgttttttttgggctcctcctttctagtcgcgccaggttcactgacaccgagaccctctctcgcggcgacgacgacttttctaaattaattaactttgattgaaaaaatcgaatataggctcggccgttccaacggtagccttgacgttcggaggatcgtccttctccgtccctacttctgcgttcaacctaggaacagtctcatccgggtcgaagcagtgtgtaggtggaatcgtaggccagggtgatggatcctggttggtcggtgatgtcttcttgcagggcgtatagtgagcttcctttccttttcttccttcttctcctccagttgtccctcgtgtttgtttgtttgtttgttttttcgtcgagctgatgaatgttctttcgtccgggacacctttttcttcttcgtttcgtaaaagctcaatctacgatgttggaaacgccagagtcggattcgccaagaccgtctaaaagaaacgcaaggcttttcctctcatcttctcttctctttataattcagacggcaaggcggagggagcatctagttctatatcagcatggtaggggacgggcagtattgtactctaggcagggatataaaaagatagaacgaatggatggataaaaggaaggaatctaaagaaaaacagacatgccaagaggatgaaccgagctgagcttagataaaaggttccctcgatcttctgtttcgaatagtttgacttgatctatcaatataccccgttcatcgtctctgtttgcttgttttgaaaagaacgagagaaagagatccaaaagatgagcgatagagcatgactggtttttgtatatagaaagatgcctgctggatcaagtccttcctctctgagctgagaaggaaagaaaggaaagaaaagaaactgttcgatttagttgatctggtgcactatagagtcagcccttcgatcaatcagccagatcagtaggtcggtcagtccatcaatccttctgttctcaaaacaagcttctttcgtgtttctctcaactttccttgcgtacgaacatttgcctttctcaacatcagacgagaaaacttgtgtgcgtcggcgaggcagccaaagaagatgatgagaaaaatagcatgcaattccgtccctctttttatgcgtcccaaccagcgttggcggcggcaggagcctgagcctggggctcatcagcggaccaggaagcagcaggagcgtcggcggcccagtcggtgttctggtcagcggaccagtcgacgtctagagaaggagaagaaaaaaaacagagacagcttgtgagaaaaagaaatcccctaatggccaatacacagattaaacaatagagaaactagaaacggatgacttactctcaccagcgggggcggaagcgatggcgggaagggaagcatcccactcaggggcctcaggagcggcctcggcggatccctcggcggcagcggccttggcggcggcagcgtcggcagcctccttctcgacctcttcggggtctcggtagaagaacatgtcgggcatgatggcccagggctcggttcgggagacggatcctcggagtcggaggacctctcgggcaaggaaccaccacataagaccgatggagtgcttggacttgttgttggtggggatggcgatgtcaacaaacttgaggggagcgtcagtgtcgcaaagagcgatgacgggaatgttgacgaaagcggactctcggatggcctggtgatcgactcgggggtcggtcacaacgatgattcggggctccttgaacgatcgggtgatgtagttggtgctgaggagaaaggagaatgaatgtaaaaaattctgtcagctgttgtttttctgactgcaaccaaggacagacttcgagtacatagatactcacaagtttccgggggtgaatcgtccagcgatggcctgggcaccggtctgggaagcgaacttgaggacagctcggtgaccgtagggtcgggcggagatcacgcagatgtcgttagggttctcgatcgaggcgagaactcgggcggcaaggacgagcttctcccaagtctttccgacgttgatgaggttgatacctagatgtcgatgaggacgaacgaagaaaacaagacaaagaacgatttagggggtctgacattcttcatgcaacagtccccgtgttctcgttggtggcacaacccccttttggacgttttcttccccaccaccttttcctacgccgtcacacaccgtcgaaaaggggcaggggagaagagactgatgggtgggaagagaaaaaggacaaagaacacaggaactaaccgtcagctcgtcgcttccagacgtaaggctccatagccttctcgcagttcttggacccaatgtggcactgggcggcaagaaggagctgaatatcgtcctcggtggcgttaagcacggaggggaggggaacggcggccatattgaaggaagattggggctggagttgagtgtgttgagggaggggattcagagaaaaatgcgagggtagtggttggatgtaagaaaccgaaaaagacacagaaaatcaaaaatgtcagtttttgtctcgtggaaaatcgatggaaacactgtgtgggtggttgttggtatcggggaatcggttcaaatcaaaggtattcctgagcatatggcctcgtcctgctcctcctaatccttattcttcaggatgaatgaggagaaagtgaagggaaaggataaggcgtctattccatccgggataaagattttagcctgccaaagaccttttgacacgcgatttgtgaccaatcttctttcttttcgaagacaccctggcagaacacctcgaccatcttcactatggaacgtccgcagacctgatcgtttccatccgtttcttgttcggccggaaaggctccctttccattgtcctagcaagaaaagatcgaggtcctatatcttttttttatcccattttgtcgttcatggcctttttttttgatgtccgtacagtctcgatgtatagtaaatttggcgatcggggaaggaactgatatgtcgaagtgatagcgatatctggctgtcgtctttctctcgtgtcctcattccctacgacctagtctcttctcccagagagcaggaaaaatttctaacgatcctaagacccaaccttccaacgtttctctgcacctctcaacaaaaggcgagaaaaaccacaaaaacaagaatccatcgtaccggcaagaagcgatctgacgactacgagcgaatcgaacctcggcagggaagggatacgttcaaaagaaacggtctttcaatgaaagatttcttaccttgaacacaactaatcttgagtgcaaacgcagaaactagacctttttcgatgaagtgactagaatatgccggcagagcagacccctcgcgcgccggagccctagtctgacttttgtcaggaacatgacttttgaatcaaattacgtaatcgcgttgataaatgaatgaataattgattgttcggccaaaccatgattacgatgagatgttatattttacaatttatggctttggccactacaaagcaaacgcaaccgatggcagtcgatacatggcccttttggacttgggtatcctcagaccacgaaccacagatcaccaaggttcccatgtatcatgggtttagtttctgccagcctcaatgccagcctcagcagtcttaacatcactagcgacggcgtcaaaccctgacacccttgcctcctggttctcctcccggtgaagggctaggtgcagcgtgttgcgcgacgcgttcacatctctgttctatcaagtctgagagtaagcatcaaagagacagaaagacagaaagacaaaggaacagcgaggcaccgtcagcttcctcgctctgtctgtgaactcagagactccctctctcatggtggctgaagatgctttgagagaacgtcatcaggacaggatgtcgatcgcttgtgtgcctgctcgagttctgccctgaattcaaccggctgtgcctgcgaacctccctttgacggctaaacacctgtcgatgctaatctctcatctatgagatcgtccttgatacaatgttacctttcctttgtcttcatcttcttcatcacatctgcaagcgcacatgatcacatcgtatagaatgtcccacactcgaaacaaagcacaagtccctccgagtgacgtgtgtttctttatgaggtctagtacacttgaggtatcaatccagtcgggcagtgtcgatagacagttttcgactctaactcagagcgtcgagatcagcagccagtaatcgactttcatggttgtcgagtatgtatcatcccatgcgcattcataggatgatcgtagccacctgcgacacactgtcacccaaagacgtaccaacaacacaccgatcacagtcatcactatcagtcctgatcgaatgactcgtcgggaggacgagatcgacaagattctggctttcttttctcagcatgacatttcctggtggtccttcggcatccaagacaaggatcaacccggactcaaggcgcggctagtccctgtcagcgcgcatgtacccgttgtacggcaacagatgtcgcatgggcgcttagcagcatcgggaacgtccaaa

SEQ ID NO: 1317 - DNA, 1117 bp, Xanthophyllomyces dendrorhous
aagttaatctgataaaaatctgtcccaaaccggccgatttcacccggatcagtcggccgacaagcgttcgctgcggctgaaacgctgctccccccgcacatgtttggtcagtgtattaggaaattcgaatagaggaatacgaaaaaaacgtaacagaatacgaaataagcccaagagaagcgcgaaaacgctctgattggtcaggtcctgccttccgttattttccacccaacacgcaaagccaatacttttctctcttcatctttatctgattaacttttctctcccctctcccatccatcgtctgtctttcttgttctttccattcctccgttgctgtttgaacgaaacaaaagagagaacaaagatctatagagaatttatcgtgtttgacttgagcatttactttcgtgtccactcatccgatctatacaactcatctgctcttcatcttgacaagccttttccttgtcagctccgcttatccgatatccgtgagttttaataatttttttcccttcatccttcctctcctatcctccccgcccccgccatttccccctggattttttccaccctcttctcaggcttcttcctttccttcgagggtcatgcaaagaaaagaagacgttatctgattgacgacaaccctctcttgtcttcttttccctctttgctcttctcctctttttgttgacttttacatctcttgtagactaaggaagaaaagtaaattgatctttcactcggatcttctcggaaagaacacgaggaaaaaatccaaaaaggagcaaaaaaagaagaagcaacatctctcctgctgtaggtctcttcctgttctcgacgatagttgccttctcctcttctttttttttctttcttcttccttgctcttcttctgattctggaacgatatgactgatatcatcatgcgggcctttcacacattctagctcaatttatctgatatcgacatcctctacctcccttctcaattagacttacacccacgtctctctccgtgatcctatctttttcctttctcctttcaaacactcgatcggtcagacggtctccttaagctctttccataatagacaccattgcaagttccttc

SEQ ID NO: 1318 - DNA, 41891 bp, Xanthophyllomyces dendrorhous
ctctttcttctccctcttcttcctctcggacagaaggagacagccgctcccagagctgatgggagagggcagcgcgctgagaacgaacagatggatcagatatgtcagtcattgctgcagcctttcttcagatatctcctcagatgactcgtcttccttacctgactgatactgatccggctctggatcgtttctccgacgtttgtctccagccaccaagagatgagccgagaagcccggcgcggcatgttcaggacgacatggttctggcaggccgtggtccacgacctggctttggcgccgatcatgaagcctagaaatctatgacaacagcaaatgaatcagtccctgttcgcagccagatacattactgccatggtcaaagagatcactcactttgagtctgttaactggtgctcagcagggaaagagacgtcgcggaggtcgttgagctcttgactctgtgttggcgctccttggtgcaaatttcctccacgcgtgttgaaaccaacgtccctgaaaataaagccgtattgtattggggagattcggtatctcccctccatccgcgcagaccttcgacatgtggatattgagaaggcgagacgcgtcaaatgttatctttcctagccgggcaacggccgactcgatcgggccagccagtggctcaaaggcgagtaaagaaccaaagcctatctttactgtccctgacaccatagggaccgctgacttggcgtggatttccaccctctgacgagggatgtaaaacgggtataggtggttagatcgccttgagtgcccaacctgacagcaggctgagcacgtggcagtagtagtagtgggagtagtagtggtagccgcaagggaagactttgccgaggcctgagccgtcctcttgcgcttcatgtcgaacacaagaggagcggcactcctcaagacaactgatgagtgttctgatatcaagagatgttctgatatggaagagcgctctgatcgtctggagttcgttgtgtcttataagctgttgggattgatgtctgcttgtttgcagaaaatctcctttgcccggtttcccctttgatcagtttgactggctgtcggtcatgatgaacgacctggtgaacgctctgccgtccacagacaaagagacaaagagaaaaggacatgagcagacaaggagatcatcagacaaagcaacagatagccaagttatcaagtgttgctgaacagctgaagaaaagaaggagtctatataggcatggtgggtgtaaccatggtgttacacgtctgtaaccaaggactcacagatcctgcgccacaactcatagtcacacagcgcatgtgctcctaacacatccagtgatctgttcttgattgtggctcatctgtgcgctcgagagatctcatatgggagatcatccttcgtaccatattacctttcctttgtcttcttccccatctatgaatatctcaactgctgagacaaacactattgagcagaatccatggattagaagaatctcatctcaaaccctcaactgctggtcaatgatgtgcgcgtatttcgtgtcgaccagtcagtgcaaccttatgacacagcgcctttacgatgagcataagacttgtaccaactgaggtagccagtccgaccgaaggagaggagagtttagtgagccaggcatcccagtatgtgttaagctaagcctatacacgtcagagatcgagaactatcgcaagaccgctggctggctcgactacttggatgatcatgttgtatatctgacaccgggcgtctagatggacaccgctgagatcagctgcgcgtggctcgatcaagcatgtcttccctgtctctttgtctgtctgtcgttttgtctgataatcttcttggctgctcatgactgtctctatgtcgcgctactcctttgtctgtttgatacttgctctcagacttggtgggacagagatgtgaacgcgtcacgcaacatgctgcaccttgcccttcaccaggaggagaacaagggggcgagaatgccgggctttgacgccgtcgctagtgagactgacgttgagactgccatgactgctaagactgaggctgaggctggcacagactaaacccgtgacccatgggaaccttggtggtctgtggtctgagggcacccaagtccaaaagggccatgcatcgaccaccatcggctgaggtcactctcaccatgctttttacatataatagaaaccagatcgagaaactgtgatgtacggcctccttcttccacctccctttcgttcgttgagcgccttcacaagacgcaaaaagacagccacaaccgcccatgaatgcctgaaagacaagagagaagaagagacctcatgtcctccatgggtcgtccatgtcttggactaggtcaatgacgtgagctccgacgatttcctcgctcgtcggtgtttgtcctcctaccggtgccggtgttgtcgatgcagatgtagcggtagatactgctcctacatcggcggccgacttgaatgagcccagagatgattcagaaccagatctcgaccttggtttcgagctagatctgattgccgagcccgaagccgaatcaacatcatgttccgaacgactcggtatgttcaccacatggaccgtctgcgctgaaagatctggatcgatgctttgctcaacgtcgtcgtcgtcgtcatcaccgctttgattgccgttgtggttgcgttggctcaaatcggaattgacgttcgcgtcagacaatggagagggcggccggtgaagagaatatatggagctcgtgctcgatctgtctggggatggcgtcctgcttcgagtggctgctgtgtttggaagagctgagacagaagaggtcgatgcggatgaacgtttagcacgtgatctgctgtctgtttagatacgtttcattttgtattgaattcgatcacaacatcagacttgtgcgaacacaacggacaagaaagagagatttaaataaataaataaatgaaaaagacaaaccttgctgttcttccaaccgattgacgaggtctctcagccgctcacagtcctcctcgacaagcctcaaagcctctttcagcatgaccttttgttctttctcgtccctcacctcatcctccatcgcaagccgggagtttcgttcgtcggcgaccatcttatttgcctcttcgaacaacgcctgggacaggttctcgagttcctcctccaacgccgcctttgatgactttaactcggcgagctccgtccgaaggctaacgagctgggtccgctcggccgtcaacgtctgtcggagcgcgtccatctgagaggtcgtgccggcttggctgtcaccggcggcagacagtgacactgttgatgctccaggagagagtgggaggttgccgaagccgagtccaagattaggggtggacgagttgaaggaacgagaagaacctgcatggggaggacgggcggcgagtctactcggactcccactgtcgccagaggaaccttccgtccggggtgtttgttcttctgccggcgcgggcgcatatccatccggacggttgtccgtctgattgagagcggtcgaggaggcagctggggaaaagccaagtcgtttggactgtcggttgaaccagcctccgctgcttggcgcgttggctgttgttgtcgtcggcgtcgtccgtgcttctgaagggaaagccatcgagttgggagatgagagctcggttgaccaacgatcagcagccgccgagggcaccggcgaggaccgggcggaggcggacgagttgttgagcgaatgggatttaggtggcgccgaccggcggttcgtctgggcgacgatagcatgactatgcggtcggtcgagtgcgcgtttcgatcagtacacgcatcatgtcaagttggaaagggagtaagcaagagaagaaagactgaaaagaaggagcacactcacccaaattctcctccgcgccgcatagcttcctccatcatttccatgttagattccacgagaaacagattggagcctaaacatatataggatatggcggatcccagttagaattgaatcacaaacattgatagcatcaacacaggacgtacgggctactttaagctgatggtccgtgtcgagttgtttcgccaaagaggcatgtagtcgagctgtctgcggacagtaagacaacagcggagggttcattgtaggttcagtggaggttttcttttcacgaacgcagacgagacggatccttggatgtatgcttcttcaaaaggaaaccctaaagaaatccaagacaaagagaggagggggaaagaatgaatgaaaacgagggaaacaaggaacagaagcgatctcaccaggccgtctacatgctcgaccagcgcgccaagagcatggctgatctcttgtttgttgtatgtatgtgaggtcggaggagacactgtgttgtcttgaagggaggataagagcaatcggaaaggggccagatcgaacgacagggacgatgccctgttgcgtctgacgaatgaggtcagtggttctcgcgataactcttggggtagttcctgtagtggttgtgatgatgatattgtcgatgatgctgttgttgatgttgtcaatggtgttgctgtctttgttgacgatgatgacacagagaggtcggccatgacttctgcagagagcgacgaggaagaagccgaggtggtgaaaatgatgggcggatcaggaggtgtcatgagtgcatctgaatggctagagagagatagagagagccaagagaagatccaaaagccaggaaaagatcaagaagaagaagaagagtgaatgcgagtaagagaagaagaggaacagcaagacaagaggggacgagaagaaagatgaaatgaaagacaacgcgtgttgtataaagtagatggagtgtggggggaatctgggtgggcgtcggatggtggttacacggtggttacgttaagcacacggctacgtcatcatatcggaaaattaggctgagggccagtgaggaccacagcacagactgatagatcggagcggtgacaaaggagtatagagatgagagcacagcagaggggggtttgtgtgtgtgtgtgtgtgtgtgtgtgtgtatttccacgacagacttgaaaacagatggagccacggaagatgattaggagcagagataggtacatattatagtgaggaggtcaatcggccacggtttgaagagataaacagaccatggaacaagacagcactgtagacattaagacgcacagcgcaacagaagagccagtaggcgatagaacagacgaagtgacgatattttattggtgtatgtacgagagaaggacggtagggtaaacgcagtggagagagtatagtatagtatagtgcgataatgtacagtacagtgtacagtacagtgtacagtacagcacagtacagtaagagttcgacagattatagtctatacagaagactacatagtatcatgtggacaacagtgacacctgatagaaacagatagtaaagtacacactcagtacacaatccaacacgctctaacacacatatcccatacaaagtgatagagtcatttcccacaacggaaagccgacagaggagtcgtgggccagaaacagacgatccagttagggttaccgagatttaggccgcggtcacattagcaagcatccatccgaccgggctcgacgcgagaggctagaacgttcggccgtgggcatccgatgcgaccaaaaagcgcagcagccaaaccttacctgcgctaccgaccgcgcgcttggtcggtcttttttaacgactttttttcccaatcttttccctctctgttctctgcctctcgaccctgccctggtgcctctgtcccaggctcgtgcctgtgctctttgtcatccccctggttctctttgtcatcctctcgttcctgtcgtctcttttcgccctgagttcttctcttccaccctccttccttccttctttctttttttgcaaacgaccatcccatccgacattcaatactcagaggaccacaactacggcaaacttcagccttccaacgcgtcttctctccctttctcttcctccttttcctttcccttcccgttctagctcacagctcgcctaaggcctttgcccaatccttcttggcactgtactttcgcttcttctcccttctattcgtccccatcggctcctccaacccacggcattttcttcttctttccatccgatgcttccagccaacctacagggactgaactcccttttcagcccatctccctcctcggagcccatcctttcggacgcagaccttgcctcgaccttggcactgtggacaaacatcgacttttcatacgacgacggtggaatcggtctcaattctggtctcaagttgctcgaggaagatcgggctagagaggctagggaacaggcagccgccgcggctgccggcaactttgaccattcttctattgccagaaccagggatgacaagcagttctacccgtcgcctggatcgactcggcaacagcagcagcacactcccagctctctaggtgatgactttgacatccttcccaacggtcctctttccacccaggcatccaccccggcctcgttcccggtcgacggaaaccagcctaccccggtcgacccgttcgatccctttggcttccactcaactctctttgctctcgcacagaccgatccggccgagctccagcttaggtttgccaatgaggtccccccgaacttccatgcaccctcctcggtcgcgtcgacccccaggaacgtggctcctgcccccccggccgacaagccgacaccagcaaagacgctcaagcgaaacgcttcccaggctgaattgcccacatcccgagcgagctctgttgtcgctcccaagaccgaacaggatgaagagatctctcacgaggacgagttagtttggctttttcttgtttcctcctagattgtcccgatctgatccctgatctttgccattgttctttctgtctttccttagcaaacgacgacgaaacacggccgcttccgccaggttccgagccaagaagaaggagcgagagcaggctctggaaaagtcgtccagttagttcatccatccatccatctcgttcgggcttctcctggcatacactcggtttcttactttcttttccttttcattcgcagaggaactccagaaccgatacgctcttctggagaaagaagtcgagtctctccgacgagagaacgtctggctcaagggacttgtcgtcggtggtggaaacggtacggttcctgtgttaggatccggcttgcccactgtcggacgagccgaaaacagaagttgaacggggtgctgataatggatggagcggtagagtcgggtcagcggcagagtcgtcggttttcatccaagcctttcctttcttcgtctctggggtttctttttctttgaattcgagagggcgttcccttcctctcgaacttctttcttgtttgtattcgctcttttttccattcttctttacgaggttgtatatattttcttgcaccatgtttcaacacaaacccttctctttacttttcatccttttttccccctgttaatgtttacgacctcgccctttttcatcaaactcttcatagtctttgccttgattttctctcgttcgactcggaagagcttcagaaaaagactatgattgtccgtcaaccggcaatgtttttcttctttctcttaacctctcttctcttcctctctctcctttgaatgttcaccctccccctttttgttcacttaaagtaggcctgattctttttctctcatctaaacaaagtctctactcctcttttccagttttttcttttcttttctttctttcgatcgatttccgttccattctattcgattcaaggtattcttttttgctcggtcgagtatggtccatcataaacaacgtgcatgtcggaagtctccatctagaaagccgaatgtggggcacatgcacatgcgtatgcgtcgagtcagtcgtcggtcgtagggttttcaagtccctgggaagagatcttcaagatatacagaggtagtcaaatacattttatttcattcacgcccctgtgctgtttcactctcgatcatttcatttcatatcacactgcatcatatcatatcgtcttgttcgttctgtctgtcctttactttgctttactctactttactttattctgcactttgttctttcgggagatcgaacgaggaacgaatgccagagagatcgaagactctcggatcgattcaatcagatcctgcatctcctcatccttatcttcttcttcatcatgcccgtgtctttctccttgttttccgtcatctccgtgttcgaacccacgtccatgtgtctcgtcatcgttcttttcccgtggcgagtccgatggacgcgtcaggttcgaaccgttcttatcggaaggtatctcagagcgaggtaaacccgattctatcgagtcaggtgatcgaccacctgagccttgagcctgggattgtgcatgaggatatgcgcgcgcatgggtctgggagtaggagtgaggttgagatgaaggccgagagtgggaaggacggatgagggaagctgctggaccatgggattctattatcgagtttatctatcctttcccccccccccggaggttgcgttttccgaataatgataaagataagaggatcgagtcaagtcaggggacaccaggaaattgttagaaggcgcgccaggggagaaagacaaaccccgaacttgatgatggcgaaatagaaatcggttggaaaccgatgtgcgtcgacgagatgtaatctcctagctttgaccgtgaggaattttctaggacaagccgatggtggtaagaaacactcgtactaagcgaggaacgaaaaaaaagagcactcgttataattcttcctttgtcctttgtcttatgtctcaaaagagaggaaaccgaggaaagaaggaacggacggttcggctgccttggtctcgttcgatttctaagagtgggttatgaaactcgttttgatgctaccccattagatgcacaagagaaacgtttcaaacaaaagttgaaagctcaacgggtcgttcgagttttgggcatagagagaaatagtcaagaaaacagaaaagaaaaagagacggacaagttccaagtatcgtctctccggaaaaaccttcccacaagtcttttctcttcctttcccttttcctcttcctccgacgtcacccacaggcgcctcacaaacgagttcgtgaatctttgcgtaatgtcgttccaaatcaccgacggtcgagaagaatgtgggtctggacgagcagagcggaggtagcgtgcactttaacgattctccaggcaaagaactgggtagccgggtgtatttcgagattgctctaggggacgatgcgtctgacgaggagtcagaacagtcggaggagaccggtgttgttgatctaggtcgtttgagcatcctttctacctacgccgtgcgtgttgcggttctaacccctttttatttggaagagattgtagaaccaggagttatctgtaagttatagatagtctggccagatagatgaagagtggtaagcacagggcgattcttgatgatgaccagagcgaatggatggagaactcggaaaaggctcaaaaaaatatccgactgaaataaaaatcatcatcatctttccatcaagaaaatccctaccgactactttgtcaaaccttccaccttaccctactcttccttcctacgttcacaatcgacctcactgcctcaggcgcgttgaatgctccgtcggatctctgttcatgccactagtatcgtcaacatcctaactcgcccgaggtcatcctcctatctcggtcgatcggtcagctccgccattctccgtccgtttgtctctccgcaacagaagaaaatctgggtgaacaggcttgtgaaatccaatggttccgacagggagagcgctgagagagagctcaggtggataggagaagagatcagcaggagagaaaacagccagggaagctcgtctttcagtaaggatacggtcgaacggatgatagcagaaagagaggatggaactcctctacaatatgttctcggtttcgtccccctttactttcccgttgattgctcgtctcctttcccagtttcaatgtaactttgtagctaacgatggggaagggtttcttctccttgcgtctgacatgtggcatgattgtaggaaaccaaccttttggaccggatcttgttctgaacgtccgacgaccggtccttatacctcggccagagaccgaagaatgggctagccgactagccgatctgttgacatctcttccctcttcctctccgagaatcaacctgttagatctgtgcacaggaacggggtgtataccacttctgatctgtaaatcatttgaacgagcgaatcgacctctccgagcactaggagtcgatatcttgcctcaagctgtcgacttggccaaagagaacgcccgtctatcaggaatttctactttaccctgtaccgccggtcgaaatcgagatcaagatgagctcctgatgacgttcgatgtgcgcaaaggagatatgtttgatccgtctttcaaggatgggttgagagacgtttggggaaatattgatgtgttgacatcaaatccaccgtatattccactctatgagatagaaagtctagacgagaacgtcagatcgttcgagtcgcctttggcgttgttaggtgatctacctaaccttccgtcgaacgtacgtccttctctcttcacttctctcgccttctcctttatgttgcactttcaccataagcgcaggatgctcatacatctcctttatcaatcggggtttttaaaaaaataaaaaaataaaaataaaattgagtccagttttatccgcaacatttgcaacactaccagacccacggcctcgatttttacctccagatcgctcatctcatctctgccggcctcgttcgcccccctcaatcgtcttctcaaacatcgtcctcatccaatcatcgcaccccacaggttatactggaagtaggttacaatcaagcttcggctgtcaaagagatcctgaaagagggaccagctaaagagctgatggagtctgtagaaggctggaaggatttcgcgggaatagaaagagtcgtcgtcggcttcctcaaagagcgatcttaaggcctggtgggaggcgatgctgaggccgagtgttggcttgaaggaaggggggagtttgcgttgaaccataatctagatagactgtatccgcacacatacacatatatctattttttaaattaacatcaatcagaaagcctttaacagaaaaacggtatgatctatatacagctgaatgattctgatcgataaagccgaatggattgaaaggataacattgttttgagaggaagaacaaaatcgagtgcgaagaaggaggaaataggcaacaagggggacctaggggtgaggtaaggaatacaaaattgagcgaagagaagtgtagcacaatatggagtgtatacaagtaaaggaatcgacaacagcgcatctaatgactgatatattggactgtaaagccagcacaaaccaacgaaatcaaggtcaaacataattcgttgatttacattctagcatttcagagagaaaaagtatagaaaacaatgaccacgtacaaacaaagctgacatccggttggccatattctgcccgaaggagatcgtcgtgcatgttgcccagatcttggttcgtgaaatggttccatctgaatccagatgaacgcacacatacaccagacagcgtcaaatttgtttaatagatagagggcatatacagaaggaacatagagaatgattttatttttatttttaaaaaacactcacgagctcgtatctccatacaacagagctggcgccttggtaatctgctttccgtccttacatctcttacatttgaagatatcgtgtgtatcacaaagtgtgttttcgttgaactggaaaagttcacgaagatcgttaacagaaaagtgacgttcggtcgtttcggcgttgtcgtccaccacgcaagatgacagggcgaccttttgagatctagaggaatgcacataggtaggtcgaatggtaagtaccaaggccactcatagagatattcgaatatcagaaaacgggtataaccgctactaactgtctctggaacaccttctcctcaatcgtaccctatacgatgagtagaaaattgaacgtgaattcaacacgcggtctaagcaacaaaatagaagactagaatttttctaaacatacagtggtaatgaaccggtaaacgaagccttaaggtagagacgataaggatgtatgattagtaaagtggcagcgcagagcgcaagggaaacatagtagcacctacattctttcgtttggccatcacgccatacacgagcaagtgcttgttgatcggctacacatgagagaaggaagaaacaaagagtctcagtaaagaagcaagtactaataaggtttctttaggattgtatcttaccagcgggattctgtaaatgaagaagaaagtgagaccaagcacatgagaacagtcgcgattagcaaataaaaaactctttacatcaccgaacgtatgaagagttgaatgacttacccagtctgtagatgattcaaaaagaaaaaaaagaaggagataagaccatcatgttagatggaacatggacaagacatgaaacagccaaatccaaactaacctgggtcgaacaagatcagccggttggcaccaatcaaattgataccacatcctccggctttactactcaacaagaacacaaactggcctccattcgggtcgttgaacttgtcgaccaacttctgacgtttcgtcaccgccatcgatccatctagtctgagcacagggtatcttttagacgatcaatgagcaagattgattagcaaatatacctgttgtgtaacaaactgtactcagaatacataaagcaactcacttgttgttatagcaaagcttctggaacaggtctagggtctgtgtataattactgatcagaacgatcttatcgtctgtagttgtcctcaactgatgtaagaatctgctcggcagaagagaacatagtcaggtcgagattatgctgtaagtatcacattgaccaggcaagaagatcacagaagaacatcgactaaccgttccaagaccaagaacttcccaccgtattctgaatgaatcggccccctactcgccctcttgtctttctcataattctccggcaataaatcctcacatccctgaagatctttggaaaggtccaacagatccggatggttgcacagtttcttaagaattccaatagctttgagcggttgtgaaccggttcctctaagaagtttacgaatgtcaggtgacttgatgaaatgtcggtagagcgcgagttgtagaggggcgagcgagcaaaagacaacggcttcatatttgaccgggactgggtttgaagagaggaaacacatatcaggtgatgaagtgatggaaaaagatgaagaggagaagatgggtgacgtacggtacttggacagcaggtcgtttgtacgtcggataacaaacttattgactttgccccctaactctctcagcttttcatcgctcttcgctcgatctttctccgtagcgtccgagtctcggcctcggaggatgtcaagctcaaaattctttcggaaatctaatcgggtacccaagtatccaggattggcaaaatctagcaaggcaaagtactcagacaagtcgttctatcatgagaaagtcgagaatattatcagtatcaagtatctggatataaatatctggactgaacaatacctacttggacgggagttccagtcaaaataacccgtctagtgcactgaatggcattgagtgccacgaatgtcagagactctaaataatcgcgcaagatagatgagttgatgtgtttgatgagaaagcaaaggagagttgatcattcacctgcgtttttcagcctatggccctcgtcggccaagagtaagccgacctcgcatccagccaactcgtccgttagagaacgtagagtctcgtaagaaacgatcatgacttcgaatttatcggtattgaggaaaggttagaacgtgtgtatgttcttgtaagatgactaagaagagtactaaccctgttgcgtgaccgatctccctttagcagagacccacctccgaacggccgggattaactcctgtcgcccaccctttccatctactaccaatgggttgatgactccttctcccagccatttaactaagaacggagagatgacatcaatacataaatctgggatcatcgatacttccaaaagatcaaggcttacctaactccttggcccagttcttgaccaaactactagggcacacgataattcccttctcaattgtggccttgcttggaataggggactgcttgagcaaagtgtggagaagggcaatgcattgtagtgttttacctaatgacgattcgatcaatcaagacatgatgggtcagcgcagctaccaagttgacttaacaccaagaaaataaaagtccttaccgagacccatctcatcggccatgatacatctgaagaaaggcatcggagattgaactgtctatcagtgagtgcccaaagaacaagtctggacaagattaagattactgacccaaaagcatcatgaacgagaagaccagtggtgcatctatataaaaactgagtgtcccgattatatggatatgtccgtcgatcagtatcgagacgttcatccgagtcacgaaaaaagaataaaaaaagacacaaacgaaccttgacaccctcgatctgatgtggtctgagaacttttgaaagtttcggatcgattacgacaggtactttcacgatctttttcctgtttctcgccgcgtccgccttgctttccaagccaagaatctccctgagactcttatgaggattcaatccgccgtccatctcttccgctatcttttgacgctcagcctcttgccgaatgagtacttcatccgcctctctctggatgcgttcctcgtttgtctcaatcagatccacggttggatcatagagtacgatggcatgatcggccatagggtcaaatagaggccgaggaagaagaaccggttgacgacggacgcccaaggcgatattcgagacaacatgagtaatcttttctcctgaaggtttgatgatagtcgggattgaaaacctgtagagcatattcaaaggatatcagggaaaaggtcttggaatgagctacctgtggcatggacgaacccttttctagcaacatccttccccgaagcgtcccaaatcgggaatttcttgttgatgttgatctctccaatcggatctccattctcgtccagctcgaccgaggcgttgatagcttgtttggtcaagttggtcaccttgggcttcttcttgtttgactcgtcatcgtcatcgtccgaagctcctttttccttatatgattttttggttcgcttgttgcacggaacacaccgagaatgaaagtaccaagtcttagaccatgcatagctatgaagatctataacaagagatatcgcacctttctcggagggagagcagacgggccacgcttgttgacaaatgaaggggtcttgaaagcaggcattccaactagggccccaaacccaccaccgagcgagtgggagtctccagatttccgtcgaagcataccggtatgatacttggacaggcgtttgacagataacggcgggagacactagaacaagaggagaaagtcaagaagagaaagtatatggatgggtaagcgtatgaaaaaagaagaggtatatgcgtcgaggctagagagttccgatctgtgggtgggttggagcggagtggagtggcggcacgacttcgatcgagagcgcgtctcggtgagggtcctaaatgagaacgcgtgaggaggcgtcaacacagcgaacgcgtcaagatagccacgtgaccttcgcttcaggctacgcttacgaaatatagccggtactgatggcgtcgtgtgtatagagagcgaatctcaaacccatttagtccctaccttctagatctccaagatcttacagcatggtatttcgttattctgttagagtgttcgcatcctactctacatctcctcagttgtttaagactactacaagatcaatgtcgtcccttgtgctttgttcccgacaggggaaagttaccctgctcaagctcaatcgaccaaaagaattgaacgcacttaattcggcactcattcaaagcttgaatgaagagctcgacaaagcagcggcagatcaagatgtcggttgtgtcgttatcactggggaaggaggaaaggcgtttgccggtaagctcattaaatctctccctttcgaactcttgggattaaaccaaagagcttactggtcttttgatctctccttaccttgcttggtataccatagccggagcagacatcaaagagatgcagtctaaaacttgttagcaaatgaaatagtacattccgtcggacagaaagcttgaaactcactgctcctttattctgatctagtgtctgaggtgtacaaccaagacttcttgaccacttggacaaagatcaattctttccggaagcccatcatcggagccatcaatggattcgctgtaagcctgcgcgatcagacttgttgttctgggctcaatgcaaacgtatgtccttaaacttactgaaaaaaaactcattccgatttggtagctaggaggaggttgtgagcttgcgatgatgtgagtcagattgcccaaagatcctctgatcgatcaacacatccctgctgatactctgtcgctgtacatcaggacggatatccttctggcatctcctcatgctaaggttcgtcaacccctttcaccttttctgcccgctatgagtatatatgtagtcctggatgtaccttcttttattgaccgttctttctttccttccttccttccttctcagttcggccaaccagagatcaatttaggaatcattcctggtgctggaggcacccaacggtcagacatctttttctattcgttctatctatttggcttgaccctatcaacttcgtttcactgatgagtcctatgtcttgctctttcttcaggttgatccgagcgatcggcaagtctcgcgcgatggagtatatcctcacaggcaacatgtttactgctgagcaagcatctgagtggggcctcatctcacgggttgtgcctgataaagaaggtgatgccaaaggacagggtgtagtagatgcggcgatcgagatggggaaactgatctcagagaagggaggactgagcgtgatcgctgcgaaggaggctgtcaacatcggtaagcttaatctaattctctcttctgtgtgttgattcagcactatttacttgacgagatgcgtgcgacactgactcttgatatgaaaatcggcgatgatccatgcattctacctaagcggaagaaacctcactcaacaacgggttggcttatgagcgaaagcttttccattcgttgttcgccacgcacgatcagaaagaaggtgagccttcaacatcttcttctcttcttctcttcttctgctaccctcactcaggtgatcgaatgatgaatacctgattcgttgacacttgccaattcggattgttttcttcccccaaacgtgttctgtcaatggtcatcggctcgaatttctcacgcatttatttcttcatccacgacgcattcgagcaggtatgacggcgttcgttgagaaaagagctcctaacttcaagaaccagtagcggatttacccgactttccttctctgtatatatctctatgttctgtttccttgtctttcttgtattctcgtccttccagacagagatctgattctctgtatgatcgaagggcttttcttccactgccaagccttttctgttttttgaggtcgtatctgagaagggatagattggctattcaaagtgcgttccttcgatatcaaccaaatgggcttgaatgttggatgccacaaagtcttcgctccacttctctgcatctggaacttcattttctattttgaaaagagaacacatggacagccccctatgttccttcacttttcagcctgatatcccttcaaagcttgctccctctcgtgttgaatcctatttctgttctccaaagcaagttccaaccctggccgtctgccttcttcggcaccatgtaaagcctcgacaaccatcctcattctcggtgtcaaatctccagcatctgaaccgatccagtcattcttcctagcgtttgctaagcgttgttgttcgacagcctcgaggtctttgggaaggacaaccgcgtcggctccaaagtccgcgtaattaggtgctgctggtgatactaaagaagacgcagaggaagaagacagagaggacgaggcgtctggggagagagacgaggtaggagaaggccgggagagctttccgggatgcctcatctcgacatgaaggtcgatcagggatgccatgagcggtcggttccggggttgtccatcgataggtgcaaactcggcatcaatcacagcgtctagattatctttggtgatatggtgttgggtagaatggtataggttcacgagagagcttagggatttctgttataagaaaaatcgttaggaaagaaagagtaagaaaagaaagtcaagtctacatgaagcaaccaacgatgggccatgcaagaagagaacaaaggaaaaaagaatcaagggacaaacagtagacaagactcctcccttgaacacaggctcttcgctcttgtagtcgatcaacacgtccggccgatccgctttggctttcttcgacttttttgttggtctggcagcattctgaccactgatgacggcctttcgagcgattcccatagaactcgtcgcttttgacctggtctgaagtcggacctgagaaggaatggaccgaactaggagtgaaggagcgaacatgatcttcttttctatggatatgaaagcgtcgaaagagaacaaggaaagccaacgaaacgtccttctggtgatcagaaccgaaggaggtaagagaagggaaagcggctgccctgaatacaaattcaaatatacttatacaaggtagctcgatgcctagggttgcttaggtaatctgatcggcccgccggtcatgagagatccctcttcatcctgttacctcgcctgatctttctctccacctgggaatcttctgtctttcttctcccttttgttctctccctgtcgtttgcttcatctgatagccaacttctaagtttgacaaccatcctcttgatctggaacaacaacaacaatgtctgacgagtaagtttccgagctgtggttgctcgcttgctatctgaaacatcaatggttctctggtcgttctcgtgtcgtccctgagctacttgtgcgatcactatcaaagcaatgacagctgacatgttctcttttgtcgcttgacaccctctttttttattatccttgttgtcgaacctgaaaacagtagctctgagcttgaggattttgagatggatgaggatgatgatatgctcgactacgacgatggttggtctcactcttctctctctcgcgtgggtgtgaatgttggcatagggaggcgttgggtcggtctttagagaagtagcgatagacgtctgtgttacagataggctatatgctatgtacaaagagcatgcaggcaaaactcctctttccttctaacctccgacctcattctccacttcaccacttgtgtagccgcacgacagagaccgcttactaacatctgggcgtgaatctttatacccactcgcgcagattcagcttctgaagttgatctctctgaagatgatggagcggggtttgctttcgaggacttggcagcttcgaaatcactggaaaagaaggtcagtcttcgcatccgttcgacatacctttcttgttccgttgttctatccaactgatccttggatatccacccctgcgacctttattgtgacgtaattcacctagccatacgatatcctatacacatcaaagaatccagaaaacttgagggaggcaatggacaacgaagtcaataaattcaaaagtctcttcgatatggacgtgagtcctcttcagtgctagtgaacttgcgcttttaaacaaccttttctatatatatagaggcatgtattaacttcggttctgtgggcctcttgtgtgtattcatatcaacagattcaaactgctactcttttactgcgaagcttcaattggaaccgcgagagagtaagctcttggatagatcatcacgacaaagatttattgttttctgctgatcgctcgtctttctcttcggttttagctcgtagaacgatatatggatgcgccatatgaatgtctggcgaaagctggactggacattaatcctccttccccagtcacaaacacagtgcccttaccttcttccgcttcacatcatgaatccccatcgaaaaaacctcgtcgaacgaacgtccgatccgtctctggctctcgtacaggaagtcttgacatgccctcctcctcttcttctcgccccacacatcttgcccctcagcgaccctctactcctgctcataccgatttcgagtgtcctatctgttgtatagatttctcagcagaagaggttgctgctgagacgttggcgcttggatgtggccatcgagcttgcaaggagtgctggaaacagtacctggagggtaagatcaaggatgagggggagagtgtgagaattcaatgtttggaaagtgggtgtgggagagttgtctcggtgaatgttgtggagagccttgttagcgcacctctgaaagagaggttagtctcaaagcatgctctcgagaataaaattctcgaacatctgaaatctgcgaggctaacagcatcttatcgatctatcattctactgtcggcaggtatgatgcccttttaaatcgaacctatgtggacgacaaccctacgcttcgatggtgccctgctccagaatgtgagtttagcttgatcacaatgcaacagaagcgagattacttctcttctcataatattctcatcaataataacaaatactctggcctcttcatctttaggtgaatatgcagtagagtgtaaacaggcgccaccgaaagtgctggataagattatccctacggtcaagtgcaagtgtgggcaggtgttttgtttcgggtgagctttgcttccttattgatttgacccaatcctttctccagaggaacctcaaaccaactgaattggttcaactgttcagttgcggatactcggccgatcatcgcccagtcatctgtcgagttgctaccaagtggctcaagaaatgcgcagatgatagtgagacatcgaattggattagcgccaacacgaaagagtgcatcaagtgccactcgacaattgaaaagaacggtggatgcaagtcagtatcagtccttacttttgccttcagatcaatggaaatatcaatcctgatttcttgcgcctttcaatcgatagtcacatgacttgcaaaaaatgcaaacgtctgtctgatctcttctgatgtcgtggtctgattcttcatgggctacgtttgctcatatcttctcatctttcttccgacatctagacgagttctgttgggtctgcatgggtgactggacggagcacggaacgagctggtacaactgcaaccgatatgaggaaaaatcgggtcaggacgcgagggatagccaatcgaagagcagggctagcttggagagatatctacatgtaagagcttttaatactcaccctcatgatttgtttcctacttgtacatctgtagtcttctgtgctgagactgcttcttgtccttttctctccaaatgatagtactacaaccgatgggccaaccatgagctttctgccaaactcgaccgagagctttatctcaaaaccgagaaaaagatggaacagatgcaattgacgtccgatttgacgtggatcgaagttcaatttgccaagaaagcagttgacacgcttgtggtcgcccgaatgacgctcaaatggacctatgccatggcctaccagtgagctcccttgtagtttctacacaggctctcgaaaacttggccactgatgcttactatctcatggtttcaatcattcgatagtctggcaaagaataatcagacagcgttgtttgaggacaaccaaagtgatcttgaacaagcggttgaggcgttatcggagctgttggaaaaaccaatcgagccggaattaattcctgcgcttcgacaacacgtgaccgataaaactgtttgtcctttttttttgcgatcttttcctagtcaagtgcctcaaactgactccctttgaacaatgtgtactcctttgtcctgatgggttggataggtctacgttcagaagagacacgctatcatgttggacgacagcttgcaaggttaccttgaaaacaggttggttcctatattatttgcgtcgcctttatttgattctcctgtttgtgaccgtgttcgtactgttatttctgacaacatttttgatggatgtgatcgggtctgtcattctaggtggacattcgacgtctagtctctttcctgcctgtttgcccctgtagtattcacctccgccccttttgttcatcatcactctaccattcttttgctgtttgctagctagccttatttatctcgctcttcctgtctgtgctctatcatttatctcacaattgacagttgtcttctctttgcatgatctcacgacgctttcaccctcttgaccgcttttgtgtttgtgaccgacctaccgccttcttcagtccattaagagggcttgatctttttttctttctttcttttttttttgccctcgggcgattgatcaattgatcgtttttgctgttccgtatcgcttgatttctctagactagcttacactacattcagattcttcgccatgagacaatgttgatttgaagagagcgagcatgaaggggaagggacgtgatcggcgaagagcgatgcgatagttttatgatacgcatgtctatgacgatttacatttcgaacatcttcgaccgataccacatctttcctctgaccttcactcatcacgatccttttcacctcagacacctcgactcccttgcttgtttgatcctattatattcctctggaggatctattccacctccaactaagatgagctcttcttcagcggatctccagaaccaacaggatccaatctgcgagattggttagccacctccctttctttcctcttctcttcttgcaatctgatcgagccaagactcggaccgaggcttcatctcacaagacaggcatatatcaggaacaactgacatctcgctcatcttactcgattgttttcaatcgggattgaatctcgggctggtgatttttttccagatcggctccctaatcccagccctgtatcgaacaggaaatggaaacgtcgagccaggctctcactcgtgttcttgtctatagccgggaactggtatggttatatgcttcttcttgatcagatacaatccttgatgttcgactcacgtctcgctgggttgggttggtcttattgttatcgttcgactttctggacagtatcacggcgggtggtgtagcatcgttccctttgttcgcgccctatatcgcgtctcacttcaacttggaagaagcagctacaaacgtcgctatccttggcggcttggtcggcgcctactttggagctgctcctgttggatcctttgtggatcgttatggcccccgaaagtatgcgtctatccccgctgtcttccatctgtcgtatgtatgtgagcggatctaacgttgccatgggctttatctttcggttgttgctagaacctctctactagcctccctctttaatatcactggatatttgtctcttcacattttgcttctccttcctcccgaccatcctttccttcaagcgtctccgttctcgatacatgtcttactttcattctcattcctctttatcgggctcggcacggtatcttcctacttttgctccttgacgacatcgtcattgaccttcccttctcatccatcactcgcccttggctgtccactagctctgttcggactgagcgcttgggcgatcagcgaaagtgccggttgggcaatctttggagatccgaccgacgagctagatgtcggaaagttctcgcttgcccttttgttaacggtaggagggtggaatgcatttgctgcctttggtatgaaggttatgcctcatcgacatgaagttgagttcatcagggacgaagtcgcgagggctgatcctgattgggtaagggaaggcggcgcggatggaacaatcgacgaggagacaccgctcctcatgggaagtagaagtttagggagagcaaggggaacggtggatttgacattcaaacatcttatgtcggaacggtcattttggatcttgggaatgagcatgtttctcatgattggacctgtcagtatctttcttgagatcgtcgactttgtctgattctcacctgttgaagtgtaaactgatgttcatcctacgtttgttggacctcctcagatggagatgatcattgcgtcggttggatcgattgtgacgtcgcttcttcctcggtctaccaatcaaacgactcttcaggcagtttctctccatctgatcgagtctgcttctcccttgagcttcctaacatcttctaaagcaacaaatccgttgaggattcgacagaaacatgtcaagatcatctcgatctgcaacacgatctcgaggatttctgtaggagccatagcggactatctgtccgcttcaactacggaccctgtcgtattacccaaacttgctgatcgaccgtcagtggagaaccgaagagctgactcatcctgggcaactcctatcgccaacgtctctcccccatccactccagcgtcagcgtcttttgaggagagtgatgtaacgaaggttgacgtggaagagtcaagaaggtggaagcataggttccacatgagtaagatcaccatggtcctgttgacgcttactatgttagctgtagtctatgcattcgcaggactagacgcagggctgggagctagagggctggacgcgctttgggtgcttacaggggtggttggttggagttatggctgtctctttgtaagtgcagtattctctcctcgtgaatgcatatcctcttggtccacttcttcctaacgccgagaggttctgttggttgttgggttctatcagaccctccttccttcgatcactacacagattttcggattaaagacgttcggaaggaattatggtcttctctcttactttgtcgccacgtcctctctcggtttcacgtacctttatggtctcctcgccaatctcgcctacacttcttattcagcggagagagtctgtcgaggagcaggctgcttccgacacatcagtatgttttatgcagttgtcttatggtgttgtgttctctcgtgtttagatactgaccatcaacctctggcttcgattcccgaatctttgcactccttcgttccatctgatgtggtttgtggctggctgaaacataatcagtgtggatctcgtttggaagtacggtggcagcggctgtcttgtttgtagaactcgggcgaagatggaagaatcgcgtgtagtaagatgatcacgttcaacgtgtattctcctttatctagtttgttgcatgaagcccgctttccttacgtgtttgctagaagtaaagaacgatgtatgctcttcaaacttggtctcagcgtgtcgtgaacatgatctactggcgatatcttatcttggatcggagcgaaatgattaaatgaagcacgtgttcaacaaaaggatgtttcaaccgttgttgaatcagaccaccctccatctctttacaacccattctctctcctcccttgtctctgaaaagccccagcggcatggactctataataacacctctacattcacctccatcttctggaacgctcgttatggagcgacggtcgtcagggactgggttaaacagcatgtttcctaccgagttgagtaaaagtcgcgtcggtgaggtcaccaacaacggggttcgtctctcaatttgtccttatatgctctgtcgttcagaattgatcaccactgatccgggatctcgttctgactgcgttgatttgcgtgttgtgtttgtgaacatcttgatgttcagctggacgatctggacgatttcgaatgggaagaagctgaggacgaacccccttctcacacactcactgttcctacgcttaactcttataaccactcaacacactcttttacggacccatccctattttccaacatatcctctttgagtccgtcgagagaagatggaacaaattcacccaactcagatacatatatcgtcccttccacatcttctccaattcctcttctttccccactcaacaagtctacaaagcggaatcggactgatacatcatcgacggtgtcagctcaagcttcgcctacttcagctttgatagctaggatcaagcagtctgccaccgcacttcaaaaggatcttttccggataaatacctcaccacttcgtatgcaccatcaccgacatcaaaatagaactaatgagaatcacagcagtagtagaaggaggaagagtagtgaatcagaaagtggttcatcgaatgggacggattcggaatcgggagggatgctaaagagagcaaagatgacaggtctggcagacctagaagactcggatgacgatttgaattcagatctgctcgttctttcgacgaaacgaactacaaagtcggccttgacacctcgaaaggcggggaactttaaaccaacaaggatatctgcttcttcaagattttcaaaggattcgatgacgtgtcctacacctgatcgtcaacatcatcaacagcccgggttctcacctccaaagcttcgaacgagaccagcgatgtctgccaaggcggctcaaaatgttctatcttccgttcaaacccgtgcgttaccaggatctggaatcaaaaggccgaacagaggagacccgtcgatggaaaaacttcggttacaaatgaggacttcgaaagcccggatacaaacgcttgaaaagacggaggagatcaaagagaggattggactcagtgaaaaatttctcatcagtgatgatgaagacatgtttgcagacgaggaggaggcatcgggaaaagggtcacctcaaggagcgcgcaagggaaggggggcaacctctattgatctggagccagaagctcacccgaaaggaaagatcaatttatctttggaccgggataaacgaagaggtggatatcacgccgaaatttctgatcaagatttatcatctgattctgagtccgaggagagtctcttgttaggaaccccctcgccaatgctctttcctgaagacgtgccgggctatacgtttgcgcccgaccctccattgacggagcctctattgctcatggagtcactatttggagcagagaacgggactgcgctcagagatatcgtgacgaaggacaagagggcaagaaaaatggaaaggagggagaggaggagtctagagaggcagggcggtggggaaggttttagaggtgtctggtgcagaaatagatcaggagagaacgagttggcagtcgaacaggctgaggtatgtactctgatttagatcttgaaagctttcgacagtatgtatgattgacatatcaatgttgtggcatgtgcgtgtctggaacccagtgggcttttgtccgtcttcagggatcgtcaaggcatccactattcatttcgctttctagagctgttgaacagaaaggttggtgatttaccaagctaaaattctgtgaacctctctcatctgcatctcgtccttctgttacagacgtgcatgctttcgaaaacattgtctctatgggtgggctttcgccagctgtactagaaaccatggatgtaaaaggtagacggggacttcttatatccctcatcgagaatggtacgtctttgcttcattcttgcgaattgatgggattaaagatgagttgattctgattgcgatctcatctcgttcgatgtcagtatagcctgtctggcccccagtatcagtttgtcaacactatgtcttgaacatattggtcttatgttcaattcttcgttccacacgccagcatctcctatcattgaatccgcgcgcctcatcatggtactctcatcggccttccagcgactgggattcagggttgatcttctccgagcggcagcgagaaatgattcagggtcgaccccttcaaagcctatacctccccagcaaggaacgattttgccaatgagtcacacgagaagagagagagcggtaggttgcctgatcgaaatagtagagaatgctgtcaggtgagttttcaaagcattcgcatttcttcttttgctcagttctaaatcagctcccgtgaaatcggtaatctcgtacagacatagcatcttttcgaattctgctctttctcgagtgatatgcatcattgcactggtcacgttggataggatgacgcctatcaatctcctgtacacctgccaacgagccttaggtgtcgccattgaatcaatatcatcgcctaatgaagtgtgtacctcatctttcctttcaaagttctttttattccatatctcgattaatatacttcaacaatgactgttcctaacaaaatatctgcacacttcaggaactcaaattgtgccacaagttggtacaaatctcgagtccgtacaaaatggggttcaaaatggggctgctcgaagcgttccccatagcagggccagcttgcaggaggctcacctcggcattggctgtactcttgttagacggtacaatgaatttggtcagttttacccagtcggttggttctttgtggctgctcagaactaaatcttgtctttaccatgctccgttttcgtctggtgatatcgctcgtcattcgcttaagtcgacgtacggttctccaccatccatggacgttctacttgatactctttcccaatcgaaagaccgaactcctctctcgaagttttacatccatcctcataccgactacgaacaactcgttgcttcaatcagaatcctttcattcattctactcgacctacaagagatatatttagcggagcaagctcgagccaaggaccgtcggcttaaggctaactattcagataatttcctctccagaagggagacgtttgagctgcttgaggcagaggggtcgttacaaatcttggggaacgcgctgaatgcgtgtgatgctaaaatcggtaagttgtaattaattcgttattgcttatgcagcctttacccagttttcttttgattcaacgctttccttattcgttctttctagtggatgctagggcgactcacctcgaccgatcggcagcgaaagcattccttctcaacctgcgcatgtcaatcaactaccgcaacattgtttatcaatctaaattccagaaacagagggctgcaggggaagctggcaggaacggtcaaactatcctgaactttggttcgtcgaagatgactgccgcatagggttcgcgctcctccatctattcctttctcttgtacttctcgtgatgtgatgagtactgcctctctatgatatccttgtaaagttgttctgtatgtatttttgtgtatgtataagcatacgtcgttggctggctgggaagattgaagcttcgacaagcatgtcacgatgagtaaataaattcgggcaaatccgtcacttaatatctcatcatcatcatcatcgaccatcaactaccgaccatcgatcatcgtcaactttcaagacatgtctgctgctagttcttccgagctctctattcctctgttgatagccaactacctcaatgcttctggtgtcagtctacacatgttgttgccgtcatgacatctttcgtttctaatcaagagattatgcctccttttctgcttctcaatctcgatagtattcttcaacgctcgcctcgttcttgaaagaaaatccaatccccaacttcgactctctaccggctcctcctatcgaccttcgtgacttagtcgaagagtacaatcatgctcggctgaatgagatctttcaaaagatgaaagttgagaaggatgaagaggaggaagctgtattaaatagaactgttaaggatcaagaactacccagcaaggtcagtcgctaataagtagtggctcggtctctcctccccgtcacatttgcttcgatctttcttgcgggagaaactaaaaacaaactccttttccttcttatttggagcttttgtaggtagagaagacatttggaagtatacatgctggaaatatattgagtgtcagcgttcatgatgttcctcgaaggtgagctgatttgcttgttcaactgattagaacctacgtatgaagctttcatttggctcacttggattcgaggactttccttcttcttcttcttcttcttcttcttcctcaggtctttcaacacaactacagctaggtgagctcctcataattgatgaagcttcagcctagattcaacttatacctgttctcttcctgtttcggttatcaagatatgaaactatacttcacccttcgctcctcacgacgtcatctgacaagaccctcaagatcacttctttatcgactggagaagttaaagatatattagaacctcacaaagctgcaattttgagtgttgctgttcatccacaatgtggtagacttattgggacggggagtatggatggaaggtgtgtgtttctgtcttcgtctccgtagccttcttcacacctattgagtatactaatcttactgtcatggtatttgatgaccaaacagtgcaaagatcattgacctaatcactcaaaagactcttcaaacgtttcagaatcagaaatttgtacgtatacatcagtgttgcctgatcgcctcgtcttctcgtctctaatctcttgaatttttatacaatattcttgactatacacatttttggacgacattcaaatacacaaaaaggtcgtgagggtcttgttctcaccaacaggaaattactttgcgaccgcctcctatgaccataccctcaaagtctatcgattgcgaacccctcttcccctcgcgcccaaccttggtccgagtaatgatgaggatgaggaagaagatatctcggagcttgaatcggactatgaactggtcaagatcttagaggtcaagagtaaccctgagggtctagtctttggacctccgactgaagaaaccggggaagctgcgtggttggcgttcactacccggtatgatgtctttcttgtagttggcacctcttcaccgctgacaactgatcatctttctttcgttttcttcctggttcgggcagaggagaccatcatatcaagtatctgatgttgccgtcttcagttgaagaccaagccgaatgggagattcgaaagttcaatttgaatcctaatggagacgactttgtctcattctctattctgttcgtccatctttcattctcgttgccattctgatagatattatatctttcaactatctatggttgtctgtaccgttgttcttactaaatttgttgtcaaaccggcctttagatcacttgcgcttcatccgtccaacaagtttattgccatgacgacaggagatcatactggacctcaatccagtcgagtattcttatatccattcttgagcaaggagcgaaaagcgacattatggactggatcaggtgagcgatcatctcttcctcttcttccttctcattcacgaactttttgttttctaaagaaacattgttcaccaccacaccgttctgatatctttcttgacggataaagaatgtgatcaattcaccgtaacgttcgttctcctatctcttgcctattcttttctcagctacgcctttcaagctcacgcgtctgcctcacgtccctctcctgacttctgattcccaattgacgtctcgtgctctgtttctttattctttcaagtcgaatgtcttgggccccatcaggtaactttgtggctgtcacctccacggacgggtatgtccgtctgctcgacctccagggtcgggtccgacgggctatccgggcacacggtgaacatccgactacaggtgtcaagaacgatgttgtcagagacgttttcattttctcgaaaggaacgaccgaatcagaaggaaacggagaggggtggaaggtattgagttgtggtttcgattggacggttcggctgttggcttgatgtgacagttaaatcttctctccatcatttgtagacggaggaaggaggatatccgagggaaagggtatcataagatctttaagcaacgataagaaagagcacaaaaaggagagattccagtattcatccggttttggagaaagaagaggtacaaagacacaagaaaaaaaggaaaaaaaagatgaaataaaatgaaatgaagaccacacccgaccggcagagtaagaaatcgtttgacgataacgaaaaaaagaagaaacagagtgtgtgtatacacgtttctgaattaagacttcaaaaaaaaaacttcaaattgtcctagtgagtaacgaagaaaagaaaagaacggagaatagaaccgaaatgagaatgaaggcaatggtaaacaaggagcaatgaacagcaaacgaaacacctgaaatcgatgcgccgacacctaaaattaaaagaacattttttttgctatggagctccaataggatatcaagttaggagataaacatatgcttctagagtttgttccaatgaagatgctacgggggggctccgtccgtttgatctcgatcagatagattttttttacttgtctttattgggaatcgtggtagatcttttggttttggttttgattcgggttcgaatatccaaaattcagaagtagtttcctgtctgtttggaatctggtttttgagctgatccacgtcggaaaaaaggagaaagaaaagtcaagcaagtcacgttctttcgtttagtcaagagaaatcaaaaagacagtgttatccgtcatagagtaaagagagggaaggccatcaaggagaaaacgtacaagggatgctaggatatcttcgatgtattcccgacttcatctcgatcgtctcccctgccggactactcatcatcatacttgatacgcctatcgatagactctcttccgttctccttcttcgtcttctaccaccgacaccattatcgccatcgccatcgccaacgtcatcgccgtcaccgtcgtattcatccgcatcctcggactcgtccgcgtcctggaagtatgagttcctcgggtcgtaatcatttatctggacgccatgtgattgagcgagtcgacctagcttgtcatccatctgattacgttcgatatagcccggctcggacctcaaggatccatcgacagaatacatactctgtgaatacgccgtgtctgatctgggccgtcctgatctactgctactaccatcgtcacgggtaggaactcctaacgaggacatgtcaccgatctcggcggataacccgatgggtgcgttctcgacctgtcttgtcgtaccctgaggagtgaaggtcacgaccgaagccatcgcgggactctgacctgctatcatccccaggacctcttcattctgtctatctcgtccgcctatcgacgttctcgtcgtcccggctgcgtccgtctgtttggttagtgaaggtgtgtccggttggtcgtaaggtgggtagggagaggacggatcgtcttgttttggccatagaggggcggtcggcgtgctggggcccgaatctacggataaatcggatggattgatgagtctcgagaacggccttggttttgatcttgtgtggggttggaattgggcttgtctgtccggaccgggggacgacgaaaacggctgtcgggccgataggccgaaggcccgactgttcatcgtcgtggctggactagagaaaaagttgggataggaagtcgagccgccgcttgtcattcccagggtcggatcttgttgccggcggcgtcgttgaatcgctttgaagatgataagaaggataagacctaaaacccgagtcaggtgcggcaatcgcccgaaagtgaggggaaatcaaataaaccagagtgaaatcgtcagggatacaagatagatgaatcaatcaacctctggttggataacaacagagaccaagcagataactcacagataccagccacgatcgcgatggcaacggcgacccagattcctgtgagcgaagactctgaatagttggaagtcgtactagacgatgtattagaagaagtcgcgacagaagacggcgatgacgaagaagttgtggtcccggatatcgctctatacatcgttgttgtattttgtttcaaaacgagtcccaaaacatagcaatgagtcaagcaacccaagacagcgaatatcagtggtactgtcacaattcaatatgaatgcttcctgtccgtcttgtagggtatcacagtatagaaaaaaaatggaatgactgacgcttgagcagcggatccatactcccaataatcaaccatcatcaaaccaccctcctgcatgttcgtcatccgaaacgtatggtctcctgatcctaagcctgctttacgccacccgatctgtttgaacgtcgtgcttgaatccatgtcggccggtgccatgtttttcgacagattgacagttgggtaagcaaccccatcgatcgagggaacaaactgagcaagggacggttgaatagctgtcatcacattgagatagtttcctatgtttccatccgcgtttttcggcgagagaataccagagaataaaaagaaacaacggacgagttcagttataaaacgaggccgatatcagacacacgcatgcacacgacgcgacttacctgtgaaagtgaattctagataagacccgttggaactcgtccaactgatggactgattataaaatgatgagatcattgaccggattgtttcggcctgtgtctcattaacgatgttgccatctgatacccgacaaccatccagagtgttaagtcaattggcaagaatcccatgcacccagaagagttgcttctgagtatacacatcctggcgatctggatgatacaaagaatgacgtgaggcgaaggagaagaaaactcacccagattcgacgcgctcatcaggttccaatcggatgaaagctcaatcttatttgtttcccaggccgagtcgtccaacaccgagggttctgtcgttgtcgacgttctatccgttttgatcccccaaaaggacaccccagacagaacgaaagaatggaaatgaagccgagaagagaaagggaaaccgagcaagatcgatcgctggtgtcagtgtttccgttcctacacaaccacacatgaccacttgtcttctccctcgctggcgcaatgtactattcaacacacatacaagttatcccacccaatggtgatgcccaacaaccgagctacatcggcctgactagacgctcgcgagtcgtcaatgctcctgaagacgcccgagaaagaatgcgtaccgaacggaaggtcggtgatgtttacagagctcgtggccgacatgtccgagatagatttcacctcggtcgagttgatggatagggtcaattggtatgccgaggtcggttcagtgagaaaggatagcgaggtacctgtacggatgatcacccgaacgatcaacccgatgcaactcagtacagtcttgcccggtcaagttcagactgtcggcgaaacgcgcgacgattcacagagagaatgaaggaaagagagaatgagcaagggacaaaccttcgaactctaactcgacccctatgtcagtcccaaccgcccaagcctccgcccatcgctgactgacaccatcccaagctgcagaattattccaaccctgtttccatccaacagtccagtcacaacttatacaaggcgtgtacgtgattaatggagagagcggcgagagagtggttgctagacttgttgtcgatgatgatgaagaggaagaagttgaagtcattgagagaggggagatatccgaatttgttcactctagaacgcgaatggaagagaaaatcgagtgatagcagagcagttaggcgggacacaggtgggtcaaaaagatcaaggctaaaaacgaaaaacacggcaatcgctagatatcgttgaatgaggagaaggacgaacgaatgaatgaacagagaaaacaaaggaataagaacaagaacaagaaggagaaagagaaggagacgagaaaagaatgctggtagtctgcggttcagtcttcagttgatgatctcaagcaagaaggaacgtaaatcgagcctcggctctgtcgctgagatataacaagattcaactaagatagaacggaacctcgggtaaacacacacacacacacacacacacacacacacacacacacacacgctcgatgtggagttcgatcaacctagaacgggagaaagatctgtatcaaacagaggacgatggcgagagtgagaacagatccgaaagtgatggaggctatatgcctacggaaaggtagatatcgaaacaaataaacattgtcaacgaaacgtggccgaagataaatagtcacgtgcacttgataactctttgagcatgtacattctctttcttcctccctttagacttggacgttctgatttctcattaaactgtactgttgtggtaatggttcttacggtcaagagaacttgtttagattaaagctaaagcatcatgagatgatcacaacagggtggatacagtagtcggggaaaagaaaatggttgtgggagggtgagggaagcagatgtaggcaaaactaaaagctcatatagaagaaacacagaagaacccggaaagggaggaaaaccgaaaggggatcaagagaaaacttcttaggcgttgtaagtggaagcagagacgtttccacctcggccggtccagttgatgtggatagcctgtcccttctggagtcgctcgttctccttaccaggaaggacctggaaggtgtgggctccgaagaaatctcgctgtccctggaggaggttggcaggcacggtctccgatcggtatccatcgaagaaggaaagagcggtagagtggcaggggatggggataccccagatggtagcctgggcgacgattcgtcgccatccgggctgggccttggcgatggcgttcttgaagaagtcgtcgaacaagaggttctccaagtcggcgttcttctggaaagccttggtaatgtcaccaaggaagacggacttgatgatgcatcctcctcgccacatggcggcgataccagcgttgttcaagtcccacttgtactccttagcggcctctcgcataagcatgtaaccctgggcgtacgagatgatcttggaagcgtaaagagcctgttcaagatcgtcactgtggtttccagtaggaaaaatcgagggaggagcaagcgatcagatcaagaacctggctcgaaacaaataagggaatcagtacatgagtatacgtacatgaactgctgcttgtcaccggagaaggtctccttttcgggtccagagaggaccttggaagctcggactcgctctcccttgatggcagaaaggcatcgggcgaagacggcctctccgataagggtgacgggggttcccatgtcaagagcgttaatggcagtccactttccagttcccttctgaccagcctggtcgaggatcttggtgaccatgggctcgccatcgtcatcgttgtacttgaggacctgggcggtgactaagaggggatcgagaggtgagctcggatatggaaatcagcaaaaaagaaaaaacgacaagactaactgtcgatcaagaaagagtcaagaacacccttgttccacgtaaggaagacatcggcaatctcggactcggtcatgtcgagtcctcgcttgaggatatcgtaagcctcggcgatgagctgcatatctccgtactcgataccgttgtggaccatcttgacgtagtgaccggcaccggttccaccaacccagtcacagcagggctcgtcaccgttgggtccctggatctgggcagcggtcttctctgtattgtccggaacgaaacgataccaagcggattcaaggttaggcgtttgtgtacatgtaacagtctaatgaaaccagctgggagacgaacggaagatctccttgatagcgggccaggcggcctcggatcctccgggcatgagggaaggtccgtgtcgggcaccctcctcacctccggacacaccggatccaacaaagagcaagcccttggcttcaagctcctgggttcgtcggatggaatcagggtagtgggagtttccaccatcaatgatgatatcacccttctcaaggtggggaacgaggaggtcgatgaaagagtcgacggcctttccggcctggacgaggaggatgatctttcggggtcggacaagcttagagacgaggtcctcgatcgagtgggccccgataacgttggtgcctaccaaggaagggagcaaaagaaaagtcaatggttgatgcggtacatgtaggtagttgaagaaaacaaccttacccttagcctcgttctcgaggaagtgatcaaccttagagacggttcggttgaaggcgcaaaccttgaaacccctgaggtggacggtcagatcagagggagaaaggtcagaacggaatggttcaatagagattgatcgatataaagaactgacttgtcgttctataaggaaaaatgggtttggagtgaataccaaatacagttagttttctcaagttctcggaagattgttgaacgtgatgttgtgcttttcttctcgctgctacccatgtctcaagggatttttttcttcctgttatcttgctccggggttacgtaccatgttgagaatcaagttctggccctgtggagatgaatcgaacgagagaatgtcagaagcgataaccaggcaagagcgatgggttgcaaagggaacgaaccatgacggcaagtccaataagtccgatatcagcgctttgagcgggaagagttaatcatcggccgagggaacgatgaagagatgaagagtgagagaaaatggaagaaagaaagagaaagaaggaaagagatgagatgagatacaagatatgagtgattcaaaccaagagaatgaagaaagcgaacacaaagaagagcatacctcattttgtttagttgatggatgtatagaaggatggaaaaagaaaggagatgatggttgttggcaggagaaacagagatgggtgattcgcaagagaaaagagaaaaaaaagaaaagaagagaaggaaaaaaagaaaaagaaaaaaaagggaccgtacggcaggcgaaccgagcactctcgtcgcccgccctgagcgttactcatcacacaagccgcacggaccggactgacgttgaccgcgcgtgcttggggtagaaaagtgcggggaacaattgggggcaaaggaactaatgccggctttagccaggcgtatggacacggttatctgaccaccagcctaggggatttgttcctgacaagtccaagttaggtacccatatttggccatgtcttggggttgattcaggcttggctgccctatgagtgacgatcgaggcccataattgcccataattcctcgaaggatcccaagtcgttttatctttccccaagctaccccgaacacaaacatccccggtgtcatcatccaatcgaacgctctccgcgatttggttggacagatattccatcattgcttcctttttcgcgtctgttttccccgcatggacggataggtttatcgattacgtaacggatgattgatctccccagtgttcatcacactcggcgtctctcctgccttggtattctcgttctgcccttgatatcacgctgatgtcgttgccataatctttacgcctggtatctttactccatgacactgttcgttccttgtttcactactaaattaatctccctatcagtattcttgccttcgatatttgtttgtcttctataacttttcctgtagtgtttctgtagtattcttgtagtttccgatcgatcgatcgatctctgttagtacaatcagtacacctactgagcttactgagcttactgtgcttgctacactgctactctattcttttctattgccctttccctctctgctaggcgaccgcttcgtcgatctgatactttctactactttcctctaccgccctgtacttacactctttactgctctctatacttctgactctatatgcatgccatgcttgataactgctcgctcatcagatggttcccgccttcagattgatcatgtacacatccctctgtcttactgggatctctctgttcggatagtaacaacttgaacgacaaacgttgagcaaccagaccatacacagacacgcacgtatatgctcacatagatgctcacatagatactcacacagatactcacacccttgcccacacaagtgctatcgatcaagtaacacgttccaccagggaagagcacataagcagtgttgttacagcggtccgcagttcttgacgaacgtatgtgtgcgcgccctggtgttctatcccaagaaggccaaacagcccaaccgttcgaagcttcgcccatctactctcgtccctctggtctccactctctcatctctatcacacacccaatcggttcgttgcgttttctctttatccttctcttcttctcagtctgctgtgaatcattcagtgaggtaggcggtcagagcccatcatcgacacgcttggtgatctctatttccggcttccccagccctcgcggatttaatcgcttgggaccgagccccgttcagctgacagccccctctcttcccctttttctctctgtctccctcgtcggctctctcatcaacaccaacttgaaaaaaacctcaaagacaacagtctctagagtagctctgtacttcaattcagagtcatatcgcctgtcttggggatagctgtttggaacatcgtcagtaacttttcatctgttcaagaagaaaagagaaaaaaaagtcctcaaggttcctctggccatcttgcgatctcaccgtacctctcttccatctctctcttattttctctcctcagaattccctctaacttctagacacaacacactctctctctatcttgacaacatacatctcctcccataagccgactgtcagagagcatctcgcactaaaagaaaacgtacggctttccgtccatcgatccttcgctgttctcctccaatacggaaatgtccttcagtctcgctcggagcgcctcgctgggaggacctcgaaagcagatggacgacgtcgaacgtgcacttggcacagaggactaccatcaatctctccggtcggacggacagaacgtttcctcctggtcaagtagaggatcacattcacccggagagtatcatccaagccatcggatcgtcggcgagctctacccttcctccatgacggctgacggtatggccagaaccggtctgtttcccgtcaacagtgtcaatcaagctcaccagcac

SEQ ID NO: 1319 - DNA, 4659 bp, Xanthophyllomyces dendrorhous
ccccaaggatcggttgataaggttgcgcctcaccgacagtcctaccatcaggttcctcctccgccgtcaccttccgcggcagctcgcaccaaccatggtccgcctccgcctcagctagaggccagcccaggaaacttcaactcgtcctcgtcttcttcgtcctttcatccgcatccctcatcttctcaccccaaccagtcaggccaaccgcctccctcagcctcgtccaatccgtatgccgcccaggtatcatcatcctcggcctcgtcctcttcgatggcttacaacgtaggagcttccggtggattctcgcctccttcttcagccggtcattcccaagcacacagatcgtcctgggcggactactctccgttgccttcgcctaatattgagatgcgcgcttcacctcatcagccatcttcatcatctggtgcctactactccaagcctcctcctccggcctcgccctcatccggctcatctcccaacccaaatagggcaagctatcatcaaatgaacccgtaccttcctcaaccgccggcctccttgtcttctcagttataccctcaccatcagcaacaacaacagcagcagcaacccccactaccgccgtcgaatcaaagaactcatagcagttcgaatatggaatatcagcttccagttccgcctctgccgccaccccctcctccaacgcaaagccaagctcagacgcaacatcattctctacagcagcaacagcaatatattgcgccaccccctactcagccccgagcgccttcgactgaacaactgtcgacaggtacctacggtcatcaacactcccagtcgatgtcatcacatcagatgcattatcaacctcatcagtatcagccaccgccgccggcaaacagtatagccaatcaatcatactcgagtcattcgagggaaactatgatgggctcctccggcttggtcgattcgggaatggattcagggccgggtagggaggacgtccatcaccatcagcaacagcagcatcaacaacgaggtgggcagacacaggaagattctcaagggttcagaaccgttcatagcccaagtgatgtgaaacctcgggcattcaactcgagagagatggtccgttgttcttattccttgtcgctgttctttctgtttctttcgcgcgtttcatcttcaaatcgtccttctgttttgctgactcttccttctattctggcttgtttcaaccatcttcgatgctcattcctttcagcgtccgttgcaagccctgacatctgacctggctcagacgtatacgcggtgtaacccaaactttcggtatgagaccgctgcgaacccgaggagggtgctgacaaagccgtctaagggagtcctcaatgacgggcacgataacgaagataacgattatattttatacgtcaacgattatttgggtacagaagaaggatacaagtcagttatctgttctcattctctcttctttcccttctctgttctgcgcccattgggttcttgctggcgatatgatcggaacatgtaggtctgattctccgctttctgacttcgcacgtctcgctacagattcttgattttggacgtgctcggtcaagggacgttcggccaggtcgtcaaatgtcaggacatgaggacgaacgagatcgtagccgtcaaagtagtgaaaaacaagccggcctactttaaccaaagtatgatggaggttgcgattctacaggaggtccgttcttggctttttagtgtatgatgtccgacaggaatcaagtgctgaccgtatagtgatcttctcccgcttgtcttctctttcatcagctaaacaacaaggccgatccggacgacaagcattgtattcttcggatgcacgcctcgttcatccatcacaagcacttgtgtctggtgtttgagtgtctgtcgtccaatctttacgagctcatcaagcaaaactcattcagaggactgtctatccagctggtcaaggtgtttatcacccagctgttagactcgctcgagacgttgcaaaaggcaagactgatacactgcgatctaaaaccagaaaatattctgttaaagaggttcgttcgaactgattgcctatagctctagaaccttatggtttggatactgacatctcgctttgctgcctcgtatgtgtttgcgcgcgtttcatgttgctgctcgcttgtgtgtgcatccactccacatcactgctcacctcagtctttcatcacctcagatcaaagtgatcgattttggatcggcctgtcatgaatactcgaccgtgtacacttatattcaatctaggttttatcgatcccccgaggtcctcctcgggctgccctactctacagcgatcgatatgtggtcattaggttgtatagcggtcgaactcttcatgggtctcccgttatttccgggaacaagcgagtacaaccagttgtccaggattatcgacatgctagggtaagaccaagccttccttcttttgtacaatgcgactgatgaatcatccttgaactctgggtatctgataccctactccccacgttttgcccaatacttcttgacccactcagaatgccaccgaaccatctactcgagaacgggaaacaagtccacgagttcttcaacgcaaccccaaacccggacgcctacactggcggccgtgtcttccgtttcaaatcgatggagcaatactcgaaggagcataatgtacaggaaacagtgagcaaacagtacttcaaggcttcgaccttgccagagattattaggacatacagcttttcaaaaaagggggccaaacagtcggatatggatcgaggttagtccttctttgtcttttatcgcttcataagtcttcttaaggggaagacatgctcatcatcatccaacgccgactcttgttctggttcactgtactttatctgtacgtcatgatcgacagagatggcaatgcgagcttcgttcacggatttctgcacagggctcctcaacctagatccgatcaaacgatggtcccctcaacaggctagacaacatccgttcatcaccggtgaaaagtttatagctcctttcaatgtgagtgtttgtttgctcgtcttctatctctttgcgaggtggcactctcactctgggagtgattcagacagggaagaaggataaaagagaaagagaagtatctcatcaacttttttttaaaaaattcttcagccatcacgacactcctcaccagcgtcggtcaaggccgtgccttctgcccattctggatctccgaccgattccaaacgaccttacggtggccttgtcgcgaaatcttcggcccgcccccctcgagcctaccaggatgctgccgcttataaccagcagctcaaccaacatcagacgtataccgctcaacagcaagccgcccaggcggccgcgaacgtataccgacacccgttcgcacctccttctaccgcttctacaagtagttcttcgacaggtggtcaaccggtggaggatcaagcaggatcataccaacatcaacagagacttttacaagcgcagcaagctcaggtcgtacaagctcaggttcaggccgctcaagcccaagcccaagcccaagcccaggcacaggcacaggcacaggcgcaagcacaagctcagcaccaccatcctcaacagacgctccgagcgagcacgtcgacttcaaacttaacagcttcaccttactctgttcggaactcgaccggatcgacaacgaccattcttcctcctccggcagccgccttacatgcttctagcttgggcgggggtggcgttggtggcggcgcaagcggcccaggcggttattataccggtggaggtcgtgctcggtcaaacacgatcaaccaaatgtcgattgtgccggcacagatcgctcggatggctagtttaggggtcgaaggacctggttctcagataggaaggggcgcgttgacaccagtgatgaacagggaggaagccatgagagaatgggagaggagaaactcacaggcagccgcgtcgtcgacgacggcaggcgggggaagttctggaaagagaggttccattggcggtggtcatacatggccgcagctagatttcttggaagaacgagcggaaagcttgggaaactggaacacgacttctcgatacagcggaactgggctggactcccatcaatcacatcaccaccgtcatcagcagcagcagcaacaacaccaccagcatcaacagcaatcatatcaccatcagtacggttctcagccttcactctcgatcgtcgttgatgaggaaaatcgtcggaatccgggttcaatatcatccagacgggactcttcaggaatgaccgcgctcgaatccggtaccagttcgggctatcatgactcgacaccttccccaggctcgtcgatcaccagtccgccaatggcctacgctggttcgaacagatatagcgcttattcctctggtccgaatccacaggtttcgtcttcggcttctcttcctgttgcaggttacgaatttgatcatcggttggacgggatgggtagtctgattcaaccccttcaacccaggctggcaggtggacctggttcgggtggcgttggtgttcgatcgagcgctggtagtggcggaggtggtgctggg

SEQ ID NO: 1320 - DNA, 9156 bp, Xanthophyllomyces dendrorhous
agagagagagagagagagaggagacgatgaaagaaaaagaaactcagatcgttctacttttttgtccttcccttctggaaattcctttgccctcgtccctatccttccctacttttctctctcccttctgcccctttctcagtcttctttccaccctgcccctcaatttcgttgccagagatctcttctcatctattcttcatcttttcccttccttctttcctttctttcatccgttcctgacatgtctatcttacatctcatttttgtcctaccctatcctgcgtgcctgcccactttgactgacaaagtcaaatgaagatgacaaaactctgacatagaggaaccaggaccggaaaaccgaggtatggaaacggggaacagggcatcgtatatgccatgagaatcaagaggaaaaaaaagagaaactaggaataggggaacgagagaacatgatatcggctttccgaagagtttcaactcggggtttccgggtgcgcaacgctttcttgcctcttgcccccttccccccccctccttttcctctctatcttctgcagcaaggagagaggaaagggtttttgtgtggtcgaatggttaagagagacagaagcacgtacatcattatcaacatagatcatttgttatatcaggtcaggtcaaggaagacaggggaatatataacgaaagagtaaacagagaatgagatgaggaacgggagagataggtattgaatacaactgatcgatcgtgcacgatggcacacgagacggattggataggatgaagagtagagtggagacaagtcaggtcgagaaaccgaagaagggaaaggaagaaaaaaaaaggggggggggaaagaaatacaaacgcaaacaagcaaacaacagagaagaaaaagaagatacagatacaaacgatacgatctctcccctctcccttgttgttttcttcttatctatctaaggaatatatattctggaataaccctcgactttagatctacagcaaggacaaccactcaacgccccattttgtcctctagtagccaacgtttctctacagtcgttacataatgccagacatctgcaaggccagaggatgaccgtcctttcgtccgctctacagatcacacatactctgccttctggttcatcccctgcgtccggtcttgagaaagaattcgaaggagatggtgtcacggagggttcccttcgttgacgaacaaactctttcaaggatagagcttcctgtccggcatacgggctggaggaggagaagggcggaggagacaaagttgaagaaaagaatgaagatgacgtggtcgaagatgacgaagctgggtcgagtacactcaacgaagggaggagcgcattgaaccgtcttctcgtcagaggagaggacgaagacgatgtcatgtgtgcaaggaggacggtgggtagcgtcggggatggggggagcattgatagtgtcgacagaggttcgtcagagtacgcagcaggtgatgacgacgaagaatgggaagatgaggttgacgatgatgatgaggaggaggaggaataggatcgagctcggagttgaggccggatttgatgagaggatctagaagggtgatacgtcgggtcgtcctcctcagatggatcgttgacttgcgtataacctccggcaaggaacttcttgtacacattttcatcctcctcaccctctccaacgtcgtcttgtggatgctcctctcttcgatcttcttcctcttgctcaaagtctggcccaatcaaggcatccccttcagcgagaatggggaccaacctaagtccccacctgcctcctctcgagagccgtctagtacctccgaatctcagtgctctcgcacccaggtcccaagcacctcttccaccgggtacccacccaagcgtccaccagccgagtgcacccagccattctttgagcgcggtgtagaaccgactgaactctgtccagtaaggagaatcatctccaccttcccatgagccgaggatcccaggtcggaaggacgctttgacctgagtgatctctcttccaaacccagtcgaaacgtgtcgatccaatggggacgaagccacgtagaggtctgtatgtggaccggtgggatctctagcaaaagcagagttggataaatcgacgtaactctctgccgggagctcgatcagaccgacctcgttccctagaccgcccatcttggtgtgggtgagacaacaggcgctcagtttgaggagcactgtaggaaagtcctcgctcgtcgaaggccaatcactgatgggtagtagcgtatcgagattgatagtaccctgggtgaggagttgagtgaagaacgagaggataagcgtgagggcgaggatcgtaaagtgaaagagcgtaaacatgtttgaggccaaagtaaaagcaggcagcgccgatggagacgtgagaagaagataggtgaagtgagtctactcggaggttatgttttgtatgtataacaatcgaatcgccatgatttgtcattgtccattcggtcataaagacttgaggtcagcttgatggacgtcagagcgaaggcgaaggcagaggagaaagaaagattctcttacgacttggatcgatccgcatactgcagtcggcagcaacctatttctggcccacctttgggagcattcagccccgtgcagccaggcgaactgtacagtcgtcagccagataacgaatagaatgttccaatctggcctgctcggctctggctgtttgcggtgcataaacgggttagagtacagatgaagaaggaagccgaacgaaaacaggttggcctgggagcctacatgggcgaagccttctagggagcgagcgaatgtgccggtgattagtccgaccgcgatactggtaaagacccgtttaaaaagcttttcggtgggcatcgtcagtgtctggttggcaagcgggagggaggccatccatggggatgcggtcggagaggtcggatgaggtagcaggcataatgtgagaagatagaccgagtagagaacatacagcagcgacggtattctgagaagcctatgtgtttgagtcgaggtcaacgttctccgaaggatgatcttccatcgaggctgttcaattgacggatcgtcttgttccgcttgtctgcggtccatcggaccggccggtcggacgacggcccaaattcgattggttatcagagctacagcaaggaggacgaggccatagtaagatatgaagaacccccaaggggtcatcccggacgaatcatcggttggaccagactgaaatacccgagtagatgatgttcggtacgcttcggccacacgtttcacacgggaagggatgaacgatgtgattcgagtgagcagacctggcatcgtgagagatcaaggagagtatcggaggtggtatcaaactcgataggaatatcgaacgagtatgtgacaacgtatgcttgccagtatatctgtatgagaacagaaaggacgaagaacgggttgatgatggagggaagataggaagaagaaggacgagcggaatttgttctcgcttacccccaacgggtaattccgactgggcgagattgtgtctgttctctttctctttccttcctttcgctttcttcgctctcttcggactctcagtgtactatgaacgacggagtgtcttgtgctctcattgtgctgcatttctctccctacaacccatggcgtttgactgatggacaccagccaagccttcttccggctggcttgctctgttggcatctgtgagttacgtatatgaaggcgtcctgactagataaacatcacgtgactagggctgtgtacttatgtagcccggatgttgtctaaggttatatacataaatcaaaaatacccactcaacatccgtctattctagatttctttgcctctcccaacttgcaaaggatacggacacggatatcgtcttctcccttgtctttgctctcctttgcttcccaagatggcttctcgctcgctacttgcttctcttatgcagggtcccgcttcagctggatcttctcgagttgctctgaccgccgcgtccagagtcgggccttccttggttcgacacgcccactcgcatcatttgattcttgatcccaaacgggatgtcgttgtcgatggaaagatcggtgagagcttatctttttattttgctttgcttctcttgctctgttgtgtcaggaggctgtgtaccggtcatcttagaggtctatcaaaccactccaagtgtatgtcgagagatcgaagaacagtcttagtacataatctcttctggacgtgttctcgactcttgcgtcgaacagatagcttgtcctttgcgtcctccattctttggttcttgcttctacttttctcccttgatgatgatttgtttctgtgtatcctcccttcttttgtaactggtgtagcttacgtcttgaattggtccttttttccctcttttctcgcctatctttaccttctcttccagtcaacccaatctcgccgatagcgttcagccctaaaccaccctatgcacccctcttccctatctatacccctctttcctcgatcactccaacagtacctcccgcccaggcggccgagactatcgtcccgcttcctcgggatatctttggtgttcctctgaggaaggacattcttcatcagtgtgtggtccaccatatgactttgttgagacaaggaacggctagttcgcttcgaagggacgaggtcagaggaagtggaaagaagcttcgaccacagaaaggaacaggaaaggctcgagtcggtgattcaggaagtggtatccgtacgtgtctttctttcttagaccggataaatcttattatctcctgtttctctaatcatcgaaatctcctgcttttttcttctcttttcctctctcctttatttcacgctcgacaggtgtcggaggaggatccattcatggaccgaagcctcgagattggtctacagatttgactcgaaagacccgtcagcttgggttcaagattgctctgtcccagcgaatgcgagagggacgactccgagtggtcgattcgcagggacttgttatggacgattggcttgtcccggctaagcgggttgtcaagcctggcaagcctgccaatatggtccaagcagcctccaagtcggctcatatcggtaatcgactcaaaggtgtgtcttcaacagtctactctgtatacattttcttcctgttctgatcatcccatctcttttattcccgttctttcctcactttctccattccttagagctcggctacaaaaaagcattgttccttcactcaccgttcgcggtcccaccctcgaatttacttccccgatcaatcagcaatatctcgtccatgaggctcgcctcgatttcctcaatctctactctcgacatcctcaagactcatgagcttgtgtttgacatgcccgctctcgagtggctgattgccaaagtccgtcagtttgacgaggccgcttactccgctcagttcgacggaaacgccatggtcatgagacgaagagcgcttggattaagtgacttcccggaggacggtcagcccgatgaaagtaaggagatgctgagacagctggaagctcagctaggcggtgagggtgagggtgatatgacagagttcgggttgggtcaaccggctggagaaaggctgagtctggaggaggagcaagagatgaagaggagagcggactggctcttaagagtgctgccggacggtcaatcaccctcgactgcttaaagaaggggtgggatggagagaagaggaaatggaaacagaagaaaaaaatgaatgaaagattgtaactcttcactcagaattcctcttttcttctcgtcatcattgtcttcttcttcttcctgaatctctgttgggtcgatccgcgaaagacgtggctcgttcatagtgagaaatcgtgaatgtgaaaaatctaaacgatatgagtgaatttcctaggagggacaaattggactctaatcagtctccttgtaatcacgatccatcatctttgttcgaacaataccaggatggattgagccacatggtcaagtctttttcttctccaatattgcttcctcttctctttgttctctctcccttttttcttcgatttcggttgcacacgactcaaggaaaaagttaaaccaagacggcccatgcacatatgataaactccctctctcccttctttctcctctctctcctcccctcgtcccgtctgcactttctttttttgatctatacctcaaagaaggaaagattagatgttgaaaggtttcgggatatgcattccactccagattccacgagcagaggtcgatcccgggccaggttggatctgagcatgacgaagggagaagattctgtttcctgactgtcgaagcaagtttcgaacctgttttggtttcaaggggggttttatatataaagttatgatttcgtccgatcgtccaatgcaagaaagagaataagggaacggttcgaaagagagcatgctttaagatgaatagagtgtacgtacacgtaactcgacagtgtccggtcgaagctgcttcaagcaaacggacttttcccttccagtagctgcagcacacaacacccaaaataagagagagttgccaaacaggaacatcaagcaatatcgcagacagacaaaccatgacggtcagctcagtcccgatcatgtagctaagagacaagaaagaaaaacggccaaaaagtagaaaagagtaggagggaaaagcgggaacgcactgtatatagctcgaacgacaggagcttttcctcctcgggccgaacgaacgatgaattctgtctgagggttggctctagccagtcgggtgatagacgttcgaaggtattccctaaaggaaagaagagggagaagagagaaagcgtcaggacatggtaccctgtggatggaccacacgacaggcggatggcagagaaagagcagagaacgataaagccgaactgatccagacagaagaacttctttctcttcttgaattcctgttgaagctgatagctaaggaaaaaccaaggtctcacctcataccctcggcagtgacatcggactgatggtactcaaactccatccgtcggcagggctgggtaaagtgcaaatatccgggtaccgtgtaggatctcaccgaagaaggaggcacatagaacggcggaggaatcttgaccggttttatgaacgaaatcggactgggtctcattgcggaaagagtgaagaaagagagctagaaggaggcaaagaccttagccggatgggaggatgagaacgaaaacgagtagcggacgatatggaaagatcgtataggaaataaagttgtttgttagggttacacccgctcaagttagcttttctccaagtcaatctagatacgatgaggacgcgaccgatacatcaccacatctgctctatcctcatttctctcgactttgcttgttcagaacttcttacacgcgatgagtgtgttgttcgagacctcactaggagatttggtgatcgatttggagactgaagcatgtcctgaactgtgtctgaactttctgaaggtgagctcttaccatcccatctatgcaagatgcttttcttatggattaaggactgatctttccttcgatacgtatacgggtttttattctggttacccacagctatgtaaagtatactactacaatctgaacgcgttcttcaatggtacgttccttcttttggctagttcagtttctagagagtgctttggttgtttgcttacctacaagttgatgcatgcgcgttggctttgttctcttttgttctgttctgttcatatagtttccaaggatttcatcgcccaaaccggagacccaactgccacaggtgaaggcggagaatctatattctcttacctatcctctccgtctgatgattctgtgcctcgatacttcaaaccgccaatcgtccaaagtctgaaacatacgagccgagggacggtctccatggctttcgccggaggtcctaaaggtggatgtggtagtcagtttttcttgacgttaaacgaaggacctatcgattatttggatgggaaacatcccgtgtttggttcggtggtcgagggtctggatgtgttggagaagatgaatgagacctttgtcgatggaacgggaaggccgatgaaggatatcaggattcgacacgtcgtggtattaggtgattccttccacctatctttgcttcttcttcccattcactttcgagtcacggaacacagaaaacatgtactcgagacaatgtactgacatcagatgtctttcgtatacttttatagatgatccgttcgacgatccgcctggtctactcgttccgcctggttcgccgacgatgattccagacacaaactttaacttgcgaatagccgacaacgaagaccctctggaaacgttacctgccgaacaggcggaggaagaacgtcgtctggctgccgcttctgcttctgctctaacattggagatgattggggatctcccgttcgcgaacgtccgaccaccggagaacgtgttgtttgtgtgcaaacttaacccggtcacgagggacgaagacctagagttgatcttttcgagattcggaacgatcatgagctgtgaggtcatcagagataaaaagacgggagacagcttgcagtacgcgtttgtcgagtttgacaagagggaagaagccgagcaggttcgtcgtagtcttctttttctcgtctgatttgaaacccgttggcgcgctgtgaacagtcgtcgttgtcgtgttttctttctgacgtccaggaaactggttatgttcaatgaaacttttaggcatacttcaagatgcaaaacgttctcgtggatgatcgtcgaatctgggtagatttgtgagtgtcttgtctcatgttacttttgagttgctggccaattcaacctgtgccttgctggtatctttgtacgtctctatggcttgatacatcaactgacgatgaacgttccatagctctcaatctgtatccaagatgggaggttcatggagttcggctgcgctcaaggtgacatccgcctccaatggtcgaggaggaggaggaggaggag

SEQ ID NO: 1321 - DNA, 19208 bp, Xanthophyllomyces dendrorhous
ggaggaggaggtggcggtggtggtggtaatcgaggtgggtttggtggtgcaggagaaagaggaggaggagggggacatcgagatcagcgattcgatcaacgaggaggccaatcctctatgggtatggtgtttgacgatcgtgatctctctcgaagtgggtcatccaaaggcgcacgaggaggagatgatcgtcctgaccggccaagagacgacagacggtccgaagggagacggagagaagatgaaccgagaagggattcgggacgagactaccgaggcagcgcaggaggaggaggagggggaggaaggagaaggagtcggtcgaggagtcctgctggatacggaagagattccggtagaagtagcggcaggtatagggacagagacgatcgagatcgagaccgagaccgggaccgatatgctagtcacaatggcagacgagatcgatgagagattacatgcctgaacgagaatcgagaccgagagcttagcgttgcttttagagtgtatgtacacccaagactacacacctgtgaacgagtgtaacaagaataaaagcggtgtccacaacaaaattgctgtgcaaatgtaacataccaccagccaagccagccaatatcacgacttccccacacgtgactcgaccaagccagcgaattttcaccttccccctcaccgcaccgagacaatcctcaacgccgggcggaccgcttttctctttaccatcctcacaccatcggcttatctccccctaggaaattatttacatttttaatattctcattttattttattttatttttctcttcttccttcttcaccatgctcaatcgctccatccttagacggactatcagcacctcatctttcagagacaacactagatctttttcttctatccgacaaggtcttttctcgcagaggccttcttctattcgtccttctaattccagcagagctttgtgttcctctttcgtttcccctgtccagtccttccagcgaatgtccatctcttcttctgccgtcaacgcttcggcccagccgatggagggtgtcgagacccaggcccagatcatcgacggaaacgctttggccaagttcgtcttcttctttcttcttggtcggggttctttccttccttcctttttttttcttcgtcttttttcctggtcgcaaagagagatcatctaggaaaggctatctttgctgggttgacaaggaaaaaaaaaatcctgagaaaactagagagactttctcgctcgccttattctcgtgcctgcatatactcatccatccgatccaagattgcttgccttctctctttcctaaaacggagaaaaaggagtttcaattggccatctttccgttttttcttcgttcctccatttatcggaatcttgcgccgttctgatgggaatctttttgggatttccaatctccaaaaaacaaacaaacaaaaaacacacacatttcagtgaggctgactgttatttcccctttcttgatccttccattccttttcactctaccataggagcgtccgagccaagatcgcctccgagatcgcttcgattcagtcaacgttccctcggttccagccaaacttggtgatcctccagcgaggatcccgaccagactcatccacctatgtcaagatgaagctcaaagccgccgaggaggccggcatgcgatgctcgctcgttcacttgtctgagacctcgaccgtcgaggagatcatcgccaaggttagagagtgcaacaacgacgacaccgtcgacggtattctcgtccagcttcctcttggcgagggcgtctcgtccgatggagagcgaagagttgttgagagcgtcagcgaagccaaggatgttgatgggtatgcatacttttcatttcctcccttctcttctcttcttctccttccagtccatcaaactcatgtgttgacatcggtcctcctccagtttccaccctaccaacatcggtcacctctcttctcggcttaccaccccgcttttcactccatgcactcccgccggtgtgattgacttgcttgactctgccaacgtcgacatttccggaaagaacgccgtcgtcctcggccgatccgacattgtcggttcacccgtttgcgccttgctccgagagcgagacgctaccgttacccagtgccactccaggaccaagaaccttcctgagattgtcaagggagctgacatcgtcgtcgccgccatcggcaaggcccagtacgtcaagggagagtggctcaagccgggctgtgtcgtcatcgatgttggaaccaactttattcctgatgctaccaaaaagtctggccagcgacttgtcggtgatgttgacttcgagggagcatccaaggttgcttcgttcatcactcccgttcctggaggagtcggaccgatgaccgtcgccaagttgatgcagaacacgttcgactcggctaagaggcgatttgagcagggccgagagcgaaagatcaccgtcaaccctcttcatctgctcgagaaggttcccagcgatattgagatcgccgtcgcccagactcccaagccagtggttgacattgcttccgaaatcggactctcgcccgacgaggtcgagagctacggtcgatacaaggctaaggtcgagctttccgttttggaccgactgagccaccgaaaggatggaaagtacatcgtcgtcgccggtatcaccccgactcccctcggagagggcaagtcgaccaccacgatcggtcttgcccaggccctcggtgctcatctcggcaagtctgcctttgcctgtgtccgacagccttctcagggaccgactttcggtatcaagggaggagccgccggtggaggatactcccaggttatccccatgaccgagttcaacttgcacttgaccggtgacatccacgccgtctcggccgccaacaatttgcttgccgccgctatggacgccaggatcttccacgaaaacacccagaccgacaaggctttgttcaaccgactttgccccgccaagaagggtgtccgaacctttgctcctatcatgcttaagcgactcgagaagcttggcatcaacaagaccaaccctgatgatctgacccccgaggagcagagcaagtttgctcgactcgacatcgaccccgagaccatcacctggaaccgagtgttggacgtcaacgatcgatacctccgaaaggttaccatcggtcaggccgccaccgagaagggattctccagggagaccgggtttgatatctctgttgccagtgaggttatggccgtcctcgcactcagcaaggacctcaaggacatgcaggagcggttcgtccggccttccctcttctttctttgcttgctaactttctgaagacgcggtccgaaactaacttccctgactgatttcgttgttttcacttctcatacagattgggcaagatggtcgtcgccactagcaggtccgggcagcccgttaccgctgacgatatcggatgctccggtgcgctcgccgtactcatgaaggatgccatcaagcctacgctcatgcagacgctcgagggaacccccgttttcgtccacgccggacctttcgccaacattgctcacggaaactcgtccatcattgccgacaagatcgcactcaagttggccggtaccgaggagggcgacgatgccagcagaaccggttactgtatcaccgaggctggtttcggagctgacattggaatggagaagttctgcaacagtacgtcgggttctttctcccctctcgggtgccttttgaggacctcccagtgcattctgacttatcgatatgtctgttctttatcgatcaacagtcaagtgcagagtgtctggcttgaaggctaacgccgtcgtcttggtcgccaccatccgagcactcaagatgcacggaggaggacccgaggtgacgcctggtaagcccttggccgagacctacttgaacgaggatcttgagaccctcgagaagggatgctgcaacttgggcaagcacattgagaacgctaagaagtacggaatcaaggtcatcgttgccatcaaccagtttacgtaagtggtcttctcctcgcttgtctccttgattcttcattcctctctgcctcctgactgaccgttcggttggtgatcaatatagtaacgatactcctgccgagatggagctcgtccgaaagtacgcgctcgccgctggagccgaccaggccgtcggatccaaccactgggccaagggaggagaaggtgcgatcgaccttgccaacgccgtcatcaaggcatgcgaggaggacaacgactttgagttcctctacgataccaacaactcgattgagaacaagattgagacgatcgccaaggagatgtacggtgctgatggaatcactatcgagcctgaagctcagaagcagatcgatacctacactgcccagggtttgttcctctcgcttcctcaatggagaagaaaagagagactataagctcgtgaatacgtactgaccactttgacttcttaggttacgccaacttgccgatctgcatggccaagactcctctttcgttctcccacgagccggaacgaaagggagtgcctactggattcaagattcctatccgaaacgtcaagcttgctgccggagccggtttcctctacccgctctgcggagccgtccagactttgcctggattgagcactcgacctggtttcttcgacatcggtttggacgacaacggtgacatccagggtctcttttaaagagaacaaacaaacaaaaaagatcatgaatctctctaattgaaaggttctcttctaattttcttctcatttgttctttatcctcttttctttttgggagtttttcatatagatctcttttctccattcgtaagttcccgtctatctactttcacgagaaacttttcctcaccattcaataatgtcgactaactttgatctctttcgtttaaccctcatgcaggtttattctttgttttcaaattgccttgagcatcaactgcatctattagcatcattctcacacttcaacaagtgatctttccttctcgaaatagaaaaggccgttgtatttctaatacagaaaagataacgctctcctttccgttttcttcgttccttcgtttcccatcttttccatcttttggtttgtttactaattatcaaaatgaactagaattcgcgcgtttgtgggtgtgagtgtgagtgagtgtgtgtgtgtgtgtgtgtgtgtgtgtgtgtaagaaaaagaaagagacagagacagagacaaggcaaaacaaaatggagaaccagaggactaaatcattcattcatcgattgagccttgttctctctctctcctctttgatcggaggaatcaagacatctctgtgtccttctctccagccttcgcttttctcgcgatctctctatccttcctatcctttgctttaagtttagccgagtcgatagcagagttgagactgcctgctttggccaatcctaagagtagttgatgggcgaatgagatatgattatgctttcgaagcttttatcgtcgacaattcaccaagccaaagagaagtagaaagacctcgtcatttagagcataatcgaagagaaagaagaatagagggacaagagggatagaggggacaacttacagaattctcaaaagcccatttcttcctttttgcttcctcctcctcaatcttttccttgacctgaccgatcagatactcttgaccagccttctctgcctctttcaactcttttctcagctcgctcatcgggtccttgacgaccgccaagagtgagaattcgagggcgcccatcgggtaactggagatccgttcttggataacctctcgtgctctccctatccattcctgatcatccttcgtcggtacaggaccgtgtgaccgagggtaagattggagaccgtcgagttcatagagtgtgcctagagaaggaaggtaggagatgaaatgataggcatccgaaggctcggagggaatcgaggaatcgatagaaaacggatcggatctggcaaacgagttgtgaacttctcgaatcttttcagacaaaacggatgcaagcaacacggttcagtatgaagcggatggtttcttggaggggacaggcggtgaactgactttgtccgagttagagatcgtgtatcctagcgtctgtatttcgacgaattcgtcacttttcataccatcaacatcatcgcgcgaacatagagggtaagatttctgacatgaagcagaaaagtacgtacgctggggtccattccgtgtccgaattctttcaagttatctagttcagctcccagctcgattttgtcgtcctctgtctgcccacctagaggaaggttgaacacagagtttaaaatggcgagcgtagcgcacgcgctaatatgttttaaagacagaagaaatcagccctatctgttttaggaatacgagcaagaaaaatagagaataacaatggacaaaataatgaaacgaaacgaaacttgtcgatgacttgatgagcaaagaaacctgggaaatccggatcctagatgcgagcgtcaacgtcggggttaaacatatatagtaattcctgtcagttcactccccaagtagccattggatagataaaactagaaatgtgacctcacgggagaccctgctttcttggactcttcgatacctccaacatactaaggtccgtaaaaacaaaacaaaacagaaagaaccccgatcttgacattagtaacgatgtttagccagccagccaggccttcaccatccttccttctgttcttcagcctcaaggatggcccaaacaagaagatcgaacgaaccttgaagagaaatatgaacgccttgatctctccgacgttcttgagtgcctcatcctccaacgaccagagatcctcgacttggagacctttgactcctagctcagtcaagagtgcggtgaagaccgatggatcgctttgggcaaatgggtgattagcttgagaattcttcttgaaacgattacgaggcagaaaaaatctccacatacgactctgtgagagaccagcctgaattatcctctgccatgatgtatatatgtgtatctgtgcgtgtgcgagttgagagaacagagagagagaggaagttgggaattgagagtaaggcaaggaatacaaagcaagatgagaagacggtgagcgcaattgcgtaagcgtaatcaatccagtgccacaagcgaatggttacggattacgtcagcctcattccaggcttggtcaacccttcccgctataaatttcagtttttttcctctattctctttcttctcttctctccttcaagacagtcattgggtcaggtatgtctctctctttgctatcaatccttcgtccatcctctcccacccaaaaagaaaacgccataacatgttgagcctaaacaccaaaatgatttaatgagcatgatgcccgtgacacggcaaaatgatctgaaacttttacgtctgaatcttcccctactccctatacattccttttggccttggtgccctttattctcatctagtttcgatgaagaatagcttgactgactctgtcttgcgtctttttaacgctttgtttatctggtgggttaattatagtcatgaactttcatgtatgaaaaatagaatggtctcgatgttgcaacacaaatttaagcttacgcttcttgacaaaactgatgaggcgagaattgagagaaaaaaaaagaacagaagcttgtactgctgctctcgggaaagacgttcttgaagagaaagaccgccgtctcagatagttagttattggtagtcgaggacttgttacataaatcaagggattgttttcttcatcttttgtactaccagaatcgataacaatcatgaacagatacatatagcaagtaatgaaaaaagactgtatcgaccatggtgctatcctgacttaaccaagtgcattcctcacgctagcttctgcttggttatttatgcgagagtttaccacagaaccaatccaagtcgaacaattcaacatgcgctgtatccagactctatttccgttcttagttctactctctctctctctcacacccaaccaagcttcacctctgatccttacgaacgatctccaccatctcaacactcccatattctatctcgaaccctgcgctgtactctaccgacgctcacactggattcaagaccggttaagcaacgaaagatgacgtaagcgagacgatcacgaggttggccggcaacacccgccggacgacgtgctcgtgttatatcatgtctcgacctttactcaccctcatcgttcaacccaccaccatcaccatcaccgctactgccactactgccacaatatcgatcagtatgcttaggaaaccttctttgatctcgcctagacagctactggcattgtctggaaagacagtaatccctctggatgcaagttggcacagtaagagaatcttctttcccatctcatccttctcatatttcgatttgctgaacccctcttttgaccttgcagtgcctaattcttccgagaacgccctccagaacttccagaaagagcgaattcctaaagccagattcttcgatcttgacaaagtcgcctccgcccatgatctcggactcgcgcatatgttacccactccagagatctttgccaaagcagctggtgggtgatcgatcattcgccgttcgacaaagaacatttctatcaagagtttacaggtcgatcgtttcctgctgactctttgtttacctcatcgtacttttcctataatcacctcaacagccaatctcgcgatcgagccttcatctcacatcgtcctttacgacactcacggcttgttctcatcttccagagcagccttcacattctgggcgatgggacacccaggagaggttagcatcctcaacggagggctccctggatggaaggcagaaggtttcgaagtggagaccggatctccagcctccttcgctgtgagtgtgtttatgttcggactgtcctgtaataaaggggcctgcttactgaacatgtatcaacacgcttctttccctcaagcctaccgagtatcctacccccaagagtgtcgttgatagagcaacggtcccctacgcagatgtcctttccaactgttcttccaaagtttcgcttgtcctagatgctcgacctagacctcgatggaccggtcaggctccagagccgaggcaaggattggagagcggacacatgccgggtagcgtaagcttgccgtttggagaattggtcaaggatggaaagttgatcgacgatgatgcggtcagtctttctagcataacgtctccattttcctcttctacagtcgagagagattcattctgataccaaatcacgacctctcggacgaaaactgaaacagatcaccaagaagctcagggaaattttgggagaccgagccgatgccgtcctggagggcaagcaagacgtaatcgcttcttgcgggtccggaatgacagccgttagtccttctctttctttccctccatacgcccaactcacatgctttttgttctctcacacacacaaccgacagacgacgatctggttagcgcttcaaaggctcaacatctcttcctcgatctacgacgagagttggacaggctgggcctctcgacctgagactagtccgatcgtcaaaggcgaggagtaagaacacgttctcaggacctcatctacctctttgtatcatttctttgagggttgcatccgagtctttagatgatggtttttattttaagtgttgtgaaatagggccgtggtatggacgaaaagggtgggagggatcattcctttggtattgcacttttaaatagacacttgatcgattgagtcgtattcgaccatgttttccttgataaacctctgctcgttatatccttatcttctttctactttcctctctttgcctccaaagggtgatatcatgaaaaccaaggaaaagacgcgccagatagggaaaaaagtgaagcatgaaagcgcaaattcttatcgttatgatacacattctcgttattcatgtcgaaacaagccatgatcactctgctttctcaccctcgccgacctcgctctcaccagcctcgcccttgcccttgcccttaccagagctctctctccgcaagccaccgacaatggaagggggtttgtccccggatcgaggcgcgtcgatgttctcctcagatcttttatcatgctcactcaatcttcttcccaagaccaagctttcaggtgttcccatcaaagactgagactcaagtctgacctgggattggggttcggtcagtggttgatttgacgatcgaggacggtctgatggggttcctttctcatccgatgagcgatcgtccgtcgacccggtctttccgttcgacgcgtaggtcgacgttgaggttggcgcatagtccagattgggatcagagtcgaggagagaaagatgactggtatgtctagaaggtgtagccgaacctacgtagtccgatgcagatccaacggagctcgaggtacgatgcgcgagagtcaacccatggatcgtgctcgaatttgaacgcaatgaatccaccggggagaacactaaccttcctggtgccgtcgttgtggttatcgttgtcgttgtcgttgtagttgtgtcgtgattgtcgtcgttgttatcatcaatatggctcttgctaaagtgagggtcccggtctaggatggcttggcgggcgtttcggatggttaaagtggccgctttgggagagatggccgatgagcttcctgatggaccataaggacgggcggacgagatcgaagaagacgacgaggttgatatcggacgtggcgatggatggttcggacgggatcgaagaggggaaggaccggcaccagcgccgtccttgcctttgctacctatccaacctcttctcttcccaccttcctcatcccctggagatcccctcatgcctaaaccggttacacccgcctgtttaacaggtgtcgacaacgttgtatacgtcgtagcagcatgcggacctccaacgggcaccacaccaccatcaccttcgccaccagcggcggcaggacgtgaacctccgggaagggtttgagatctggaggcttggccgaccgcccggaggaggctctcgaggctttctcggagtccatgggtgtcttccgaatgtgaagtcgcaagcgtaggctctgtcaccgtttcaggaccagccacgatcgccgggtcggcttgggtcatcagctgattaaatccaaacgccaataagggaaagaaagaaggtgatagacaacagacttctttcttagcattcaccctatttcaagacaggtaagagaaagaacaagttgaagaaaacaggtgcgcacgatgagagccatctgttgcaacctcgccaactgttgttgactaggaggcgacctcttcccgacttcctccggggaaaccaacagtttcaccgtcctcggaaccaacgctcgcaagatggagagtaagaacaacgtgaggagatgttgtctgacgtcgatcggttgtgtttcaaacgctttcgatgatgaaccagctgacaaaccggaagacatcgtcggcagggaagaggcgtagaacgagccgttcctcaacacaggtgccgacgagctagacgttgaggaagaaagaccagggccgaaatttgcagaaccggcaccaacggcgccgatagcagagccgatggaggcagcaggtcgtttcgatcgagaattatcactcgtgatacgaggacgggcagagtgggcgttgaggatgagtggatcagaacctagtgggaggaagattccttcgaccaagggaacgatagcactccagaaaaacacccagagctcaaccaatcgacctatcaacttgccgtccgtcacgccttgtagtttctgtatcaacgcacaattcaaccgagttcagcttaccggatattcgttatgcctcttctcgtaatggaaggaaagtgtgtagtccatcactcacagcttgtagcgtcagcattccgcttcccaagatatccttcaaatcagtgattagagaagggatcgctctggaagggtaccgagtgaacgtagattgaatatgattcttgaccagcgaatttagtgactctaacgacgtgctcagaggcgatccgttaaacaaaggcaaaacatgcaagaacaagctcgacagagcggaagtagctggatagagcgcatcgcgtcgttcgcacgaacgtcgtccgatcagtaaacgaccatcttttcgaaaccttggtaagacagaaaggaaaatgccaagaacgaacgatgagatggatgaggatacggctgttctctcccgacactcggatctggcgtcggatgtggatttccgaaactaggcgctgaaggcaagatgggtggtctttcaaacgagttgaatatcgtctttgcatcatacggcaacaacgctgccttgcttatgccatgtgcatggtgatggtggtaactactactgccgttgttgttgttgttgttgttgttgtatgtatgggttgaagaggaaaggacggaaggtgtgatcgatcttttatgagacaacgtagggttcggagattctgggggctctcttcgagtgaatgagtttgttgattgaagaagaggtgaagacggtctggcatgagatcgtattgatgtcggtgatcctggcatggatccagatattggcaccggctgttgttgctgctgttgttgttgttgtggtggaggctggaaccaattcctaatggcattggaagaggctgaagcacccgtctttgaagcaccctcaaccggacctcctgctcctatccctcctgttgttgtcgctgttgctgctcctgctgctccagtaccattcccactcaacgaagcgaatgatctctccctcgccagcttcttcagcccgttcggatcaacagccactccaacccgtccgctgtcaagactgcctctgcctataggtggttccgaagggatgagagatcgagctggtccagatgggcgacgttgatctatcagcgtcgtcagtggtggggagtctggtcgggaaagtgagtttgaccgaggccgactgggtattgatgatgcaggaagaggaggaattttgaagattgttgaatgaaggagagaagaagaaggagaagagacgtgtccaagagaagggctgagtctgcaggtagagctagcctgcttgttgcaagatggcaatggtgaaggattcaattcggtccggttgagacgatggtccgcgaagaatgttttctcttggctgctcacatcacgaaaggagacgacaagtcattttgtttgttcttttcattcgctttctcttcggtctcttttgacatctccgtttcctcagacggttctacaaagatttggaaacgccatggtagtctgagcgcacatgcacgtaagaacaaggagcgaaacaaaacaagaaaggtggaagagacgaaagcagaagaggtggggagaaattcgaaggaatagatatataaagaaacaaaaagaaaagaaaagatattacacgacatacgacatacgatggacacagacacacacatacgacgctagctatcggaagggaaacagtcaagaagaattaggtgtatatacgagagctcacaagaaaaaaaaagcagaagagaagaagacgagaaggaagaaacccggcacaagtagaccaagaagaaggaaagaaggaaagaaacaaatatagatcaaaatataaaattagggaaacatgacaagagatatatttacaaccgaggcaagccccatcatacgtctacacacgcacatgcacatgcacacacatatacactcaatcaaccaaccaacccaccaaacggcaaaagctgtcctccgacttttctcactcctgtcagaacaatcggcaagaacgagaaaaagtagtagcaaggcacgacgacgagaagggaaagccagaaccagatcattcggtcctgcttgaccttccgcctcgaagcagttcgatgaccgtacgccttgatatgatcggcaggtgaggccgctttgagctcataaccaacctggtggcgagaagacagcgtcgacgtcgaaggaccagccaactgggtcgtactcgcgctcgaggacttcacatccttgacgtcgatcaaggccgaaccctcctccgaagattgatacgccggcgggggtgccgaacctgaagacatttcctttagccaggctgagatcgcgtagggcagccaagggtaggcagcagtgtagtgatcccatgcgtgctgctgatcgcccgtcgaagacaccgctttctcatcgatctttcctcgaccagcggtcttttcccgtccacggagtgcaggaaaatgggcgggtagaggcgaagccgggaagaagtttgcagggaaggccaatgtcgacgaaaggtccgccaggtgagcgaccgaaggtagatgagggaatttttgttgaggcaggttcaagtttgccaggttcggcaggttcgggaactttcgtttcacccaagattccataaacggcatccttgacggtggccgagttttagctatcgatggatcgaccccagtcgagtcggcagtttcctgttcgtctccagttaatccgtcagaatctgggaaagtgtcggctgcgactgccgatgctgctactttatccgaactgagggcggcaagctcctggtgatggcggtgttggtgccgatgaacaaagtcaccatcgtctgaactgtcgtttccggtagaagggttatcatcatccagatgtcccgactcatattctccttcgtcatccgatccatcgaccgaggacggatgatctcgatcggccaactgttgtctgctcgctctcgttagcaaatcgacgacatcgatctgatctcgctccctggcaatgtctaccggccgtttaccctccgcagtgacaatctccatatcagcgcctgcctcgatcaacaacctggaacaggcgatccgagcggacaacgcgcctagggccagaggggtatacccgttcttgtcccggacgtccaaatcagatccaagggcgatgagtctggcgacaagcctgtggaaaccaaggaggacggccaaatgaagaagtgagtgtccgtgtctgtttcggagagagatcgagttggcattatcggcattgtcgatctccggagacaagtcgagatcgatcaggtcaaggaatttgagaacagtatcttgaaagttgcctcctccaacggcattcgccgctgcttcccaacgggatgtgatgttctccgatgtagacgcatctcgagcctgctgagttgttattgaggagccagcatgttgctgaccgttgctgctgccggcgttgtgagattgagagggttcgctaccagccgagggggcctgtccgacgatccgcagggcaacgttcttggcatcttcgattcgacctgtcatcttgagtcccacgacctgaagagccagctccattcttttcgataaaaatgacaccgaacaaagtgaagatgtaaaaaaaagaaaaaaaagagtcagcccaaagagcgtcgcggcgataaggttgaaagtcgaaagaaaaagaaaacttacaaagcccgatcagaggtatccaaataagtaaacaactgaagactcatttgactgccccgttcgtcaacttcattctcggactcctttctgaatctgacgacgaccggccctggggccgcactcggcggtaacagacagaccatggccgattctccccagagagttgtcttggaggaagcggtatctccaaacatgcaggtcagaccgtgtacaaagtttgcgcctagaatagtcacctcaattcctccgtgcatcggaccctcgcctggtatgagccgggtgatcatcggtgccggcggaggcggtggtgacaattgaggaagcaaagatgccgagtatggttgaccaagtgatatattcgattcaggtaattgcatttgcatttgctgctgctgctgctgttgttgttgttgttgctgttgcaaagggaagatggaagaagtcccggcagcagaagacgaggacgaaccgatatctggccagaacgggttgggaatcaacgtgttcagtcgactatgatcggacacagagcctgacgatccagaatcgtcaagctcgatcggaccggtgtagagtgtcggcgagggcagatcgattggctgtgcgggtacaatcgacgatcctggtggtgagagtggcaaggtaaacattgattcgaacgacaactgctcctcctctgtcggcgtcgaccacccagcgaccggctcggcgttcaatccaagaccaccattagccgccagaggaggggcgaccggaccatcatagtcaactagcgagtcaaacgcgacttcgaccgacatatcgtggatgccatcctgtccatcgtccggtttgaccgaatggagggaggaagtgtaccgatcaaactcatcttcgacgttcatcggatctacctctaaacggccgacctcagcctgccgaaccatggcgccgacgagctctcctggatcgagcgggacagattctccgaacatcgacaccggcggggtcgtctctgaagacgaagcctcggccgtgcttgtcccggagaaagtctggttgtctgaatggatgtttccgatcctcaggtctcctaatccagagacgtcgacaggcgagtgagcggttgacgatgacagcgtgccgggcctgccgatcggggtcatcaagagttgttggctcgtcgtggttcgcggggtgccataaacggagctcccggccgaagaaggagaaggtcgtctgtcgtacggcgtggccgactttctccggtgatgatgctgatggtgatgaccgatcgactgaaggtcatcttcgtctccatcgacagaggtcgaggccgagatagaatctcgcttgttgggcttcgacggccgacgaacacccctgatcgacgcgttagacgttgggttcgaaggcatgatcatcgcttttggcattctgttcgtccggctcgcgaccggctcggcgttcgaggtggctccaggagttgaagctgctgccgctgccgctttggcggctgctatcgacgaggacgtcgccttgtgatcgtcggtgatcatgattgggggtgttaaaccagaggcaacaatctcattcaagtggtttttgaggatgaatttgatgctgtaaagaaaaaaaatcaaagagacaaagatggatatgattagccaatgatcctcccctgtctctcgtaagaagcaaactctactcacacaaacccaaccttttctcggtgatgtctacaataacaggtgactctggccggcaattgagtttctccttgggaaaagtccaagagagaggcacagttgaagagaacgatcttttgtcgttcgtcctgaccgttcgtcccgtttggggatctgttggcgggcgtggtcgaggtggagtctagctcagagtctgagagtgtcggccgaactctggcagccaattttcgttgtgatcgtttgacctgatgttccaaacaaataaacccggtcagcgtctaggggtaagaaggagaaggcaaggtgaggttgaaggggcaaaaactgaagagaacgcacctctcgagctcgacaattttgacaggcaaacactcggagacctagaccttttccgtttggactcccgctatcggctccctctgtagcacaatacacctcggtatggagatggaggacttgttcttcccttggatcgacatcccgcatcccttctgcatccttcttggaccgtcgcttggtggccacacccttttggagtttaagatgggtgtacgttgagagaaagccgagggtcgcttggttcgctggtgtgctggtcgtttgcggaccggagagtgggaaggatactgagatgttgagcttcacttgtgtctctactctggattttgctccggacagagggattccagaaatctggagtggcaggtttcttgctccgtttggaccgacgtcgacaagggttcgtcttgtttccgggtcgatccggatgctgggtagactcttagcggtcggggtggtgaacagaccagacgagccctgttggggcacgttctgccgggcaaatgacgagacctggcctgggatctgagtcgaggcggaaagagcggtctgtgaggatgtagggaatgaggacgcatgtggttgtctggattgataaggagaaagagggaggcaaggagggagaggaaaggaatgagaaaaaaaaaagggaatttgcatcccccaaccaaattgaagatgagtatatgcaagccatcagattagcggagatatcgatatctctctcgccctcgccctgtgcatatgcattgttatctcttcctctcttttgccgagttccatccatcgtttggtcttcgtgacgaaggaagcaaagaagagagaagcacagagaaagaggaaagacaggcaaagacaaaagcaagggcgaagaaaagaaagcgaaagagagagagaaagaagaggacaagatactaacctgttggttggaccgagtgaaaagtctggactgacagcgttctctctgaggattcgatcttcttcatccgagccggactctctcttgacgagtcctcctacggcggcgaccgacttttcgagtgcttgctttcctgcttggatgccactgacgagtgaaaaggcggcgtaatcatatccgggcggaccaagacgttcatccatgtttgaggagctcgaagaagcctgagaggcaggcgagtttgggttcgcttctgaatctgacgaggaggaaagcatcaagcagtgggttgactttggtgatttcaaagggagggcggagagaggggatgggagtatcccacttgactgtaaagaaacaaagttgtctttcaagagtcccaaagaaaagaagagggatagggaaaaacgaagaaagaaagtggtccaagtggaagttgacggtgtgtccttaggttgggggaacgccagaaggttgtgtatggaaagaaggtctgtgcgttcttgcattgggtcggtacctggggcctgcgcgctggggcggcggctagggggggcgtccctggt

SEQ ID NO: 1322 - DNA, 34490 bp, Xanthophyllomyces dendrorhous
  misc_feature (28341)..(28350): n is a, c, g, or t
gggggggggggttcgcatgtcataggtttttttctaatattctttctccttttgtaatcactgtattgtaaactgtattctagaactgtattgtctctgacaagtctcccttggatgtcgaatccgacccgaacgaagaccggagacgagggaaattaattcctttccggatcatcaccttggattatctcaccttctgttttaccccaacagagaagaagaagagaaagaaagtgtggaaatagcagaacccatattccgacacctcttttttcttctagaacatctttcactctttctttgtctttgtctctggctgtcaagtcatttgacgtcgcaacctaggcagaaaggagtattactaaattacacgaatcacgcatacgcacacatcgccacccacacccagatatataaacacacatacatacactagatgcaacaaaacttgctggataacgcgaacccgatcgttcacgccgcttctggggcgttcccaggaagctcaaagaggaacttgaagaaccgaacggtccgatctctttggacggaagaagcgggggagtccttcaagtcggctgctattgatgacaaagagagtgaagaggagaccgagaatacagaggaggaagaagttgaggacatcgatgaggaagaagtctttggttcgttctttccatcattttcacttgttctatttctatttctatttctgaaacgaccatgcccgggctgactctcaggtttatcggttcaatagatttgctgagatcgatcaccgatccagaacatccacttactttggaacaactggccgttgtctcgaattcacaaatcacattgtcgaagaaccatgtgctcgtcgagtttacgcctacgattcctcattgctcgatggccactctcattggttcgtctagtatctcgtttgcggctgtgtctttgattgcgtctgtgtctgtgtttgaagctgatggcgtgttgatcggatgaaacaaaaacatacacacacgacacacacaatcgttcaaacccgtacaaaataaaatcaggcctctctcttcgagttcgattactgcgatcgttacccgaacgttacaaggtggacatccgggtgaaagaaggaagccatcaatcggaagtagctgtcaacaagcagttgaacgacaaggaacgagtggccgccgctttagaaaactctcatcttttaggcgtcgtcgagggttgtctcagtaccgccggaaggagagggaaggaggtcgtgaccgtttgaaagagggcccaagtaagaattgagagggtctgtgtatttgtaagcatgggataagaatatatataaagagaaaacggactagacttttctctatgctctatctatctgtagtctgtacgggtttcgtttagcgattattcaatgtgaaaagcttcatacgataaggagaagagcgaaattgcgaacataagggcgagaggaggaggacatggttagacagagagaagcaaggagggagtgtgtgtgaacgtgaatgtgaatgtgaatgtgaatgtgaatgggagagggaaagaacaaggcacaaagagcgagagcgcatggaagagatagagaacagtttgctatggaaggaaaaaaagaagaaagacacacacagacatagagtgacgcaacggagcgatgtggtcggcaagtatcatacagcatgacatagcactaacacaacatgagtaaaatatgaccacaacctttctactacgcggcctctgatacatcagactgacacagcagtgtcgtaatacaaacacacccaggcaaataaacaacgcatacatataaagagctcgacatattctgccctgacgtctctggggtggccgccggagagatggatgagttacgcgtgattgattcgtcactttccaacagcacagcatcgtgtgtaaccctagatcgaccaatcagataaataaggccggctgctgcgcctccgaacacgccggccttgtggatttcaatttatttttatttccttattttcttattttttttcttctcttcctctgctcattaaccgacgaggtagacctcagacccaatcctcaaaaggcaacacactcgttcattctcgtataccaaacacacatacacacacccgttcattacactcactcacactctttgtaggacaaaggaaaaaaaaacagacggaaaaaaaggagaatttataacacaaagatcgatcgtaagagttgtaatccttcttgaacgttccctcaagctctcgtgcttctcttcttccgccaccatccggccggctttgttttctcttttggtctcctccccggaaaattccaatcgaaccacttttcttctgcctcacctttagccactttcatccgttcttctctatccaatatcataccggcctcgacctcgttgattcagcctcacactctttcattcaacgccaccactctgcctctctgtttgtcgttgacaatatatcctggacgttcgctctcttttgataaaaacacccagactcaccttcaagctccctccgacacagccctggctttactaggtgagcgtttttctttggtcatcaaccgtttgtcgtactacatcatgcccatacacacatccatccgagtatatactatataggctgaataaaagaaaatcgaaagctcattcttttctttctctcatctttgtaccagtgctcttcgtcccttcgtcccttcgtcccttcgtcccttttcctttcagccaccgatggaatatattctagacgcagcagacgactacttgtttgacaaggcgtactctgcccttctcccggcttcgcgcttcgtgccttctcttctccagtcggccaaccacacagtggcttcggtaccgacttctccctgggtgtcccagctgttgtcgtatttcccccacccaccactcacctcgtccacagcggccgagctcgcctcggcctccatctggcctagagactacatcctccggcagacgctctcactctccatcatgaccatggtcggcatccatctgatgtacttgaccgttgcggccgcatcttactactttatcttcaaccgagagatggagaaccatcccaggttcctcgatggccaggtcggtaaagagatcagatgctccctcaaggcgttccccgcgttgaccgcgatgaccgtcccttggttcgtcggcgaggtcagaggtcacggaaggtattacgaccggatagatgactacggttggggatacgctcttgcgtctattccaatgttcttgctcttcactgattactgtatctactggtgagctctgtcccaggtttcttgttcccgctctcccattcgttggcttatcccctggaccatctttctctctagggttcaccgactggagcaccacccatctatctacaagcacctccacaagcttcatcacaaatggatcagtatgtttctcctcttctttttctttcttcatgctcggtcttccctgcagggcccaatctgatcatcagttgctcggttcattacagttcccactccattcgcctcccacgcgttccacccggttgacgggtatctccaatctcttccttaccatatctttcccatgatcttccctcttcacaagaaacgtaagcctttgtttctgtcttccgcttcagccagacgctttctctgtattcgtgactgatcgtcgtgtgaaaaaatactctacagtctttttgattttgttctcgtttgtcaacctctggagcattctcgttcgtcttcccactttcgtagcgtcatcatcagcacgtcgttgtgtgctcacctagaatgtgtatggtatattgtgtttcctctcttcctcttggccttccttagattcacgattcggatatgatcaccggtcacccactagaaaagatcattaacggaccggcccatcacaccttgcaccacttgtatttcaccgtcaattacggacaggtttgttctccccttttcttcgtcctggatggctcttgctgacgtatgcacatcctctcctctacctgtgtgccttgtgctccagtacttcacttgggccgacaggacacatctgtcttacagacagccggacgcgtcgttggatccgatgctacaggtaaagatgcagcagaagaaggaatataaaaagtctcagtaaatgaaaacaaccaaaacggataccgatttctttctcttcctcctctggtgctccttccttgctgttttttttctgtgttttttctttctctttcattctctcgctctcggtttcctttgggtctgttccttgctgctttcttttcgttcatctctttctacttgtgtgtttcttgatcacctttgttctcctataatgataaccccaacccaccccatctttgtgcgcgttccttgtctgctgctctctcgctaaatcccatcaccacctcgtttcctcatccgccccggcaattacttcttctttgtttttaccgtttcccaacatctaatctagaagctcaaaaaagagaaacaacgtctagcatacaagctggactggctgtcccgtatctttgtctcgtgtttcttttcttcctcctttcccattgtctcttttcttgcttgccaatcgtattgatgtccatctatggttatatatcttgtctctccttttctttcccacaacgagtaccacacgcttagggagacgaatagagacgttcgatacacagtctaagggaatgagatggcgagacaaagggaaagaaaaagaagaaggtgatctaacgaaattgtatatcggtcgaatatcaaatcagatcgattgcctttttcttgtttttctttgctcttctgttttttttttctcctttaattattcgaatttcctttttcttttcttttacctttctacctcttactgtttctctcctctctctttccttctgctttccgctctcttcagcccttctctcttctctcttttgtagtttccgtctcgaatcaattcggcccggtttggtttgattcgtaccgatcataatcttggcttggagccgcaaaactaaggacggaggtaacaccgagttaggtccgaatttaccaactctaccgagccgagccgaggaggaggagcggaaggaccagattgggcatcaaacgctaagcccaagaccggaattcagacctgcaccaagcagaaaagccgatctttgattcaaataccaacataactggtagagtatcgggcgaccgtaaggaaggaaagtccagaaaacgaaaaaaaggaagagaaaagaaagatgtcgactctgcagccgcctatcaggttgaactcgaatccgagtacgatttcgatttcgactttgggttcgggttcgaggtcgggcgtaccgtccaacgcaaagttcaagagtgagctcacctattgcttctgattgcttttctcctcgctctctctcttctttctatcgtctgtgtgtttctctgctctcgtgtatatgtgttgcgtccacctatcctggtctggcgagtttaaaagtcttgacggggttcgccaagtgggtgatgtaccgctgttgtgatcatgtggtggtcgtgttggattctggactctcttcgtcaacgtctctcaggaaagaaccactcgtgttgcccttgaggttttaaccggatagagattcgatgattgaggcttgaacctaggaaaacgagactgactcatccttcccttcgttttcttgcctctttctcttgtcttctctttttcgctgccttgccattgtcactgacgtcgccatcgccattgccttgacgttcgttcgtttccactttccttttggatcctggggtgatagccgcaccatgccagaactttgaaaagaacgggtattgtaaatatgaggatagatgcatatttcttcatcccggtatgtctccccctcttcctttttctctatcctcttctttccgtcccttctttccagtctggtcctttttctctttttcctcgttctattcttttgcatcttggctttgtcttgtatctgacgaggttaatcgggctggacgaacagatccgactatgccaacgccgatctcgatgccgatgttgatgtccatgtcttcagctgcgactgcttcaatatggtatgacccagacactgatcctgtatgtatcttctcgaccttctttccccttgttattattctcccttgaaacactccatgtcttctgcacccacgcgctcatcacttgccacgcatcaaatctctagttcaaccctacaaacgacccggtctctcctgtatacccacttcctccaggtcgatcccgaaacgatgggtccccgccttctcctgtaggttctcctatcgggcgcgatcattctaacggacatgggcatggaaacggacacggaaatggccatgcaaacgggagcgcaaaccaccacaagagcgggaacgcacatattaatgggaacggagcaccgaccaacggatcctcgggcttcaacagatcagcctctaagcaccgtccgttcttttacggaccgtcagactatccccagctccctctatccaacggcagcaacagtggtagccatgtcaacaacaacaatctcaataataataataataataataacagtaatggccatcattcaaagagaggaggatcatcgtcgtcaaccaagcgcgatggcttgcagggtcacggtaatggtaatgggaggcttggcgaacaaggtttcgtggaagctggttcgacagctgcacacgaccaggatcgatccgcttacaggagtaagctttgtggattctttgctactggtttttgtcctaacgggaatcgatgcacctagtaagttcttcctctgatttcgacgtattcaataccacttctcgtcgaagaaaacttgtgttagatattgacggtgggtgactgtgtgttgttgccatctagcttccacccggatcaccctttgacggctgctctgggcaaaaccgtgtcgtcgacttccacctcctcttctggtcactcatcctcctctccttccatcgtcaccagcaccgtgacgacaagcaataagggacctatccgatcttactctaaccaatcggcgcacacggacttgtcggcttcatcccgattctcatcttcgatatccaacggatctcctattgactctcaccatcaaacctaccctcactctcacgcccggacccaggctcaagcccatgaacgacagaggatggacgatctcgattcgttggacgaatatgagtatgctttcgattacagtcttacaggactcgggccagaagatttagatcttccgttggacggaccgttcgatcagagctatccaattcaggccggagtcgagtacgggagggacggtcatcctcttcacaagagtttgtctctttctcttcttcagcagatgccccatcttagagtcctttctttctattattgttagtggatattgatcgggtttcgcttggcaattcggtttatagcccgaccatgtaggtactactctcagccgagcggatgcagcaaaggcgacagatgttcgttcagacacaccgaagaagcagccgctctagctaaatcgggtcatgtctcgcttactgcgaaagacagacgaatggctaaggaagctgctttggaggagaaacaccgactttggaggagtacgttactttcttgttttcctactttcgcgttcgtcggcgcctttcatacaatttaacgtcttccttctcgcgatttgaatcctgtctggtctctagccgaaccatgtggtatgtttaccctcttgagataggctttcttctttgtctcttgaattaacgattgattgatgtctggtgtgattagcctatttccaacggggttcctgttctcgtggcgagagtatgtcgtttctctattttctatctcattcatgcataaccttcttccggttaaagatcagaatacaagaactgacaaaccaaccccgacctctcactgaaaacgaactaccagcctgcaactttcttcatgttcggtcgacaacgaatcaaccgttaggtcggaaaccttgtcggatcttgctctccaacgggtattgccggtttggtagtaattgccggtacagacacgatctctcgaacgttgatttcggaggatctttccctgtcgaggtagatgcgaatgaaggaggtggggaagatgatgtgaatccttcgaaagagaggaaggaggatgatgcggaggctggatcggagaaccagcgtcgtacacgacgacaacaacaacagcagcaaacaaagcaaggagaggaggaggaagggttggaggatgaggaggatgaggaggacgaagaagaattagaaatcgttctagttgcggatgatggatccgagggaaaatcatggtctgttgaagaattcgaccaaaaagttagtccgagcgagatcttctctatcacatctttcataccagagagccgttggtcggagatctgacatcccgttcggttctttctctttcccctcgtccattctgttcgtctgtgtgtaggagctcggagacacattcgacttgttgtcgatctagtcatctaaattcacgacagacatcttcatcaagccccgtcttgtcttatttcgggtcaataatcgcttcaattcaaccacatctatccatttgctcgcgactcttctcttcttcttgtccatcttgcattctgaaaacatatgtcctttttgaacagaacagaaataaacaactcttcttcctcatcctatcttttcatcttttcatctcaaaataaataataaaataaataaatacaaaacaaaaaagacccatcaatatatcgtttttttttcttcctacaaaaactaaaaaaaatcaagaacaaaagagttatgtttctccaatcgtttataataacatatcatatatatgcacatatacgtcccatcttctactcccattccgaatattcctactactctcaagtcctgcattcgctcgagaaaacaaatgttcatccagtccaaggtagaggacaaaaaacagaaatgaggatcgataggagaatgattactactcgtctggtatcgtccgccaagaatgtaagtacagctcgcacgctcaccgggccggagaagcggaattcgaacattcgactttgtgattcatccccgttcctccgaacccatctcgtcttcatcccttctcttctcgtttccttcttacccttctttgttgagcaacgataataataataacaacaacaaaacacacaacttgcgtgaaatgtcggacgcggtacagctcattacagatcacatcatagcacagtatgccattcacaggcaggcgcatttgaaggaggaaactattcctcctttgatcgttggacttcaaggtcctcagggttcaggtaagttaccttcctctcttctttcctcctctcccttggttgggactgaaattgcacctctccctcttcatgtacgtacgccatacttgtggaattaaaaggaaagacatacctcacctctcttgtcgatgctcaactcaaaggaaggccagacaaaccaagcgtagtcacgttttcactggatgatctttatctcactcatgccggcctggtggaagtagctcagaaacaccctggaaatcctatcttacaaggtcgaggtcttcctgggacacatgatattggtgagatttctttattatatcgcccttgattcttcatgctcatgctcaatctctgaatcggttggattggacccttgctcgaacactgtagaactcgctcaacagatctttacctcccttctttcttccggtagaccgtcccggcctgaacttcctacacctcagaacatgactttgcttcctcggttcctcaaatcgcttcaatcaggccaaggtgatcgattgcctcctcaacaaagtacacttgtccaagcgcctgtcgatatcgttttgttcgaaggttggtgtctcggcttccgacccttaggccctcaaggactagatgaggcattcgcaagtagcgttcaagggaggttcagagatgtaggaaaagacaatctaggggctgtcgagacagaattgggacgtatggtagacgggctatggggcgttttgaattgtttcgtacaggtaacgagatgtctcttgtacttgtgtctcctcagcctgtcggtcgatgtgtcgactcttagggatttgtgtgctgatcgtttctcttctcgttttcggttttcaactcttggcttgacctccagctgagcgctccgtcactagagacaatctatacatggcgtcaagtgagtctcttttgttttcggttacgttttttcctctcccttcgatccactctagacatatcgctcatctttcctttctttcgtagcaacaagaagttgaccttcaatctcgctccgccgaccgggtaatgagcccagaagaagtcatccgttttgtagatcggtatatgccagcgtacgagctttggtcggctggcgttcgagccaatggtacgacttgggccggcaaaggcttgggaattgttcttggtcagcagagagaggtcgtaggtatcgatacattttgagcctgctgatttcgagatgaatgtactcgagcggacgctcgtagatagttggacttcactttgcttacacaacgagcttttgtatggtatgatgagtagagagatagatagatcgatcgatcgttatgtcgttctatcatcagtcaggttcagatctgccggttagtatgaagatcagtcgcaggaagtcaagatccaaaacaagacgacgtcgcaagactgggagaaagatctaaggaccgaaaaagaaaaagaacgagaatggaccaccttgggtcaaaagtctcatagaagttgatcgtgcggcgttgggccaagcatagagagaaatggatctcatgagggcgaagacgacggaatgaggaaagccagccatggctgatgaggtccgtcaatctctcccatctgattctcgtttcggacagctattctgatccttctctcgttagtacacacacacgccgaatacctttgcctttcttttctgttctctgttcggtttgggaaaagaaagctcgaacgagggggattgtgaaagaagcatgaacctaaataaaacacaaccggactatccttctcctctctctttctccatcaccccttcttcctgttcctccttagtcacgaccaaaagaacctgatataagtcgaattctgtttaagccttgacagcagcctccaaaacagtcaacacatcgacctcgacctgagcctcggccttagcgtactccgaggtagtagacgacaaggtctgcttggcagcggcaagggaagacttgacggcctggagatggaaataatcgagtgaaagatggatgccgagagagtaggttcagcgagtgtgtcggtcggaagtgacaagaaagggtgaacaaagatagaaaatccgagtgatgtgagatggatgggtattggtcgaaattcaggtcggaaaaaaacaaaagatggaataacattcgagagcgaaggaatgacagaacaagtcaatctcgaagcctcatgaaagccgttcacagctcatgataatgtaaaatggaaagaaaacgaacggaagcatcaaaatcggcaatgtcgtaagcctcaacagcgttgatggtaagctcgttgttggggtgaacggaggcgaacccagaggagactgttcgcgacaaagcaaaaggagaaccaatcggtcaggatttacatcagaaacaaatctctatatgattgaagcaaatatcatccaaaacggaaggaaagaaaaagcttgataggaatagctgaatgccttctccagcttttttcttccctccgctttcgtgattgcatcgttcatacttgatcgagcggagacgcaagcatcgaacgtgataggatggaaaacacagaatgtacgtactgaaccacttcttggagccgttagcaccctcaatgacctcgaccaatccgggagtaagagcctcaagggtagggacgtgtccggaaaggatgcccatgttacccgacgaggcggggatgttgacctgggtgacctcggaggaggagaacaaggtcttggaagagaaagcgattagaagaggtataccaaggagagtggtgaacacaaaagaaatagatttcagcatgagaacaacgatcggaatagaaacagactgatggcggagcgaatgtagctgccataattgaactcgtgtagatggatgtatagatctggcttttttaaaaaaaagaaagagaagaaaagaagagaaaaatctctctagaactaacctggtggggaaggaccaaagagagcttgagcttgctagcggtggcaggagcagcctcagcgtaagatcgcttgaggaggggaagagcagctcgggtgacgggtcgaagggcgaacatgataatggatgggatggagtgagtgtggatggaagagagaagggaaaaagtaggagaaaaaaaaagagcgtaggacggagaatgattagagtaaagtgattagagaattttgtagttcgactaggaaaaaaagatactatgaattgtatagtcaagactgtaatgacatttgccaagtttgtagtatccccaaacttgtagtcttttcgtagtcattctcacagattttgtagtcattctgtagtcgttttgaagtacatttgtagtacatttgtagcatatttgtaatctatcttgtagtatttttcgtagtcttcgaaagaatcaccacaaactcatcatccatccactcattcatccaccgctctcccatggtaccatggatccgacatacaactgccaaagctgccgtcaagttagtttggtagcctgttgagcttgaagtttctctatactgaaaccatacgttctgttcgtcacccatctagcctctgcagctcgactcatccatatccaatatccaacagtcccagttcgagctcatctcaggtacgtttcactcatctgacacaagattctgtcaagatctcaacccttatttgttgcaatctggtctcccttgatacatccgtcctcagcttctctgcccgctcagtcgactcctccttcgtcacaactctccctccaggaccgaatcgccaaactaaatgccccagatctgtccaagaaggcttatctccagacggtgtcaactaccgatacctcatcctccaatcaacctctttcatcgtcatcgtctcgtcaacctaaaggcccagccgaatcgttcatcgttctcaatggcaacgcatcctttccaccagagttatctccctcggtccctgctccgagtgtaacaaaaccctctggaaaccgacaaccagtcaacaatcctgcagaaaaaccgacgaaacaggctctgatcaccaccttactagaattggtgtcgtctagagcagacaccgatcatccagtgtgtacggaatgtgcaagactccttcaagaagttctcgctcagcgtctagaagaggtcggattcgaacgagacaattatattgctttcgaaaggcaggtcaaagagaaacaaacgggcgtaggcagaaagaccaaggatgaagttgacgcgctcaggagagagcttgatgaggctagttctcgtctacatcggcttgaaacttcctggcatatattcgtagatgctgctgacacattgatacactggcatatctgatagatcacagcggaggagaacgaagcgcacgcgacgcttctcgctctcgaagctgagactcaagctttacaaacagacctatcgaccctgcaggccagatcggccgcgctcttgtctcaggaactcgagttccatggctcccatgcagcacttgccgacgaaaaggatcacctggtatcagtcgccactctggtccaatctcagtatgcttcggatctgaaacatctgcagagactcgaggcgaccaatgtgtacagtgatgtctttagtatcagcgtcgtcaaaggagaagccggaagtcggatcggtagtatcaacggactgagattaggcaaaggcggaggtcccacaccggtgcgtacactctcacgactgttcgaagcatttggatagaaaatcattctgatttagttctgaaacttgactccaaacaggtcgattggccagaaatcaatgctgcatggggactagcattgttttgtctacatagcttggccaggaaagcaaactttcaattccaaacgtatgacatcctcgcgactttctatccaccaaatcaacccatcagtgaacttggctgacccattcatctgatgaacgcaggtaccgactcgtgccattggggtcaacatcaagaatcgaagagttggacggcaagaacgtttacgaattgtaagtcataagtttctagcttgccttgccctctggtaagattgctgtgcttacgaattgatatttcctcatctcttcctggtgtatatcatgctctcggtcctcgaagatatggctcttccgatctagcgctctcccgttttcttcagaacaggagatacgaaaacggcatggtggctttcctcgattgtctccggcagttcttagaattcgctcggaaacgagactctgagcgtgagaccgttcgctggggacaggaaaagtcatgggactttggtcgttatcagtttgtccaatttaatcctgctttctctgccttcgttcttcctacttggctccaagaaagcatagactgacgattgtcgtcttctctttttgcagcatcgtcaaggaaaagattggagagccgtcacgagaagtctcgattcgatctggctacgttccgtcttcgctatctgtactcagcccaggactaggggatgatagttggacgagggcttgtcggtatacgcttttgacgcttcatcgtttgatcggatggacaacgagagatggtgcttagagcaatgagtccttcatactttcctgatttaaagaaggaaagtggtcttttctctcctctttttctgcttgttgtaagggtccttttatggaccatgtaccatctagactatcaatgtatcaccacagatactatttgctgttacaaaagaatacacaacgagacacctcgatgagggaaaggcgtttgtttgccctttcgtgtagcaccgcttctgaacccttcgaagcacgtgtctcaacatcatctcggtcatcatcgcacttaaccttgatgcccaaactggtcttgcattcagaaccttgaaggaaccatacacatcctgattcatcacatcatatctcatcacgagagagtcatggaccagcctgctcttccatattcttcggtggaatcttctttgactggagaggggacaggatctactatcgaggcaccgggacatgccgatcatgttccttctgatgaagaatcacaagaagagtcagaggacgacgacgacgaagaagaaggagaagaagaagaagaagaagaagaagaagaagaagatagagatgaagtcgaggagaaagaaaaagaggagaacgatgatgatagtgattcgaacctatcagcccgagatgaagctgagcgatcggaccagaaggctgaacagaccatcgacgtgactgaagaagagagcagtgaggaagacgaagattatgaggatgaagaggatgaagagatatctgacgacgaagatgaggaagaggaagaaccgtatgtatactcttacagaactgtttgccgattcttggttcaagatcacaactgacgtacttcgagttatctccggttgcttgttatccacagagtcctcaagtattctaggctggaaccggcagtgtccgagattttggctaaggacaaagcatcggtgatcgcttcttcctcacggattatcgtcagtagctctatttctttttcatgtcatatcaaagacacctcatttacttctgttttcttctggtcgcaaccaaatcctcactgggtgggtttaatcaacgcaggcggtaggaacccatgcaggaatggtccatattctgtcgcccacgacgggccagaagatatcttcttatagggctcatacggctagcgtgatggatatcgtgatctcggacgatggaagtgaattcataggaacgtgtagtatggatggtaggtctagcttcttcttcatatccttcccccgttgtctatggcttgcaattgatcaatcgatcctttaattgcatctcgtatcgatgacacaggcaaagtcgtaatcaattcgctcttaactcctgaaagatacattcaccagtttcctcgtccactccgctcactcgcgctagagccgttcttcgccaaacgaagctccaaagcattcatctgcggtggaatggcaggcacgctatctttcatggaaaaagcatggtccttggtaggtggtttgatgggtggtctaggaggtggagggggtacaggaggaggaaatcacaaggagacaatcttacacgagggtgaaggaccaatttgggcagtcaagtgggcaaatagcggattagttgcttgggccaatgatctggttcgtcgacatggcctccctcttatatccacgttgatgaactatatgcgccagagctatcatacaacccactgatattcatcgtcttctcgatcacagggcgtcaagatctacgacacatcttctgaaaaactcttaacgtacattgatcgaccagcgaactcgcctcgggcagatctttataaaccaactcttcactttgttgaaccggcctcagcaacatctttcgagcccatcatgctcatcatcggctgggccgactatataaagcttgttcgagtccgttctcgaatttcccattctgtcccttcgtccttgtcatcttctggccgaccggctagtatccatagatctgcgttgggaggaagttcaatgccaggcgtgataggtgctcagaaagaaggcttcagcgtggagatcaaatcgatcttccagctggattgccacatctcctcattaattcctttcgagacgtccgaaaaacccacatcatcaggcctctcttttcttgtgttggcatttttaccaccttcggattcaacacgcaaatcatcatcatcgatatcagatgaaaatgacgatgatgatgacgaggataacgcctcaagtccgatgttcagacgggtaccatcgctacgtccggagttgagaatcatctcggggcaaggagaagaactgtcgtcggacgcgttgacattagcgggttacgaacaatggagctgtaacgattattggttggttcccactgttctcgcccctggtagcccaccctcttcgatatccgccggacgatcttcaaatggcgcacaagaaaaggccaccaagaagccagaggttggatatgtcgtactatcaccaaaggatattgtggtggccagaaaaaggggagtaaaggaccatatagcttggctggtggagagaaaacgttaccaggaggcattggaccatgtgggaaagctgactgatgaagagagaggagcgaaggatgaacatggagagattagcgtgagaggcatcggagaaatgttccttagaagcttgatggaaagtggtgagtcttagttgctagtttgtcaaaaaatgttctccttcaagagtactaagctgaccaaacgtttgcgtgatccaatagccgaatacgaaaaggcagcttcattatgtccaagggtattggatcaagacaagaaagcatgggaagattggatctttctgtttgcccaaaaacatcaattgcaggtaagtgttgattgatcagagcacaagctgaaggttttattaattaattatgtgtggtttccaacaacataaggttatcattccttacgttccaacgacgagaccacagctgagtgatatggtgtacgagatgatgtttgcccatatgctcactcatgataagccggtgagtttctttgcgtattaacggacggaccaagattgtacaacgaagaccaaggttactgatgtgctgttcgcgccgaatccaatagtcattattacgtatcatcaaaacttggccttcatcaacttaccgagtgccgaccgtgatagacgccatcgaaggccttttggctgattcatctggagaggctatcttgatggagtgtttagctgagttgtgagtcttcaatccaattctttctcgtgtatctgctctttgtgttttgtgctgataatctcattctctctcgccgggtgtatgaatagatacctgatcaacggccagcctgctaaagcactcccatactttattcgactgcgaaggtcaaacgtctttgatctgattagacagtacgacctgttcgaggcggtgaaagatcaagcgctcttattggtcgagttcgattctgagcttatctcgaagccaaatggtccatacaatgttgatgaaggtggcaggaaaacaaaatcgacaatcgtgtcgagtaaagagaaaggaacggcaaaacatggcaaagctataaaactattggtggatcactgtcattcaatccctgtaagtacactgtggaactccttttgtctgtaggttgtagatcagctgatgaatctgacctccttgttttcttcttctgggtattttttgtccttcctttagatcgcaagagttttcagtcagctctcggaacgaccggagttcctgtacatgtacctcgactcattgtttgagaaggatccatacttggttttggactatggagacgagcatgtgcgttatctctgtcggtgctgatgatcggttgaacgttttcagacggacagtactgatagttgtagaatcggtttgtaactttaacaggtcgaattatgtgccgactatgatgcgccacggcttatggaccttcttcggtcaagtgtagactacagtcttgagaaggtacgtcgtccgtctcttctttattcatgaccatacgctgtacgcgttatccatacgttactgaacaatccgtctttctcgggtgtccgcaacgttgatgaaactttaggcctactatatatgtaaagcaaaagactttgtacctgagatggttttccttttaggccgcatgggtaacaacaaagatgcgttgatgctgattatcgagcgactgaatgatgtccaacgggttggttcacgctcatagttccacgcaaacagtcgtgattactgactttgttctcctaaatgttgcatacaggccattgagtttgcgagagagcagaacgatgaagacttgtgggaggatcttttgcattattctgagaacaaaccaggtgaagctcagtctttcgtgccctttcccttccctcatttgcttggtcagacatctcttctaaacactcttatttctacaaacatctctggaccaaacgctagctttcatccgagttcttttgcagaacgtaggagcagatatagatccgatcatgttgatcagacggatcaagaatgggctagagattcctgggttgaaagacgcgctcatcaaaattctacaggatttccaattacaggtgagctacgcatctcgttgtatacgtttaatctttgctacgtatgttgaggctcatgttctgattgaattcttgctatcagacaaccttactagaaaactgtcagacgattctcaattcggattgcaacgccgttgcggtcaagctttataaagcccggacgagaggacattatcggacgggtacgtgttcatctttgctatagcctaggcgttcgtgaaacctttctcaatctaacctccacttgggcattgggtgatcgatatgtcgaacaacgacctacaaaaagaacttaccactggcccccaatacacgtttgatgggtgatgtttgattgcctggggaatatgaatttgaaatatacatgataccttatctacctattgataatagattaatgactccctacggacggacagtccgaacgatttcctattttctctctcaccttcgctttccttctttctaatcatcacattcacaccaatcgtctcgcaaaagcaatgcaatatctatcgaccagaggaggacaggaaagactttcgttcgaggaggtgaggatttttcacatgcgttccttctctcagttgcttatagaagcatccccagcatcagggtggccatctggagtttaggctgaatgcattccgtgtttcttctttcttcataattcggtgctttttcactggaacaatgcaacctcttcaggccgttttgaccggtcttgctcctaatgtaagccttcgcttgctcttgttccttcttttcttgatctgttcaatgagtctcgactcacccacccgtcaattcatcacagggcggtctttacatcccttcccaaatcccttctcttcctgcagactgggagactagctggcgtggtctttctttctccgaactttctcacaaggttctctctctcttcattcccgagtctgagatcccctctgatgacctcaagaccctcgttgatacttcgtacgggaccttccgacacccagagacgacccctctacaccagatcgcctccaacgaatacattctcgagctcttccacgggccgactttcgcgttcaaagacgtcgccttgcagttcttgggaaacttgtttgagtacttcttgaagaggagaaacgcggccaagaaggagggtgagcagaaggagaagttgaccatcgttggtgctaccagtggagacactggaaggtgagttcatgacatgatcgatatgtatattcgcaagctcgatcggctacatgaattgatgtgtggatttgatttttttttcactgtcgacagtgctgccatctatggagtccgaggaaaggaggatatctccattttcatgctcttccccaagggacgagtatctcccatccaggaggctcagatgacatctgtcttggactctaacgttcactgtatcgccgtcgaaggtactttcgacgactgccaagtaagcgttcttaatacattatcatttatttatccaaaaacaacagtcacgttggattatggctaatggaccgcgtctttctggatgattttcgaatcaggataccgtcaagtctctcttctctgaccccaagttcaactcgacacatcggttgggcgctgtgaattctatcaactgggcccgaattctcgcccagatcgtttactacttccatgcctacctttctcttcctccctcgtctcctcaggtccagtttgtcgttcccactggtaacttcggagatatcctcgccggatactacgctaagcgacttggtctgcccatggccaagttggtggtcgccaccaatgagaatgacattcttgctcgattctggaagaccgggcgatacgagaaggtcgactcggcccctgagaacggagtggccaaatcggaaggaggagtcaaggagaccctctccccggctatggacatcatggtgtcttcgaactttgagcgactactctggtacctagctctggaggctaactacgacaagggagtcgagggagcgtccgctctgttgaagggttggatggatcagcttaagtcgaccggtcgagtcgatgtgggtcaaagtgtgctcgctttggccaagcgagactttgacgctcagagggtttcggatgaacaggtttgttttccaacgaacacgagacttatcagggatacgcgtctttttctctccgatgggaataatattaactcatccgttcgttctctgtcgtgtattctgttctactatagacgactgcaaccatccagcagtactattcgaactccaagccttacgtggctgatccgcacactgctgttggtttgaccgttacccaatctcttcttccctcttcgtacgttctttcctttctttttttttaaacccggcggaatcgaacgtttctttctcatcgcgcttatcactttgaatcccttgttgtttttcttctgattgacaggccggccgatcagatcttcatcactctctcaacggctcaccccgccaagttcctctccgccgttcagcaagctcttccttctctcgatttcgatgctaaggtgatgcccgtcgaactccgggggattgaggacaaggagcgaaggttgatccacgttcacgatggagaagaaggtgtccgacgggtcgtcgagcggttcgcggtcaacggaaaagagatcggagtggaggtcggagagggcgaggccgacttgccggtcgttgctgctgcttaagagtggaccaacgagtccaaagatatagatttttttaaaaaagagtgtaaagaaagagaaaaagtgttgttgcatgaatttctgttctctgaaggattctttacgatgcatgtccccatcaagtccaaacacacacacacacacacacacacacacccctgaacaaggttgaagaggtcaaaatttcattttgtttggagaataatagtacaacaatgtgaagtaagaaaagcaaggtagatagctaggtcacaagtttggagttttcccattcgttcttttcggattaagaggaaaacccagattggaagagagtttgaaggaagaccaatagagtcaaggtgggggtagcatgaagagatatgaagattgagctgattcagaaaaatatgaggatgaaaagactagagaggaaaagaaaaagataagaatgatagagagaagatagggatatagagcgagaattttttcaagttgctttgctcaagacaacatggttgaacagaagtaaatggatatatgtgtctggaaagaggaatggcaggcgatgaaataaaggcgtgcatgatgggcgattagaaaaggagacgaaagagaatgaggtgaaaaggaagaggggaaatatgttgaaaacatagtaaagaaatattaaggatgtggatgataaaaagggaccagccttcaatgagaggaagaaagggaaggtgttcggcctgctgcataacctcccaacttgagaaaacgttgtgaggagagagagaaggtcagatgagaagcaaagaccttggacaagtatttctaagcctcgatcgcgccttctcttctacctaaaactcccaaattctgtcctgctctctttcgaactctacgaagagtaatatttcgaaaatttcgtcagaaggcgcgtgtttgagaagtagaactaagaagaaaaggttgtatctacctgcttgcaaagttcttggaacccagctcatcgggtacatgtggtggtcctctcggctgtcggatcaccaccaccggtcccaatgaaacctgtccggcacctgcaactggccccccattctcgttcaaacccaaccgttgttcaatcaagtcaggcaccgaaggttggggagagggagagagaccgtctctcataagtgaaagaatctgttgatctcgtcgttgttgttgctgttgttgaagatggatttgctgttgttgttgttgctgctgcatatgaagatgttgaagatgttgttgttgttgttgctgctgagagttgaacccagcaaaggatgagacgccgtttgctccacctcctaacatccctgagtggtgaccaccggaaccgttgatcgaggggccacctgtgtttgcatgaagaggtgagggtgataatctgggagaaacagatgttggccttcctgttccgatgggtcctgactcccgctcaagcccgaaaccgaaaccaaagggagcacctcccgctccgttgttaactgacgagggaggtggaagaggaggagcactgcctccaccaccaccacccgcagatgacctcgcacgcaggttggcttgaatttgaagttgagcagcctggcgttgctcataagcagaggcaagttgttgaggtgtctgatactgatctctttgcaaccctcgatccgcttgagcgtatggatcaaaggcagtcactcgttgttggtgggcttgggcggaggaagggtaggcatttgaggtttgaggttgatacatcttaggagcctgatgctgaggcgtgatcgattgaccggaaagaagagcagctttttgggcctgggccacaagctgctgttgaagtttttgagtgtgctgtgagaacggaaccatcgatcagcattagcgtgtctggagcgagcatcttcgttgatcaagagaggaaagggaaaagactgacttgaagtctgagcaattgctccatccgagcttcaacctctctctggtgaatttgctgttgcatttgttgttgggccagcgcctgcagcaactggagttcagccagatttcgagtccccgctccgctaccgttcatctgtgctcccccagaattcatctggagcgtagcccagagaagatccgattgctgttgctgttgctgaagagtgttctggccagccgcgggctcggttctgttacctcttgaaggttgagtctggatgtttcggttgttgaaaccatcagcccctccttgcttgtttccaaatcctgcggtaagccgtccaccctgattggcgttttggaatgattgctgctgggcttgtctattagcaaatccgaacccggaagcatcaattcctgaagatccaggtctatgatctcctccagcgttcaaagcggccattttggcaaccatctcttcatcttcttcatcgtcatcaaacgatgggccgagtgtatgatcagatgatgagtaccgttgatttcgctgtgggacatggttgggaagtttggctccacccaaggtgtggtttccattgtggttagagttgttggaattagaaagaggaccattagaatgagaggttgaaggcactcggagttgtgcagagggagaacctgaagcagtacggaggttggcgaggtagaaagatcggggcggacctgccccgagggcattattgctaacgtcagaattattgttcatggagaccgggtaagacatgatcagatggataagcttcgttggttggtttaagatttgatgaaggacgaataaattcgattgccgtttgttatcgctgatgacgatggattgaagtgtttgtgagaatttgaggcaagaaaaattcactagtgtctacagtctgttgatagaggtcaagcatctgcgtgagtccttctgtgttctcttggatgatcttaatcatctaaggaggaccatcgacatgtgctactcacgtgctgcaagagggtcgatcaagaggaaatatatattcacgaaacgaatcacttttgggaatgtagattggacgaaggcaatgtcagttatgttccatctgaatgtgactctccttcctgcgatagacggaacacgacttcaagactgataggagagaagagagagaaacgcacgaagataacagtcgaaagatggacgaaagagaaaaacaaggacacggaaacaaaaggatgctgcaataggattgaacgtggacaaccgaggcgggtcacaggagccggatgttctgacgatgagttgagaagagaaccggttcgagataggattgttggttggttgcggtgcagaaatataggtaggcgggcgtacgtgagggaaacagtcgttaagttggagcaaggataggagaacaggaaagaatccggtgtgacttcttcggtgtcagatgaaagatagagaaagagtttgccgatcaaggagagttggacagggacaatgaagagacacgtatgggatagatggaaacaaaggaaaccgaaagaaaagcaaaagaagaaaggccgatgaggaaggaaaagatggttgttggggttcaaaaagaaagaaggtgaatgagaaagtgcgaccaagaagttacagcgaattttcctttaagattacacgtggcaaatttcgatctcatctgatgggcattctttccatcctagttgatcttcattacatcatgatcctctgcttatttcgtttacaacaacgccaactcggctctcttttctttcgttcgtccttgcttctcagattttcttggcctgatccttctatcaaggcttctcgtccagccaatccaggaactgcggagtgaagtatgtcaggatgatggtcgcacctggatacagaaatcacaagtagacagacagaatatagttcaagacatgagggtaagagatgtcagtatgagaccaatgaatgaagaggtagtggaagacgaaccagctcgaatgaacccatccatgcactcaaacgctgcgtccctcaaagcgtagacccccttgtctgccccggcgcacaccatcgcatactctccactaacctggtaacaggcgatagggtgatctggtgcaagttctgcggcagacgcgatgatgtccaggtaaggaagcgacggcttgaccatgatcatgtctgctccctcattgacgtctcggacctgaatgaatatgatagagaaaagggcagtcaggggtacgaacgctagatatggataaccatgaagtttaacacctacaatagctcgtcgagctagtcctcgtccaccagcagggagttggtagcactttcggtttccaaacgaaggtgctgatccagcagcctctctaaacacatatatcagggccatcaagatatcattcttagattgaaatgaggtatagtagcatctaaggtgcaagggagaaataaacagcagtcttaccggaaaggtccgtacatgcaactagcaaatttggccgaataactcatcagggcacacctgatccgatggaaataaacacatagtcgtcaggacccgaggtgcgcgcaaagacgttcgaagtatttataagaaactttggcagacctgttcgcaaggttgttggcgattaaagccttcttgatgaacttgattcgaccgtccatcatgtcgctaggcgcaacgcagtttgctccagctttcgcataagccaaagcgacttcggcaatcctataccaagttcaagccaaccccgttcacgatttatgattaaatgcatagtgccaaaccctatcatatatgacggagaagtttcaagatttgaaactcacctgggagcgctcttttcttggttgagcaaaccgtcttcgtcaagaattccacaatgaccgtgggatgtatactcacagagacagacgtcgcaagcaataaataactcgggaaagagagatcgaatcttgtgaatagctcggatcaccggagaatcaggcgactctgcattagatcctcgggggtcctatcagagtagtgaattaggccagaacagaagagcgtctgtaagcactggaaggaagaagaactctcgagatatatagagcctaccttgggctgagtctgagggactccgaagagaataactgagctcaggcctttcttgacgagaggacctaagaactggtggacgaggtattgagagaaaagaaaaagtagaaaaagaaaaagaggcggacgatatcaacctctcggtcagtcggatctgattcgtcgatagaatatagcttggagaacgagcaggcggacggacatcctagtatgtactggaaactcgaattccaactggtcatatattcccccatcgagaaggctaaacacttggaacgaaagactgaacggacctcttccaacctatcaataccccatcgcttctgaccaggaagggagctgatgacctgttcggcctgatcgtcgtcagagataaagatcggatacatgagcatctccttcgtcagtcgctttccctgggattgccatgatcgagagagcggatgagcgtatcctccttgaaggatcgatctaacatgaatcccaacatgacacatataagcatgccagtttccacaaacaagatgatagtttgcagcacgtacgagatttccatgttgaatgtcgtggtgggagtatctgtatccgatcagctcaagaagaacggaataagtgccgtctccgtccggaggatgtgtggttacgataagtaacattgattcaatcacgtgtgcaatcacgtgatgtggctacagccctcgactactgtttatccgacctctctcaacaaccgaaccggatgaaagctggaggacaggatggctgggataacagatgggatgaacatacatggtagaagtacacttgcacatccacctatccactcgcttgctgtgagccggtcagacaacaataacaacaccgtggaagaccaacgacacacaccttgagctctctgtcccagtctcattttcagttgtcgccgctttcgtgcacgttcttctttctttctttcttnnnnnnnnnntttttttggatacactctccttccagttttactaccattcgttcctttttctcttttgctttctgagccctacaaccttactctggaggagaaaacttcctttgcactttgaacaagatgctttccagcagccgacatggtcatcatccatcatcctctcctctgggtcctcgagcgacagcctatccgtccgcagaaggtccggtctctcctctgcttgccgcatcgagaggaaggccgtttaacccgttggatccggatcatctctccaggcaacgggaccaggacttggacagtgctcgagctatctgtgagtggtgttcttgactattttccaccatcaggatccaatgccttactcttcctactttcaagaaccccgacgaacatgtctggccggggttatgaccttccctttcttgatttagagactgaagctgatttaaatctgttccttctttcatgccttcttttctctctatttcttctccctatcaaacggaacccgtagaccgagctcgatcaaactcaatccacctatcgtccccacctctacatgctcaacagcctcgaacgtctccaacaatacatcctaacccagcgtcgcatcagccacgaaagtccctaaattctatacaccttccccaagcctacaatctgaacaatgattatgaccccacatcctttcctgcgctctccttctccgaacaagccgacgtgtccagagcaagaggtgatcgaagttatctttccgataacgaagtcatcatggagcatgaatctgaacaggatgccactcttagcgaggatgaccattctatccactctcaccacgacgtgaatgacgataccgaagaacatccctcgctgtcctataacagacgacgagcggatcgttcaaccggatcgtctagccctcccttgcttgacatcgatcatgaatctcaacttgaacaccttgaaagcccggcagaagatccccaaagacctcgtctgagaggtagtcagtttgatttctctattctcgaatcttgggccggacaagagaggtcaaagtttgtaactctctcggatcaacaagcacgtcagacagccgaacaagcggcttccactcctatcgctgatgtcaaagaaggtatcggaggagaagtcctgatcgaccttcgagattacccagccgggtcgaagcacgatatgaccgatttgacgaacctagagactaatccaaaggaagcatccgttcaacaggattctccgctatcagaaaagcttccgatgaacgagcctggggggttctcgacccggcgtcaacggcgggtggcatctttagataacaagacatccagaagacagggcaagctcgcaatgttcgaaggtgctggcgccggtgatggagcatttgcctcaccatctttcaaccgctctgctcctaattcttccaccatcagtttagtacctcccatgactcattcggtttatcctcaactagacgcacatgaaaactttaccgaaagccaaacctccactcccttacagcctgttcccccgtcacttcctttcccgactcccctttactccgatactgaaactcaagagcgacccttcaggttttcattctactctaacgctcttcccgcgacgatccatgctcgatcactttacgagctcccggcagaggggcagacctttgaggatctctttggaggaagatctggatcggacaagccaaacatggccgctgcggctgccaccgatttcggcactcaaccttctttgagtggaacgacgacgcccagaagtttcgacagatcgaaggcacactcaacaggttctttctcaggtctgactggaaacggagctcatcacagtttactcggtcgagcggttgagaacgcaagggatcctactgggcaaacctatgcgaatactcaggcaggtacaacgaatggcggaatggggtccgccagattggatgatgtggaggcaacaacttggtggctagatgtgacttgtcctacagatcaggagatgagaatgttgagcaaggtcagtcaaggttgaggtttttgaaaagaatttcaatcctctagccagataaagaagctcacgcgtaactctgccattgataccaggtgtttggccttcatccgctgaccactgaagacattcagttggaagaaactcgagaaaagatagagctctttaggaattactacttagtctgtttcagaagtttcgtctcggacgtgtacagtccgacccacttggcgccgttgaacatgtacatcgttgtcttcagagagggtgttctctctgtaagtgaagctatcacgtaatcattgatctttactaggttgaactcactctagatgtttctttctaatttcagttccacttcagagaaactcctcacccgcaaaacgtccgtcgacgaattgcatctctcaaagactatatctctgtcacgtcagactggatctcgtatgcactcatcgacgatatcaccgatgcgtttggaccgttgattcagagtatagaatacgaggttgattcagttgatgaggtgtgtttgttctacatgtttcaatatatcagtaaagtagaaaagaatactaacgttgactttgttgtatttgttatagttggtgttaatcatgacagaggaggagcagagtgatatgctccgacggtcagccttgatttccacactcttcttatgtctattgttcaaagacctctagagaatgctaactagacaatgaggtgttgtcacataacagaattggcacttgccgaaagaaagtgatgggtcttctcaggcttatgggaaacaaagcagacgtagtcaaaggtcttgccaaacgatgtaatgaaaactggtctgcacccttctttcctccgaatctttctgagcagagatgtttctgatgctgaaccatcgtttgtgtacacgttgaacgggatcttttgtaggagtgtagcccctagatcagatatcggactttatttgtcagacattcaggtttgctcgtcctgactagaaaacttagaaccctccgcttctgtgttgatgtgcctgacgggtctgtcttgccttgattcaatctaggatcacctgataaccatggtgtcttctcttaaccattgtacgtagtaccaatatctctggtttccttctgaaagtttagttattgataaagtcaacacaatcatagtcgagaagattttatcgagatcacactcaaattatctcgctcagatatctatcgaaatgacaggtggatcacgttctttctcactcaacactctctcaggatcactcatagccactgctctcttattcgtaacgaacgctgggtggacagacgcaaacaaccagatgaatgacgtgttgagtcggatgactgctataggaactatcctcatgtacgctctcctccgcttttctccttttcctaagttcccttctgatcaatactttttgtaacgttctgtacatacgaacggaatacaaacgcgcggaacgacatatttagcccaatgaatttggtcacaggaatgtgggggatgaatgttcatgtaccagggaagaacgtacaaaatctaggctggttctttggtatcgtcgtaagctgatcccatcatttcaaccttcgtgcccaatcaacgagatcggtctttttaatccatcatgactgaccatattcactctttttgcttgtaaaacgtcttcgttacaaagggtatgctcgtggccttcggcggtgtaggcgcgatcgtcgcatataggatcttcaaatactcacaataacttggcaaattcctgctttttctctgctttcctatccgcatcttgcaaacgtgtccaaccatccatcacaaatatatatctctatcctactctaaccttcagaaagggttttcttgaacatacttgttctctgttatcccaattaaaataaagtaataactgttctttcccttctatctggtgggtcaaaaatcagttgaagatatcattgtactctagcgcatggatcattttcgttccgacctcaaacacctgtagttctcccaatcaatgatccggtattgtcgatgccaatgttcagaaggattcaaaacgatcagagtagagatggttctatacgcgaagttaatgttgatgccaaggttgatatatagagaacacaaattttataacatagagttagttttacagagttgaaggagaagaccaaacgactacaggttcatcctcgagtctatgaggatgtagatatgccagaacacaataagatgtgggagttgacagagataatataggtgagaaaacctttgagatgtctaaccgaaacgggcgagaaggaaagtcgaaagaacgtactttttcagctcccgaccacctcatcacagattcaaagacaaacaacgcagatgctaatgcaaaaatcatcaaaccatggtcaagttcggtcaacacagagtgagagtatgcgccagaattatcgaacactttcggtgaacgaaaccgagatagtaggaaacgactaaccattcgtcgggaaagctcgaagtacgacaggcacaaaccctctgtaaaatcctttgaaaccggcctcggcataaatcgctctgacgacggacaagactccggtgtatctaggttttgtgatcgagtccgtcatcattctgtttttgacattatcagctttatgattattgaaagttgaacacagacggtcagctcaatttttgatacttcaaggtagaacttgtattcaagaaggaaggtgtataacggagaagatgaaagcataagaaacataccgggtagagctcctagccagaaagcattggctcccatgccaccagcaataaacgtctgggttgggatcgaaagcgcatacggcgtgttgtccaaaagtgagaacaggcgcatgttgagttcataaccaccgaacatgaatgcgaaatttctatttagagcattttggcatttccgaagttatgaggatagattatgctttagaaagagagcatgaagcaacaaaaacgggcgagactgatttgttaccacagataagtgatgcagaagaggacgaacgatctaaacgccagtgttgctccaaaacctctccaaagcccttgaaagccttgctctctgacaacctggcgagcacagtctatgggacctgagaattgtactacaggaggcttaggagacgtagttgaggcgtgattggtgcgcgagctgtgatgggtgtttgctgcagcgagttggagttgaagtttacctttgaacagaaaagaacagtgaaactaattagagacttgctcgtatgtctagaacagtcggatgaagggatttcttgaagtggtaagaagttgtgcctacccttgaggagctctataggatgggcgaaaacagcactataaatatggaaatgagaagctcagcgatcgtcaattgaaaaaaaatctcttcaacagacgatatgatcttctcaaaaaatgcgtcggaaacgtgtgactcactttgtccaacctgccccgataccagctacggcatgacctaaaagactcaaccgcttctcgtctttttcttccactgtcagggaaggagttgtctctgcaaacccatgacttaacagtaggattcggtagttgtgtaaactaaatgaaaacggaaacgattatagaaagagaacgccacgcgttaaacttgacattgaagcagtagatatagcaaaggaaactgtaccttccgagcagaacgctatccgtgatagcccatcccacagcctgatatcgggtatcatgctcaaggtttagtatacgtatgtctgatgttaaaactttgattaagcggtacgcgaaggataatcttactggaggactagcgcctttataaagggccagaggtccctataaacgatacgtctatgagcttcgcgcatttttttttctaacaaacgataaattaaacacacttcacgtcttattgtagtcaagaagcaatcggtggctcctttgtatgtccctacatcgagtatcagaagtgaaacttttggtcattagtatgctctggttggtcaaaagaacgaggatcagagtttaccaataggaacacattgcac

SEQ ID NO: 1323 - DNA, 21944 bp, Xanthophyllomyces dendrorhous
  misc_feature (19033)..(19042): n is a, c, g, or t
acattgcactggatggtagacgtattccaatagttgtcagctttcgtctaacgaagggaaacactttgcctgtatcgagaggaaaatagttctgtaactcactcctggttttaatggtgtcaaacctggtgttcgatcaagatgtgatattcggcgaatcagccatttatggtcatgagatggataagaattgaaaacgtatacacatacgggtgtccgactgctagctttgtgaggcctaatctcgcaaaagagaggagagaaacccaagtgaaacaaagaagaggaaggagaatagagggaacacgagcacgtatatgagtccttttcgtctactttttgttccttctctaatccaaagtcgcaaagaagagagtcagagcgtaccagagcaggttcccgccaagaagccaatcagtcgaacactgtttgaggaatctgcatcggacgacatggtctgccaaagctatgaggcgttgcaattaattacggagggagccagctgggatgagacaaaagtttagataacgtatgggtgttttatgggactttgtatggggaaatctggggtacactccccatagactggactacctccctccatatcattcttgcttatgagaaagctctcttgctctgcttcgtacttgacttcagtcatagatcctcaacatcgataccttaatctggatctccatctctccgatcttatccctattcatatgagtcgcgtaagaaacgatggagtagagagtacgtttcttggtctcctgtagcacgcgaatctttctcttcacatcaacaggacgacgcgtcagaaagccaagctgatttgtattgccttgtttgatcagactggttcgtcgaagagggaccgtcgaaccgaatgattcttgcccttcgctcctttatccctgaagaagccgactggagcttacagcgtcttctccgagcttcctcagatcataacgaccgtttcgttcttgataaatggcatgcttcggttgatactcttttgttatggcctcgggaactcttcgagatcgttggtcgcgactcgccggctcaggcagtagctaaagggagcgctctctgggatttcgaacgatccaaccagaaagaccttcatagaagagctatagagagcttgttggtgattcgtaatgcaggactcaacgacccagccaacggaaaactattgtcgacaagtttaaaactacaacgatttctgctcgagttcctctctggagtcgaagtagagctcctcatagatcaactagctgaagtgcttatacttctccttgatatcttacacaacatgtttatatcttcttcgctcgacatctcttccattcaagagaatttcgtcaccgaactgcccctagttctagttcagttgctgcaatccaaagatcgggcaatcctcattgcaacccttcgtgtagccctggcattatccagtcctaatccagccgacccaacagccgacccgctccttcatttttcgtctgttttcattcaagcctccatcaaaatgtcgctgtctcttcttttactcccgccgtcatctggccagaatatttcgcttcgatctcttgcactcgacatactctacacacatacaagcgacccaactcatgcagcaggggttctcaaacgaaaagatattggaccggtgtcaaaaatagtagcaaaaggattattcgaaggatctgaaaagaaggaaactccgttcatcctggccggtggtggacgaggaaccgagacgggcgaagcatgggaaggcgcgccgccaggaagaggcgagctcgatcagatggcgggaatggcagagccattaagatcaacctactggttcggctcttcgttcaatactttcaaaatattctattcgcaatcttgctgttaactgtctttgtgcatgtttatgtcttcgcatctcaacaggatgcaacgaacattccttcctgcccccaagtcatatgtacctcagacacagttctggcaactctacagagaagctttctctcagccctacctccaacagaacggagtaccaccattgttgacggcgacagagctcatcaacaatgtgtctttcgtgtttccaggagctcaggcatctttgcatgaaaacacattcgtgatgaaggggatgaaagttcgtagcggcagaagtggttcgttttctattctctaattatatgcatggtctaatcccgtggtgaatctggtctctaatattcaacctttatttcgttcgcagttccttctgtcggacagctccatatgtcgacgtacgaaacactccagacgtctctcaacccaacaaccaagtcgcccacaggaacgtctttcacttgcgcgctcatcttgcggaacctctcccgggcgttagttgagctgcttgatgcggacagcgaaaggcaaaacgaccagaaaaagaaagttcagtcgggcgagttgttcggtctgccaatccctgatgatattctatcaggaagtcaatctcaggacgggccagatggagtagccgagtcgatgatatcatctggtttgacaaaagaagaagaaaagagggctgtagcggccgtcttggctgtggaggacgtggtgttggaatgggttatgaaaggaggggatacgttggacgtctggctcagtgaggtttgtctgcacagcatgttatcctcatctaaatggtttctttgtgaccttccttctgactcattcctcctcattgatcttctatcgttcgtttggcaggtgttgagatcgatcacgctgttgagcgcatgattgtcatctcttgtaattcttcatgataaacatatataacgataattttaattggtctagtgattcagcctgaacgggtctgtttttttggggcgtacttgcccccaaggttgacctttgggtaacctgtcagtcgtttaatgagaatttgtttcaccaggagaataggaaggaaagtagcttggcttgtcagatgagcggaacgtcgaacatctttcacagaagaaggacaggcacgaacgattggtctaggggtagtaacccgtcattttcatagatgactctgctcacgtctaccgctggaattccttgacatcttccagaagagagtttcatcggccattttcaagacaagatagcaggaaacagaaggcgataggaatactatgagcctctaatcagacggttggacaatttgatcgatcactcactttcgaaagatccgagggagagggtagcaagtgacggtgccacctttgagacgttcgccagtggtcggatgatagttgaagtgaggttgacaagcatattgaacgatatcgtagagcggacagcggggcaagctttcttgagatgattttggtgtagatgaggtggatgatactgaatttgctgattgaccttcacgtgttgagtccgtcatcttgaccgctgattgggatgggtgtatgcggtatgtgtgaacgcgactagaatgaatggttctattaagatatcttttcgaaacattagaaaactttgttgaattatctattcaaaatatttcctagccattagataattttccgctcgaatccggtgagcttcttcgaaagaggaccaaccatccgatgaacccaacagaaactgggtctactctgcactacactcaagaaaccatgcctaaagtcaacaccccgtctgttcctctgaatggtctctttggagtcaataaaccgtccggcccgacatctatgagtatcctcgagtctctcaaaaagatcttccgaacctcaccgctctttatagatcctaatcctcctaatccggcaaataagatcggccggaaggccctcaaagcaggtccagtcaagatgggccaaggtggaacattggacccgctcgcagatggagtcctaggttcgttgcttttccttcctagtaactcatgcacaagagaagtaagaggaagctcatgatcgttcgtttgctcttgaacgacttgtctcggttggggtatctacctgcataaagtggtcgcgacgggtcggggaacgaagcagcttgctcggttcttagattgcacaaaggtatcatcgttcatgttttcctagtcactggattggataggcacgattctgatacacgaatacgtgtgtcttctacaggaatacaggaccgtcggacttttgggatgcgcaactgattcggctgattctcaaggagccatagttggtaccgcgccgtgagtctagtccgtctttacttctgtcaagcgtagccaattcgtttctttcatatgtgattacttgtatgatcatcccgctaatctagtggcctgagtctagttggaaacacatcactcgacaagatgttgaaaatatcctagagaaatttagaggagagatttatcagattccgccagtgtatgttcttacttcagattatatgcttctactttgtaatttgttttcgaatatggctgaaaatcatcgatttctgatctggtgctttcagctactctgccctaaagatggacggcaagccgttgtacgagtacgctcggtcaaacactccattgccccgaccgatcgagcctcgaaaagtgatagtgcacgagctagtgttggagtcgtgggatgatgctgcaacatcggaagatggagagggtcaccacttccaatggccgacagaagtaatgagcgctgaagacaaactgatatttgacaaaagcaagaaggtagcgttgtagtttcgttccttttgtgatctcccagtcttcctaggaactgacttcactgtttctgcgacaaacacgatagctcgtcgaagatgccgagaaaacagacgcgcctccttcctcaacagatctcatgtcatctgaacccaccttgacgtccacggatgaaaccgtatccaccgacccgcgcacggttcctccgacattcacgctccgaatgactgtatccggtggaacatacgtccgttcgctcgtcaatgacatcggcgcagcccttggctcgctagctcatttggtggttcttacacggacgagacagggtgaattcagtctagaaggcgacaagtgtatcccttggtctgtgttcgaagcggctgccgcggaagaacagcaaaagtacttggaggcaaaggctagaggagaggtcggtaaaggatcgagcacaaacgcaaagaaggggaaaggaaatgggggaggaaactcgtcaaccaatcaggaagaagaagaggaggaggcaatggctaactcccttcctgttactcaaaaggaagaaaaggaggaaaagaaagagcctatagagctccaggcatgggagaagtatcttttggagaggtttgaatccgtataacaagaacgactgctcaatcacgatcacacctaggattcaacctataccgatctgaatctggcatcagctgtcatatgacctgtcagccttgtctatagagaacagaatagatccagacagaaaatccttctaagcgcaacaaattcatattgtcatttttatttcttaacaaatagacgtgacaaagacgttgatatgagaagctaagaagaactgaagcaaacagatatgcaagcagaccaaatgaattaaacgacgaagggcaaacatcgatgatacagataaacgaacttgacgcccacggaaaatgttcgaatagctaacagagccagtatacagtacatccaagacagctgtgttagaagaaaggaaccaagaagatgaacatggggttgagtttgaagatcaattctaattgaggaatccacggcatttcggacttccacacaagcagacaatctgttccgaaattgaacggaattgtaagagccctttctaaaatttgaacaagatacgagacagtatggtagaagcagacgacgtactttttcttgttcaatgggaaagtggtaatcataagttatctcatccccggcttcgatattgatctttgcgtaaatgacaatctttttctaaaagtcaagcaaaaagggacaaaaaagcatgttaatacatatgcataaatgggagatcgaggaaagtagacgatacgaacttcgccgttgatggtgatgattttggcggtacagtttggggtacaactaaggcaaggaaacaatgaagtcataagatttcgcaaacatcagctatacatatatatatgtggagtcgttggataccaagcataccaatgattgatgagccgtctatttgtgataataaagcaaattgggattggttcgatgagtacaccttgtgagaacttatacaggaaaatcggatatttgaacgatgactgacccaagattccctttcttcgtagcgtccaccacgctctcatcgtcgatcctgaacagataactgctcccgattccgattcgctcatagtatttctctctcttgtccgctacggcggctctgataacctctccaacatactcgataaccatctcctgggccgggatgaactccatagcgtagagaccccaatcgtggataggagatttcgagaacttgagctgtttcttccgagttcgcaactgattgaatttgaggatatcggtgtcgctcgctgctgcttttcggttctgttcgataccgagtacaagccgacgagtagcgactcgagcagatcgaccggtagagatcgcagcggccggttcaacagcagatgattcggccgaggtcgctttgttccgctgaggaagatacatcgacttttcgagctctgaaatttttcggtaaccttccgttcgagtacaacttttctccggaagctcgtcgtctatatcctctgcattcgatagagttgtaatctttgctgacgtgtcatattgagatgcctgctcgtccacggccgcttcagaaacttttcgagctctatcggccatcaacttgagcaaatacagatcttcgttgtcttcgaccacacctgcctggaagagatcgacatccttatacttttttggaggtcgttcgggtttcttcttgggcgcccgcttgcgagaaggcgctgttggtggggcaagtgcatctgaggtatcaggttgcgaatgagcgatcagactgggttcttgaagagcagagagtgaatcgagaggcgaaggggaatctatctgaacagaaagaggagctggggtgggttcttcgagcggcgcaagctcaggaatattgattgaatccaggacgggactgataggcaaggcagaaggtagtacctgtgcctgatcaggctccgttttcttcttcttcggtcgagatacaatcgccttcctaggcttgggaggctttttctcgacaaccggtagatcaagttcttcctctccttcatcatcatcggtgtccgagaagtcaaatcgtgattgcctcgatttagttctgggtgaacgagagttctcgtcctcttcgttttgctcatcttcatcttcttcatcttccgattctgcctctccgttttctcgtttgccatccatctcgtcatcctctgactcaaaatcaggcttgagctctaacttccgtctcttctttttcctctcctcatcccttgcatctcgagcatgtgcacgagctttctcacgggcctcggagtatgctgtctgattcggtctgtcgtctttgaagccctgtagaccccaggtacttattgtccgctggccttttcgttcctcccccgagtgttttcgatcgtctgccgaaggtcttctcggctcgaatgaaggccatgggtcatctctggaggtccagccatctccaggttctcttcgagaagcatatcttgtcgtgtcggaaggatagcttcctgatgagtttcttcctcgctcgtattgtgtatcccggccgagcgcaggccgagagggtcgatatgaaatgtctctatgatggttgatcgctttgggttgcggtaagcttggcaggccaggcagatggcttggtcgcgaggaggtgtgagcatccggataagcactagatggcgggagaagagggctatgagtcgaaggagaatacggatatgaatggagtcctttgaaagggagagagattgcgcctggcggagcggtcggtagtgagccagtggtcggtggaggaaggaaaggaggtttcagtgcttcgagtcgtttttgttcggtccgctcagcttccaagcggagtctctcttttctctcggcatctcgacgttctttggcgatcttgactttggtaaagtgttcgtccacggctttgtctgccagctttccttcgccgtcgagaaccagagtaagggttccttctgaggaatggaagcccaagcgagacccattgaaccggttaaccatgctgacagccaggtcgtgtgcactgttgtcagttttcgaactggcaaacttgatccaacatattcctaattgtgtggagcatatagaaaacgaagcatgagcgcgcattcgaaacacgagcagaatgaatatatgttcaaaaagagagtaaaatagatctgagcacacagagggagaaaaggagaggacagaccgagatatgatgatgttaagggatcaactttcatactgaattcttggattcgaccataagacccaaagaaggctcggacagtgtctgatgtcgtcaaggtggaaagtccggtgataaggatagcacaagcaggcggaggcggtggtttgcctctcgaactttcgtcccactgttcggaaagatttcagaacaaaggccgtgagtgtctgagatacttcaactagtctgacgaggatagaatcaatcgactaaatgtatggactgacctcgaaatgaactggatacagcctctcacgcaatttggctgagcctttaccacgacgtaccgtggtcttgtcaaccttcagtcgaggatcagtcgggattatctttgtttctccaggcttcatttgaccctcgtaccgaagaacgacttcatttcctttcttgagtcgaacatcattactgctcgttggcggcaaggccgggtcgtaaaccgttttccaagcacgttctaattttctgggtagaggaagaggagcaggtggtggtgatggtgatggtggtcgtggtggtgaaggacggacctgttctacttgaggtcgagacaagaatggcggagaaggcgaccgtcgtttgaacgatgatgaatctgaatgtccttttgtttgaggctcggcagataaatatgatgatgatgatgacgatgatgatgacgatgacgaggttataggtctgaaagatgatatgaagcccgaaggaggcctggcgacccggtctgctgggtcaggtggtagctgcttgatcgctggtccgaatctagatacatgaggctttttggaggaggaagcagatgaagaaacgaagggagcacgacttcgactgaggtcagaagacgacggtagtggctctgattcgaccgctttggcaacaagacgcgacgacgcgtgggtcgaggatttggagggaggtaaaggagaagcttcacctgatggcgaaagaggcgcgtgtgaaggtctgtcaactggtcgaacgtagggagaggggtcgtacgaccttgagaacgaatctgacgagctggaagagctattccaagatgaatgagatcgggacgacgcgcgatcactgtgggtcaaagagaaaagtgatcagaaacaatgagtggatgttgctcatatgagcctttgaggagaaggaagaagagaaagaacagaaagaacagactgacgaggcgtaggatgactgtgacggtctcctgtcttgggacgtgtaactccttgaactcgagtaactcgatctcccactcatcctttgatgactgtagaggaggaagagagaacaagagggttggagagatctgctgaagagaccgaggaaaagatggtgggatgtgggaaggaaaagaggacacaaccgagcgggaaagagacaatcttcgagcgagggtgttttggctttgttcttttttgctttgttttgtctaccttctctgtctttcactatgttctttctgtctctcttctccttgttactgtgttctcaacgtactaacggcagagaacaatgtcttttcttcccttcatcttgccatactctgtatcaacaacagatcgatggcaaccccattggttaaactggagaaggccactcggttgtttgcttcgatattggaggtctgccctgccaaagcataaccctaacaaccatgtattcagagaactctctattcgcttactacaaacatttcctagtgtttgtgctaatccattagagtaagtaccgggacaatacttaaaactttcgtttaaccttctctcagtcttgaatcgtccaactttagttgacctcagttcgattcaaaatccactgggcttaatcaaagataatggccctcgcttctgctccttcattcgcaggaaagtggtcctcgttaaaacagcctctcacatcatgggtgtcagtcttgctttctcctctgcgttcgttccgtccgatgtatcctttcaatcatcccagggctaacagtcttgttcttcacgatcttaggtcacaacgtatacaggatcttcattatgaacaaatgacccctgtccaagcatccgtcatccctatctttatggggaataaggacgtcgtagttgaggttcgttcgtttcttctttccctcggaaacaggtcgccggatgctaattctgaggaacgaacaccgtttaggcggtcaccggctctggcaagacgctcgccttcgtgttgcctatcatcgaacgtctccttcgtcgtcaggcagaaacaccctatcagaaaggtcaactcggcgcactcatcatctcacctacaagagagcttgcctctcagatccatgctgtcttttctctgtttctcacccctcctccggctccgtcgtctagcttgacagacggaacagatagctcgtcagagccctgtccgctccctccgccgctcttactcatctcaagcaaagaaagtactccggcccaggacctcgctaggttcttggataccgaggcagtaatcgcgatcggtacacctggtcgagtagaagagttccttctaggtagacgagtgaagggcctggtcagatgttccgagttggaagtcctcgttatggacgaggccgataggtatgctatcaatcataaagatatgcgcttgaacttagtcggcctagccatttattgaccacccttatgctcttacaacacttagacttcttgacttaggattctcacccacactcaccaagatccttcaccatctgcccaagcaacgtcggaccggtctgttctccgcaaccatgaccgaaggcttgtccgagcttgtgcgtgtgggacttcgaaatcccgtccggatcgttgttaaagtggagtccagaagacgagcccttccgtccgcgtcgggtgagccgtccggtcaacagactagggagcgccgaacgccggcgagtcttaagaacatgtacctcgcttgcaagccgggtcagaagatggagaccttgatacggatcttggagaaggagcgggccaaggctatgaacggcgttggactcgaagagcctgatggtcaatcagaagagctcgttgaaggcgagggagcttgcaagtttatcgtctacatggcgacatgtgcagctgtcgattacttttatagagtcagtcgttcattttccctcgtacggatgcttcccaaaactaatcacttggaatcataacttggatatgatttacttcattgtcttttgatctctcaggttctatcgaaacatccctctctcaagaagttcactctgttctccctacatggtcatctcccgcctgcatcacgaacgacgactctagattcgttctctacccaaacctctacgccactttcgccatccgtcctgctctgcacagatgtcgctgctcgagggctcgacctgcccgacgttgatatggtcatccagtacgaccctccggttgaccccaagaacttttctcatcgagctggtcgaacggctagagcaggccgaaagggacgtgcattgattctattgggcgaaggacgggaggaggattatgtcgagttcttaaacttgcgaaaaatcccgttacagccttaccctcaatcaacaccatctcttgctgcttcctcttcttccaccaacatcccggccgagacctccccgagtctcctcgcccttcgatccatcctaatgcaagaccgagatttacacgatcgttcactcaaagcatttgtctctttcttgcgggcgtactcaaaacacgaagcagcgttcatcttccggattggagacctcgacttgggtgggcttgccacagatttcggcctgttgcgaatgccaggtggtccggaggtcaagctgtggagaaagaaagtggagagtctaaaggagaaagagccttcagacggggtggtacaccctgttgattggaaggacgcagtcgtcgacgtgagttatgtctcgacctctccgttgctctgaatgtcacatagtcaatactaactccgcattcatttgttcttcaagtgggacgcctactcctatgcatccaaacctagagaaactcagcgattgactgaactggaagaagcaaagaagaaccctccgaaaccgaaggtcgtccgtccgagctcgacaccggctgtagcttggtccaacaagctctcgtcgaagacagaaaaagaggctagaaaggaaaagaaggcattgaagcgagcgagagagaagcaagcggcagtcgaggagaaaaacagccaccaagataaagatggagagggccaagtcgacgccgaagagaaggacgatagcgacgggagtgaggaggaagtacaagactggaaggaattagttagagaaactaagcgtaggaagcaagatgagagaaaagccaaagagaaggatatgggaggaatggatttcacagatctatgatcagttgcccccagcattcgaaacacctcccgctatgtcgaatgcatacttgagtccatataaatatcagaccagaaggccacgaccattctggcagagggaatatagagaggacaagagacaatagtgatttatgattatttcaccaatgtcggtcgttactaaccaatgtcgagtttcatcatcgacgaccaaccgtgggctcatttgctcttctaattcaaccgaaaagcaagtcgctattcaagcatcaaaccatctggttcaatatcgttccacagtttctcttttattgcacgtctccctagttctattcttagatgattaaaggccttcttgatcttcagtcggccgctcgaggaggtgctctcatcttcaaaaaaggtcttcgtcttcaaggaagcgatctggcagcaacgcttaccgctgctcgaatcaccagcctcaaagctactcgaccatctacgatctacgaggaacctccttcggtctctacactgcactcttcaaatctcactccaacacatatcagatctactcttgaccaggaggtcacagcgaccccacagatatccggagcctctgccttgagcgatctctatgcgtcggaaggtagcttggaccgatcaaagatcgattcaaacagaccttcttttgcccttcctcgttcttttgggttggacagtcattcacccgtcttgtcttctaaggtttctgctcctacaacatctgtggcgaaaccgacggaatctgtggaagggacgcttcagccgccccaaaatagtgtttcctccccgctgcaaacttcggagacatcagtgtcgttgtcatcggaacccaaacttgcaacaacgtcaacagaatctgtatctcaaccgatcatatctgagaacactaccaagccaacagcttctactgtcgaggaggtgcttagttcggatgttgttctgaatatcaaccagcttcctgaagctgtgaaggaagaagtgcgagcattcttctccgcttcaccgtaattttaactcactgatgatggatgttcctttgtacttttcagcttgttccagttctcaaggcctctcgggtgccatcctcacgaattggtcgattgtttcattacggatctctggcaacttctctgacatggggagctgcttcggaagctgtccgaagaacgaccggaacatcctcgtctactcagcagtcagttttcctctcggaagcaaacatcgagcgtctagtggacaagctaggaagaatgaggggtgcggcgctcaagttgggccagtttttgagtattcaggagtcgggcaccttacctgaggcattggagcaggtcttgcgtcgggtacaggcgggtgcggattacatgcctgattggcagatgcgagtgagtcttattcaattgattccgatgactctgaagttctgggttcgcatgtgtttcatttcaacgatgaattcatctgaacctgtcggtctgtttggtggtgcagaaagtgatgtctgctgagctgggagccgattgggaagagaaattccagaccttttcacccgttcccatcgcgtctgcctctattggccaagtacacctcggtactgtctccgcgccttattcacctccttcgtctcctgaagacttcaaggtcgctgtgaagattcagtttcctggggtagcctcctccatcgcttctgatctatctaacatagggcttctcctgaagacatccgctatacttcctaagggtctgttcctcggcagcacgatgaaagtgatgaagggagagttggaggatgagtgtgattatgtccgagaggctcaatgcgtgaaaaattttggcgagctgattgagaaagatggagagaagtcactattcaaagtcccaaggatcgtggatgccttgagctcggacagagtgctgacgatggaatttatggaaggaaagccgatcagtcaggtcaaggggcttagccaagagatgagggataaggtaggtacctgttgtcatttgttacatgaccaagtgaatgtctaatctttactcgctttgtcggtgttcttttttggtaacgatagattgggtccagtatcctttcgttatgccttcgagagcttttcgagttcaggcttatgcagaccgacccgaactactccaacttcttgtggaatgaaaagacccaacaggtcagtaatttccgtgtgctcatgatgttgcccttgtcatgcgcaacgtgtgttttatgtgaatgttcattgatcttgtcgaaactatacgtgtttatccattcatctatagatcgagttgatcgactttggagcgaccagagaatactcgaaggagtttatggacaactggttctgtcttctccgcgcagctgtctcgggggacaaagcagagatggaaaaatacagcttgaggttgaaatatctgacgggagaggaggaacctgtcagtttgttcactacatctgcaagttcaccatcgtttggtgtatggctagctaacttttgcgtgctatctctaggaaatgctttcggcccatctggagtcaatgtctcttgtagcttgtatgtattgtgtttttatagaagaacacgggcaggcatacatctgacactccttattgcttggttaatctttcgatcgatcttacagctcccttccgacgcacgacttcaggaacggacctgtttgattttacccaccaaacgattgctgaacaggtatgtcttggctgtattcgcactcgaaaaaatcttttgccatcattcgcgatctatacctcactgagttttgtcttgccgtatcatgtgccgatgattcaggtcaaagctcatattcccacgatgcttcgtcatcggttgactccgcctcctccagagacgtattcgttgaatcggaagctgagtggggcgttcttgttatgtaccaagctgaaagccaaggtgccttgtgcagaactgtgggaagaagttgagcgaagctaccaaatatgaaatgatagaagcggtcgctctgaactgacataaagtcatcgagcattcacatggatatccggacatgcgtgaagtggttacgttcgatcggaccagccgttttttcctcttgtctacctggttacaaaacgaaagctcgataagctgtgcgcaaagtagtctgcggacgtggcgagagtggggaacggggtcgcgcgtagccagaagcaaggaaagcgggcaaagggaaagaaccaaacccatctcagcctgtctttctctcctctcttctccacatcgttctctccttctcccttgtccatccttccaagtgagtgtctcttcttgatggttgaaagtcgtctgagcttttcacttttcgttatggccatcaggactttctttctctctttcaagtgtctttttttcttgacaaagaaaagaaagaagagagaaaaaaaaacaaagaatcgagggaaaaggaagaaagagacagggatggaaaaaagggtttagaccgaaggcaaggccggctttagtggagtgcagattagggtcctcacactcagactcctaggctcccatacaatagtaccaacgggctcgcgtcctatattcgggcccaagaagtctcatcaaccaaagcacgagatggatctatcaaaccccatcagtcaaaaaaaaacaaaaccaactatctgcatctgttttttcccttgttgttctttatctcccttctttccttgtgtctcgtttctttccctggggatcaaggaagaatcgatacatgtccacaggattaggggttttaaccttctgtgtatcatccttgataatctactgacacaaatactgatctgtgtatatgttttttcttcttcttttcttttgtgcatctttagcctatctttctttccttcatccactttctcatcacacagtgagtataaccctcccgatcaatcatacctctctattgtaatcaatattcctcatccaggttgaagatggagtcatagattggaatacttcctgggtgaatggcttgaggtgcaggcatcgtcagatagtcgatggccatctgagggagagtagccgactgcgaggtcagacggatgaagttccattcatcaagagcctttgatccaatcagctaagggccatcccctccgtgcaacaaaaaaacgcattcatgtccttgtgccttttcactatcacccaatgagttccttacgactgggacgatccttggtcttttcgaacattgctcatgctgattctcatccgatttgtttatcaatccagatgtccgagtcccgagagtccaacgtctaccttgctaagcttgccgagcaggccgagcgatacgagggtttgttctttccttcttttcctcttggttttgtgtgtttatatctaccttgagcccctgggagctgaccgcgtgcttgtccttctgttttctcttctcctcgcagagatggtcgagcacatgaagcgagttgcttctaccgaccaggagctcactgttgaggagcgaaatctcctctccgttgccttcaagaacgttgtaagtcatatatcactacctttcataccctgaaaactctacgcatagaccgatcttgaccgttataatcttgttctattagattggtgctcgacgagcttcctggcgaattgtttccagcatcgagcagaaggaggagagcaagggaaacgacacccaggtcaccatgatccgaacgtacagggagaagatcgagactgagctcgccaagatctgtgaggacatccttgaggtatgtgactttccatcaagcttgcttcctttttcacttctctaggtactatcatatgaatcccttactaatctacacgcgctgaacatgtaggtccttgagaagcacctcattccttctgccgcctctggcgagtccaaggtcttctaccacaagatgtatgtacctttttcgaacaggttttcttttgcccgttctactggaggacttcgtcgctcatcttatcaatatctgttttgatacttaggatgggagattaccaccgataccttgccgagttcgccgctggtgacaagcgtaagacttctgctgataagtctctcgaggcttacaaggctgcttccgacgttgctatgaccgaacttcctcctacccaccccatccgactgggtcttgctcttaacttctcggtgttctactacgagatcctcaactcccgtacgtcccagaatacatgatatagaaaaatcacaagaacttgttgggcttacacgctctcacatcctctttcacctgtcccttagccgatcgagcttgccaccttgccaagcaggctttcgatgacgctatcgccgagctcgacaccctttctgaagagagctacaaggactcgactttgatcatgcagcttcttcgagacaacctcaccctttggtacgctcgatttatttgaccactgtatttagaacggcagcgcgaatgtgtggctcacgagcatatacttgtattctactcatcaatcttaacaggacctctgacatgcaggagtcggagtcaaaggctgagcagcccaaggaggaggaggctcccgccccggaggagtaattgcttttggctattgacctttacctatctattttctcttcctttgtccgcttcttcattctattcccttcatcctttcttttatccttctatatctctttccttatcattccatacgcatctctgctatctcgcttccgtttgtttctcaatcccccccctctttttttgtctctcttttccccctcttggcgactccattcggtcactacctctgccttgccggagagatagatggccatatgtcaatgagaaggagaatgagaggaaagagtgagaccggtcggcttttgtgcaatcatatgggtcttgttctttccaatgtgaggcttgacaaagagaatgtgtgacaactctgtgcggtgtgcacaccagatgactgccgtcacgccgggaagacgctgacggcagctgccactatacgcacacatacacatacacatacacacacacacacacacacacnnnnnnnnnnacacatacatacactccaacccgacggatgaatgaatgtctcaagcggaacaggatacatgcatgatctgcgcgtactccgagatagagacggaaaactggagaaaccgtagattgaatgttccagcacgttcgacgaaagcgaagaagtacaagatgaaaggccggggacgaaagaaaaatgcggagcacctcagaaaagatgttgatgtcagtgggggaaaaagagatttcccgttgactgacgatttttttccctctctaggaatttttctgctgcgccaagtcaattctctccttttctctgctcttcttttccttcccttttttttcccctcaaagagatcttttttcttttttttcgagttctatccttcttttctctcccatcaaccatcaaccatcaacccaattcacatccaatcccaaccaacctttcaatctaaccgtatcccacacatcatgtcttctggagccctttctgtcgtccctgtacgttcgtttctccgttgtccttccatcttgctgatccgtgcctggcagtcggacatcaacgattggaagggcatcatctgatgatgatgattgcctgataacggtgaaactgatccatctctcttctcgtatcttttccatctttgtatcattccaattcgctctacctctggtcgaaccgtcatctcggtcatcgttttcgtctctgatttgctcgctgacatcaggccggagtccttaccggtgaccagacccgaactcttttcgagcacgctcgagccaacaaggtgcgctcttgatctcctttttcgggctgcttatgaaatctacattcagctcatactcatatctgttgtgccttgaatcgtttaatcactaccattccaatctcttagtacgccatccctgccgtgaacgtcacttcctcctctgttgtacgtctgtctatgctgttgtctgcctcctatcatatccggcatgtcaagtcctttcgttctcatcttgtcttccatcttatcaaaaccatcaggtcaacgccgtccttgaggccgcccgagacagcaagtctcccatcatcctccagatgtctcagggaggagccgcttagtgagtctgttatttcttagcctcccctatatggcatacacagctgacccgagccttttctcttcctatagcttcgccggtaaggggattgacaacaaggaccagaaggcctccatcggtggagccatcgccggagcccacttcatccggttcgtcttgatgttttacatcgtgttatagtctcttgtttcggcttgtatctaacctgccttctttcgcctgccaatagagccgtcgctcccctttacggtgtccccgtcgttctccacaccgaccactgtgcccacaagctcctcccctggttcgacggaatgctcgacgctgatgaggcctacttcaaggagcatggataccccttgttctcttcccacatgctcgacttgtctgaggagtccaaggaggacaacatcgctacctgtgtcaagtacttcacccgaatggccaagatgaaccagtggctcgagatggagatcggtatcaccggtggtgaggaggatggagtcgacaactctgccgtcgataacgcttccctctacactcagcccgctgacatctacgacgtcttcaccgccctcaacgccatctcccccaacttctctatcgccgccgccttcggaaacgtccacggtgtctacaagcccggaaacgtcatcctccgacccgagattctcggtaagcaccaggagtacgccgccgagcagctcaagaacggagacgagaagcccctcttccttgtcttccacggaggatccggttccaccaaggccgagatcaaggaggccaccgagaacggtgttgtcaagatgaacgtcgataccgacacccagttcgcttacctcgagggaatcagggacttcatcctcgagaaggctgactacctcaagacccaggtcggtaaccccgagggagctgacaagcccaacaagaagctttacgatccccgaaactgggtccgacttggagaggtcaccctctccaagcgagtcaaggtcgccaacgaggatcttggaaacgtcaacaggaactaagcgtctttggtgctttgatcttgaaaaaaaccaaaccattcactttctcccccttaatcatacctggttgaaacctgtagctatatcatgacttctctcagatctttttctattctcttttttccgtgtctttgtctggaaagtttgtgaattgcatatgagggatacaagatacagaatacagatagtagagacattatcgagatagttgcatattgagcaagacacttacagactgagccatgacatgccggggttatatgtccaacttcgactccaaaatctgtaccaaacaaatcggtcagcttatcattcattcgtccatgggtttcatgatattaacacggggttttcttacccggtaccgatgatcccgccggcacccttgtagtcggcctctggcccgataatgacccagtccagtagaggagttccggctgaacataaacaagtcgggtaaaaagatcaacaacaaacaatagcaacaacaacaacagcagtatgtttccaatagcgtgactcggcaagagaagccaatcagagaatgcaaataacaaacagaaggattcagcggtaccaagacaagaacgtacttcggacggggaacagtctgtacgcgcgttctaggcccgaagggtctgtccctcctagaagaagcgtcagaccggccggtcggataggatgcggatgaagggagaggacgcctgtggaaggattctgtcgagcatcgaacgtcgaggttctctcgtcagagaatctgagcgcgaacgaatg

SEQ ID NO: 1324 - DNA, 14644 bp, Xanthophyllomyces dendrorhous
gagagagagagagaacgggaacctatcagaatgatttattctctcctctcagttggcggaactttatttgccggttctacgtactaggagtagatcgcagtagctctgtagcgaaagagttactcaagccaatgacgacccaagagccttccatcaatggatcccctgcttgaatcttttttatcgcctgttccgcgcagatgatgaccgtatccaacctgccatacacccaagcatcgtgcgctatcctccgagctacagatgtttcgtgtttcgaagtcgagtcacaagaaggtgtgatgagaaccaacgggccctgggatgtgagaatttggatgatcggaccgtatacccttagagtataagagtcagtagcggagattaaacgccaagatgaagtcacagaagaccgatggaaaacaaggtgttcagaggcggcttcgatggatgagaagtcgatggacacataactgtcatctatttgaagacttgttgccgtcagtggcgattcttctgggaagagtcgacgagcggcttccagcgtaagtgaaagagtcaaaacgttggatgtcttgatttgagtgatattggaaccacccgagaatactcttaacttcactcgcgcaagtctacaagaagggtccccagcagatcgctttgtaagaaagaatgttggttgcagaagataagcgcgaacggttgctcacctcccggcttcattcaattgaacaaccctccaacctcctttggatcccatctcgtcggggtttgccacggttagtgtgaacccctctttttgatattcctttgaaagcccagtcttgttcaagttgacctccaagaaatcttgaacgcggtttgacgacaggatgtcatcaaaccaatggccttcgtttggaacttcgtacaagctgaatagatgggcgcaatcgtgtcaaaatgagcctaaacttcatctagacgtgtcagtacagatcaactatatgcgcggtttacctgacgtgatcaagacttcctgtccactggccaatgagtgatctcatctcacgtccgtgccatacaggaacctagattggcggaaggcaaagtaggatatcgcataaatgtgaattgtataaatgaggggtcattatctccttctctccaggccttcatctcaggctgcttcaaactcacgttatcatcgtccctcccatgtacaagtaacacgggtaaccaagctgcattacttgcatgaatgtcgttatcccacatagacagcccattcatcaaaactcccgccagcgccggatccgcccagtgcatagatgtccattgtgaatatcctacgtatgcttgtatcttgaggtaagccgcggcgctgacaactccttggaacatgtctggaaaccgctgacaaaggtacatcgcgccttgaccaccattggaatggccgatgaggagcgtcccaggatgaggagaccaatccgatacgcgatcgggactgccgagattgatcacagctgagagtgattgacgagcttgaagaacattcctgagggatggcccatgataatcgtatccccatgatctagtcaaggaaatgcaagtacagaggaaaggccgagaataagaacttctcggcagacgaaaggggcagaaatgagagaaaacaaacgtttttccagtagcgaacacaatccagcttgacttttgtcttcttatactctctgtccagaatgaccactcagcttcaacgcctgcaccgtgagtcgccaacaaaactgctgtctggttcccgctttgaagcggaggaagcgccattgcatattgagctgttccgtccacgtctcgaaaggtgtatcggatggcggggtatgtctcacgaagtgaggggagagaccaatgagagcggtggttgaccgggatacgttttgttataggacgatgcgaccgattcgaaaactccaggcgaatactcaaatatgtaatagtcgcaggaagaggtgacgtttggaagatgataataggaataggccgaatctggtaagcttcgatatcgacactcgatacggctagagagacatgcagtccctattgcaaatgatatcaatgaatatagtgcgaatgacaggcagggtctttgagtatcttcactgggaatgacctaccttgatgcgctcgataagagtcgccgctatcacctgcacttgcttttcctcagccttcagtgacaaccctgcaatatttccccagatccagccttgaatgacatctcccaatcctatatcaccctccatcatctctgcatcttcagaaagcgcatcggtttcgaatatggtttggacattcgatgtgggaacgaattctgacttaggtatcgtctcatagccaaatcggaactgaatggtaggaggttccccccaaggatcgccgaacattcctatagcgtacagaaaataaataaataaatacatgaatagaacatcagcttagagtatgggttcatacgctatatatcgttgatcgaacggcgcagataacttacggatctcgtacaaagctttaactaggacccagtattctccactctcgatctcctccgtccagccaagttcttgacttgggaagtgctttctaggcgttgaggtggaatatgtatacaaatcaccagagtgccactcaacgtgatctgaccgctttgttggatctttgtgtatcagcgcgaacgaatgagcttgggtgagatcaaagttcaccgtacgtatttggttcaacagagaagagggagagactgttgaaggtaatatcagggaggttcgtagctatacgagacaaggaaaggatgatccttcatgatcaatgaagagactggttacaaatgtagaaaaccacttgctcaccaatgtcatgaactgtacgcccgcccaaccttctgtccccctaagattggtccaatcaaccctgttccatgttactttcacccatccatccgcatcctcttgaaacaatgtccagtccgctttaccatctatcccgtacgcgcttggccagtctccagagccaaatttgagatcggcaaaaaaagcttcgtgcgtctggttcggaggaacgaatgaagaaagtggagaaccaagataaggaagctcccgagtaccgagtgagaaaggacccagtgcctgtatcgtagatatgtgaggcaagccaataagaaatgaacacaaatatgtggaacagatgagatcaagatagactacgggtcgtaagaaaaatggagtctgacctcccatgtcctagccgctgtatcagtgataagcgatcgcgccaaagggatgagactgatcgcgacactcatgtgtcggaacaatatggaagaaaccttcatctcattcagtagagggaagatggcatgaaatgaagatttgaatgtggaagagatgtaagtagatggtaagtgtaatggtatgagcgagcgattggaattatcagatggacaacacgacttcaccttccttccacaactctctacaccgacacacactgttttatatgaagcctggcgatttagcctatgtttctggtccgcctcctttcgtcagaactgagacttgttatcaatgccttaaaaagccttccttgctatccgcttcgaggcttcgagcctgttggcattgtggcaattcatactgttcgatccattgttccaacaaggtcctctcaccggtcttgaagccgggctctagggtcattgaaggttatcagaccgaggcagtgtgtaatttctgctatacgtttgttaagagttagtcgactcttccattcagatctgtaggcacccagtgtagccttcggtgtcgattgctctaaacttacctttaacttgcatcctcattactcatctcagtgtcctcggcttcacccgatgatcttcagagatgctcgatctcgcagctcaaaaaatatctgctggtgtataatattcctctaccgtatgtatccatcatgccctgtctcgttgatcattcatcatgtcctcttcagagttgatatattatgatcaatgctggtagtcctgcggttcatgaaaaatccgaactagtggatcttattcatcattccacaggtatggacggacatcagcctcctgctcgagaggtaggtatactgttgtcttctatatttgatcgttaaatagcctcattctctgtagcagccggactcatttcttctcgttcgtctctctctaccttttgtctgatggtaaacgactggatatcgtaacacaggcctacttccgacgaaactccgtcccaaaaccgtcagcgaccgctcgcccatcggcgttcgatagactcgcacactcattcgatcaagctttctccatcggggagtcatctgggtcaggcacttcaacagacagccaacaatcggcgttttcttccgcttctggatcttctcgagattccgcacccatccatcctcccactgcttccagtcaccggccgtccccctccgctcattcctattccaacagcagggcgcccaacgctccatctgcgccctcttatcctgtccatgctcgaccaactgcaactacgcaccctacatcctccgctgtaccggtagttccaccctcaaggcccaccagagatgctaagctcctcttcgctaacctcatagctctagagtcacctgccgaaaccgctcaactttatagtgtaaaggagctcaagactatcctgaccttgaaccatgtgcgatgtacgaacatcttggaaaaaagcgaattgatctcaaaagtatgcgatcttgtgagagatgaacggatgagactccaacgagagtcggagagggagaacgaagaggctagcgcacaagccaatcataacagtaacctcgaaactcaggaccaagccagtggggacgtatgggagcagattccagatcacatcctatccgaacatccttcgatttcttctgttccggctctgtccaactctggtgcgatgcgttctagtcaaaagggcccaactgaatgtgtgatatgttttgatcagtatgttttgactccttctctactctcgggataactgtctctatcatgtgagtagaaagatcatcgttgacctggccatatcttccctttgcattgcttttacatcaccagtgatgctatcctggcaagtgttgattgtggacacctcgcactgtgcacaggttgtgcagccgaggtcatgaagactagtaaagaatgtccgctttgccggtccgtctcgcttcagaatttcttcgcggagttagcgttccttctgctaatcctaacactttgctctttcagattgaccatcagacataacggattgatacgcatattcatctaaaaacacatacaaccaaagtaatgtgtcttagattgtatcattctcttcgtctctcgggaggcttgtaccttgagctttgatgatcatgatcattacagagtaaaagaccgtgaagaatcatctattcttgtgtttgaataagttttgtatatgatacactactttctgaccagttgagatagtacgattagtgttgggaaatatgtagtattgtgaagattaaagatattgggtatgagagacatgatgtctaaaattagtctacataggttataaagattagaaagattgaacgaaaattagataaattaggacctgaagctggcttcttcgagtggaactactcggtcatgacgttggctcatgaacgattgcaagcgaagattgcgagaggcaacagactcatctgaggaatgcactacagcatccacaatagtgccgctcccatacctaagagactgtaccatcctttgttcgatgataattcccgggagccgtgagaagatccggttacacccgccgaggtctggttcgcagacaaagtgaacacgttcacataggaaatctcgaagaacatgtcttgatagttggccgagttcaggatatatgaagagtctgatttggaaggtacgcacggtacatagattctcagcaaatgccacaacctaatctgatacagacaaaagtacggaaagaaaagaaacttacaacatgtatctggcgtttgcgggactgtacatccagtctgtccaagaattgtgctatttcccgctcgatcctaataagacaatttttgcagccaagacatcaatcagtagagatttgatttaaggtgaaatgagagatctcgcaaaatcagacaagacatacaccacaaagcgagatcttgagaacaggttagacgaaaattgataacgaatcagccgcattcaagaaaagtcttcttttctaatgcatggaaagtgatgctcacatcgatataagttctttgctgactgtgatactcaaacattcgattggagtatataagtagattagatacttcacgctcgtgtaaaaatgacggggcgagaaacatgactcatacctgataaagctattgatgggagaacatccatcttgagaccaagatacagtgggtgttcctaaagcggaagtgtcaatactcgacgtattaaccccaaaggacgacggaacggaggagcggttgtaaaaccatatgctgatattgtaccgcaaaacaacatatagttcagtgacgttacaaacgaaatatcacacaccggtgcctgcaattatagagagactctcacctaactccagtgtcctccagcgccatcacccaggcgcctcctccgttggtgttgaatccatctccgaagctgagagtgtcattctgatccacggaacatccgataacagacgttgaacagtctttactgttgatcacacttttcgatgaagcaaccgagactttcttcggagagcagctatgggagcatatggtgtcagagtgagaaaccacatgatgattagcactcgaagcactttgtcgtaagaatggttgatggctggctggcttctccttaccctgactttgtgtgtaacgccatctcatttctgtcaagaagacaagcaaccgagaacatcaaagaacaccgcagaattttatgcccaacaagacgatcaataaactggtctggtctgattgatagtgactgatatcctggcatatgatgggataggacaaatcaactcacgagctcatcctgtttattcctgccagaacgctgacctctccgttggtctcatcgtcggcgactgttccaaacccaggggctaccgaacatccgaaaggcagcctgacagcatcaaacacccagagcgttccaacgttataggtgtttacggaggttaaccgagtagaggctcgacttgcaggcgtggtgatgttctcggagtctacctgataggtatatgacatgaagaagtgttcaatgaatgtttgccaaggtcgatagcggcgcgacggtacgtacttggataatcgcgttcgaggcagaattgacagatgccaagagaggtgtgtatgattgattgacatattgaaccttcattcatcgaggcaaaccagtgtcactctatcagttccaaaagcacgacgtgtgaaacaccatctgtaaaagatgtacataccgaatttatcctgtggatcagaaaatgattaattgttgatatggctttgttgaatcaacgcgtgtcgatgaaagatgatttcagaagccaacactcactcatttgtattgaacgcgaacccgctgaaaaagccctggccagagtgactctcgctgatagaatacacactggcctcaacaacggatgtgaggagtaccagaatggcgtaacgataggaacacataactacgatgggctgagattgaatgaatgtttcgaaagttggtgtgttttatgttcttatcgatcaacataaagcgacgcgacggtgtgacaagatgactaagcaccatatcttccgtaatcttctctagcgttgatagaagctcgacggaggcaaaaagccgactggataagaataagcatgacccaatcgttatctacgaaatcccaaagtcgccgagacgcgacgcgacgcgacgagagagccacgcaatcttcataagaatagatacgtgagtgcagaggcagatgaagcctagaatatggaccccactgtcgatttctgcccggtttacaccgattgagcccgttcaaacaggccgaaaagatcgagagcgttcgaggttagcgtttgtctatttctcctcggcggcttcaattcgggacaatctatcttggcacacttttcattccttttccgcttttttgcttttttccaaagctcttctcacgaaatgtgttgccctcgaaaacataaatcaaagtgcagtcaaagacaaaccagaagaaaaggcagagcagtttgttgataaagccagaagaagcaagaagcatgacgaatgtgtatatgttgtgtgtatctcttacaaaaactgtcgacctcgatgaagatttaggaagaacgtcggaagttttcacatatatcaaccgtggtcgatacctcgattttcagcaccctgtcttgacgttctctttcgatctctctgtagcgacccttcctaacaaacactccgctcagagtcaaatgacaacaggatgttgtttttgtgcaactggaggccagcttcgtataccaagccggtcagatgatatttcgaaacgtcggaccgtcctgccgatataaggcttgagttagggttacgcctgaaagggcccctcaacaattcctttatcacaaggcagattggtcagccgcctatcgactttccatccatccaaatctcccgaatcgccaacagtgtcgaagctctcgattttgcgtcctattctgaacattacccgtcctcgtctccggattgatattcttcttcggttcgttgaaagcatcttaatgcccgctgtcgctaccgctagctcgtcggccaccgcccaggcggctgctgcagctcaaccatttcaatgcattgtctgcctcaaacgcttcactcgatctgttagttccttatctctagatttttcgagctcctgaggagtgactcaactctcagtttcgtcttttcttgagtacaggagaacctcaagcgacatgctgctcttcacctctcgtcaacggagacatttccatgccaatggtgttcggtgagctttggacgtgctgacttgcgaacccgccactacaagacaaagcacaccgagcgttttgaggccactcgagcgttagctgggcccagtaaaccaaaggccagcagaaagccatccagaaacaagagcttgtccaacgctgccccgacatctatagtttccaattctcctcccgcaaccttagggcaatcacctgaccaattaaaactgccaatcaacaaccctgctttcccaaatataaatgggcctgatggatcctgggatttcgagatgctgggggaatcgattgccaagacaggtatcagtctgcctgataatcatatatggacatcggtaggctccacatgattatatcagtagagtaagtttgcacggcgtggtaactcatcttggtttgctatttttccctctcatctatcataggatttcaactccaacccttttgccactgatccagctggcacgagtttatttggctctctccccagtgattccgggtctacaaaacgagactggtcagcgacttcaccaggtgatggatcgctcttcgctcgctcctcaacctcaccgggaaaagctgcttctatctacgatgactttgttccaacatcggttcagatttcaaaaggtgtcggccttttcttcaagcacgttgcagacttcctccccttccttcatcagccaacttttgatcctgctcaggccagtccatacctcgtccttggcttactctgtttaggctatcagtatggtgatgacccagctgcggacaacctcgaaggatcaggtcaagacctctcatctaggtgcttcgcccatggtcgtcgacttgtccagcaatgcgccgaggagccttctgactctgctcagagcttggagatcgtgcaggcatacctattgttccaggtgtactcaatgatgtatctcgtcggaagctcggatgggttggatatgcattcaaagatcgtgaatgtgagtgattccgtctgtgttcaactcatagttatgcttcggtcactgatgcctactataacttttatctggaacagatctcgcgatcaagcggactcatgcagccacttccgacgagttcgagactgatgccagaccttgagagtttatggaaggagtttatcaaggcggaatcacacaagcggtaagtgtctccctttaagttggctccgaataggaaactaatcaaacctttcatccttttggccgttagcactatgctcacactgcatcatatggatgcgctatggtaccaactcctctctgttcctcgactaatctcgcatccggaaatcaagcatagcatgccatgtcatgaatctgtgtggtcaatcgctaccgcttccgactgggcacaccggacgcttgtcatgaaaccttctgcgcctattcctatacgcttctcagacgccatcaaaaaggtgctttgtgcggcagaaacgggagaatcatgtcctgcagaattctacactgtgggcgtccttcatttccttacgagttccttacgcgaggtctctggatactcagcaatgacaggtcaggtcagccaggaacgattcaaggcaggtccttatctcaaactatgtattcttcatcctatcttcataccagaagggattcatgcttatccctccctcctcctttgcagacactttctacttcactctcggctgctgggccttcatttcgatccaatctccagactgcgtctgcctctcaacggctagtcctagaggcaacctgggagatggcaatgttcgagatggtgtcctggtcgtcggcgcatatgtcaggagttgtggaaagcagtttggatgctgctctggcaactgcgtaagtagtcttgattttgcaaatacatcaaataatgacacgggtctgactcggctctctgtcaccctctttttcttctccgcttctagctcttgtcttgcaaattctagcgggtttcttattgagcctgacagcgtccgatcacttcaagtacatgccaactggttccttctttacctcgatcgtacacttatcgtcgaccaggaaccaccttttgtaacattttactgcttcagagcttggctcctcgccttgcagcttcttcgtaatggtacaccagacgctatgtctatcatcggaattgcagacggagatatggagagtgcactgctctgggcaggccgagtgttcgaaaggaggaagaggtggaaggttggcaagttgattctacagaatttgtcatccctcgaggagctcgccatgtcgttctaggtcgcgaacgaagtcttgggtcattctctcctagccttctttcgcttgtatatcattatttatcagctttatccaatagacgagcattggcgtatttctttccttgagattgtatggttcttatctgacgagcgaacgattcggacaccccgattgaaggagattaatgtcaatggcaagtaaaagaaaacatcttcatcgaaatatacaaccgagaaccagaaattatgttacaactataagagactagcacagaaaaaagacgtatgagaatgaagactggctggcatccataacaagagttgaaacatcctttttgaaccctcggacccctctaagtgtggcatatcaatcaatttaaacagggagcaagaccttgacaccgaagtactctcggtgctgcatgagtttaccatcgatcataacctgatcagcgccgatagcgtttcggacctgatcggtcggatcagtcgcctctgcgatctgaatctctcgccactgctgattagtgggaacctattacataggaaagactgtcagagacgatgtgacttgcccaaaaaaaaaggatagggaaaaaatgggtatgaaagggaacaatatacatacaggcacgccggcgtccataagcttcttaaactctttgtatacaccctgctcttcgatgcatccttcacgctggataaggggcgaatctgtgtagcaaacaagtaggattagaacggtgatctcaatatagaggcatcaagcgtacataccagcagcaggcgtcattcgcatatctcccaccgaagagttgaaaaggacaagcgaaaggcgctccgagttgagctgatccgccgggggcttgtatactcggtgtcgggtagccttgaagtgcccaccagagacgatctcaagagtctgtaagagtcaagaaacgaatcagtgtctaagtctgttatctgtagcacaagatgatgatagctgacctctccaatgttgagcaccaatgctccagccttgtaaggcacgtaatgccattcctcatcctgtccccagatttgcaagcaggagataggaacggagaagagctatatagatatattactgattaggtcaagacacaggatcgtttgagaatcaagactaatcaagccaagtacataccatagtcaagagaccaaagtcagtgtgaccgtgcattcggagaccttttgaagcctcctgagtagactgaggagcaggtcggaacaaggcgtgtcggaaatatccttcgtcagtggcagagccgtctacatgagactgcacgttgtcccaaaggtagtcgtcgggaagttcaagaactcgagagaggagagtaagcaatcgtcggttgacggatccaacaagatactgtatgtaaaatgcggcattcatctgtcagatactcctaatcatcctcggcacatcaatgatttcagactcacgttgcagaaagactcaatctcgtccatgaaagggtgaagacacgaagggacctggttgatatccttccactctctgtttgataaggaaaaaagaaagataaagaacttgtcagttcaaaaataatctagacgaacaccttcgactgcaacggctaccacgtacctggtgtaccagttgaactgctcaatgaagtctgctggtccacggtgcctcttaaaaccgtaagggtgcttgtatcccgaccagactcccttagcggggtcaaagagaagtcgatccttgtcctcctcactgatatggtcgtaaaggtactgggcgagcgagaattgtcggttaagctatcgagagggtaagaaagtgcatattgttaagtctacgtgcgcagtattggtttgatcaattctcttatatgaaaatgaccaagatctcacctgctcatacgagattccgtagttctcgaggaagataaatccatcctctcggatagatcgcttcacatcctcaacaagagaggcaacgacagcggggtcgtcagaatccatcttgctaaggtcgatcgatgtaagctccgcaaagttatgagtctccttggtgataggaggagggatccaagacgggacgtgaggcttgccctcaaggctaggtgaaggagggttgaaaggagcagaaggtgccatagttgaagttatgtggaggggtagagtgattgaagttgtgttggagaattgggaaaggtgaggataggtgactttgcaagaagacgattgaggctcccttataatatgttaagtttggtcaaagcaggaggagccctcacttacatctagccaatctaaagatcgccagaagtcagagaggaggagcaatacttccggagcatcttctagaggacagccggctctgtgcaagtacagtcagatgtagaatccggcccggagatggttgatgattagattgtcgcggctagccgaaaatgagattgtagggaggagctccttctagtgatttgatcaattcctcggctcctcctcctccgcctgcttatcacatctccctcctcctcctcacatcgtctttagatggttttgtccgcagcgagtttgaccagggttgttgaccacaggactataagggagatgctggttggacagaaatcttgacaactttcgttcatcttctgtacatcacaacactctctttccaccgtatcaaactctcaccatctcaactcaatctcaagtctcaatcatgtctcgcgagctcatctcttccgacaagttccctaccaagccccataactgtatgttcttctcactttgcagaagactttgcctaagccttataggcggggaaaaaacctcggctaatgctttttttctttctcaatgtgtttttcttgtaggtcctgccgtcaaggttcccggacttgtcttctgcgccggacagactgcaaccggagagattggccaggctactgttagtctctctgacttttactttttgtcttcttcgaatcaaagtctgatgttctttctttttttttgtttaatttccgcgttcaaaacgtagaggaccgtcttgcagaacctgaaagaggttcttgagcttgctggttcttccttggagaaggtcgtcaagtacaacgtctaccttgccgacatgaaggactttgctgccatgaatgccgtctacattgacgtgagtattctagactttgcctgtggtcatgaatttaccgctgagctaacactttcttttctttttatgacaccagttccttccccagcccatgcccgccc

SEQ ID NO: 1325 - DNA, 5209 bp, Xanthophyllomyces dendrorhous
gcccatgcccgcccgatcttgtctccaggctgtcgctcctggcgccggaacggttatcgagatcgagtgcatcgcccaagcttaaaattcaaatcattccactgtacaaaatgtcatgcatgtcttctttagagccctgatttttttggtcttggtatggagctgtgggtgctatcgcataagtttcgtcaaagacttgtcgcaggagacaagattgacaacggacatcagaatttccaaaacggtgcttttaccgctatatataaaatcaacttgtatgcactaatgcctgttacaatcatcaacaagaactggcttggcacacggcatgtaataagtcttcgttattgatggtagacgagtgccatctcgtctaacagaggcgtaggtttcgatgatgagtaggtggcgaccatcaaacgaggatacaggacaaaatcatggttcttcaagaagaattggaacatccgcagagaggcacgccagacatggtttgagaacagcagggctaagtttctgctgtatacccaaactcagcgtccaaatgtgcgtgcaagccaaaagagatgagtcagtgtcatcttaatgaacttgcacgcgaagaatgaatctagacaagcttcaaactgtttttctgacaatccacggaatatgtgttttgctagaagatatgctgagtcgtgtctagtcgtaacagtacattctatacattctacaagaagcttcatcgagcctttttaagacgatcgtacaacctcaatctcctgctggtaccacaagctgatggccttggtgtcaccagtgatggccacaaagtcgaaggttcccttggccttgttggccaaagctccgttgttcaccaatcggcctgaccactttccagctgccttagctgccttggcgatcttgtcgatggcagcaacaaattcgggctcatcgcctcgggcggggacgtaaccaagaagcgactgtgcgagatcgttaggtccaatgaaaacaagatctaaacagagtgaagcgatagcagggtcaggttcgaggtcgatatgcatacttcgaggacatgcgcgacttaccgacaccgtcaactgcgcaaatctcctctacgttctcaactccagccttggtctcaatctggacgatggtgagcaaggtctggttggccgagagcatgtactcaggggtagtcaggccgtgggcgatggaagggaaagcggatccctgacctcgaagaccctgaggagggaacttggagtaccgcacaacctgctcggcttcagcagccgtgttgatctgaggaatcatgacaccgctgaatgcgaagaagaggaagagaagaggtaagtccgaatgctcttgaatgtgaagatatacaacaatgaagcaattgagcctgtgagttgaaaactcactgggcaccggtatcgagagccctcttgaggatgtctccggtagttcctcgaactcgaatgataggactgacaccttgggcggcgatggcagcgacagagttgtgcatggcatcgtcgccgatgtttccgtgctcgcaatcaacgatgacagcctgatggatgtgtatagtcagcaaggttagaaaacaaaagactggaacacgcagaccaagacaattatcggcactcacgtcaagaccagtaagggagacgatctgagcatgtcgaaccgagggaatggccatgaaggtggcaagagggaactcgccggccttgagcttgttcaagagcctgagtcgagggttggagacggtagtagtgtgagcggtagggaaggtagtcatgatgatgatgagatgtgagaagtactgggaaagtagagttggtagagagagaagactaagatgttgttggtgaagggaaaaccaaaaacgaaaagtcaacaacgcacaagagctttatgtcttcacgcattggagggtgcagccaggaggtggatctatacaaatgacgacaggtacatcgagatcaaattaaccggttggataagccgtgtgatgccggtgatgttagatgagcagccgaaaccagagtggaaagtaaagcggagtgataaccagggaggagtgaagcgaccggaggcgcaggcgaaagaggagtgaggtaaagaggagcagtctctccgcgagaactgactgccgcggtgatctaactaaagtctgatatctcagctgtaatctggttgttatgattgatctctaatctacaatctaagatccgtgatctttgatcggtatctagatcccggcctaatctcttgtgttgttaacccgaggctgagacttacccgccgactaaagccgggaaaacaccggtcccggcccagtatcagaaataagcacacgaactcgcctgctccgcacttttgatactcccgtaggctcctccctcctcccttgagtccagtcatgcaagcatcgaggtcgattttcactcagggttctgtggccaccaccctatcaagcgacggagagataatcagcagtgccaggcgaatcatatcactctcctcatccctcctcatcctcctcaattctctctgaccctcctccgtagattgagattgagataagcccgtcctccgattggtgaggtcgacgaaaattggttatgaacccctcggattctcagcaattctttcttatcaccatccctcgtccttcaattccatctctcatacctacctatccacttccactttcatcatgaacaacatgccggaactcaagaacgaggtcccttctgggcaacccacaagatacgaagaagacatcgaaaacaagggtagcaaaggctctgtcgatgtcgacgttctctcagtgagagaatctagattaccagagtcccttcgagatatcccacaggatgagttggacttgatgaagcgcaaactagttcgaaagatggattgggtcatcttgtcagtcttaactctttctttccgtcctatatcgttcccgttgactgacgaccgagtcttgtcttcctactttcagccctatgtgagacttcaacatctactgtttgactctttttcttttctctcctgcatgtactgacgctttctcaatacagtattggagttctttacattctcaactatattggtgagtagcttcccctttgacaacaagctttctgaagagtcttctgaccttgctttcggccttcaccttcgtagatcgacagaatctttccgccgccaaggtccagggtatcatggcagatctcggcctcacgactgaacaattcgccacagctgtctctatccttttcgtcggttaccttcccttccaaattccctccaacttgcttatcaccaagatctcccgacccggactgtgtatgttaactctcccctttcgaacagaaagtccaactgtgtttctgacttcgcttcttctccacgaatagatatttgcggttgcacttgtatttggggagctatctccgccgccaccggttccgtcaacggctactctgagctcgtggctatcagagcctgccttggtattgttgaggtaagcttctttcttatcgtctttattatcagcttttttgcagctgctgatcatccacccctcttttatatcaggctgtcttcttccctggtttgttctctcgaccttatgcgcaagattgaaaatggttctaacatgcttttctctatcaacctcctctcaataggtgctatctactatctctcagcttggtatcctcgtgctgaactcggaaagcgtattgcaggtctttacatcgctcaacaattcggtaatgctttcggaggtctcttcgccgctggtgttctcaagatggatggagctgctggtgtacgagatgatcttcccttttcatgcaatattgagaacaatcatcgctgaccaaacgatttactctttcattttttcagatcgctgggtggcgatggctcttcattttgttcgtttcttgtttttgactcttaggtgaatataacacgtacttatcatctccttcttttaaccacttgcagggagggtagcgcaaccgtcttgtgcggtgctatcttcgctttcctcatgcctgagtaccctcacaacgccaagattttgtctcctgtggagagagatcttgcagtctggcgtatcgagtccgagtcgggagcggctgagggcacggagaaagaatccgtcctccagggcttcaagttggcgtacgtatcttctcaatcactactcttttcttcaactacatgctgatacttcctttgaaccaatagactcatggatggaaaactctggctcttgatttggatgaacatgatgtctcaagtaagcttgaagaaccacaacttatatgcaactacacatattgacaataaggttctctttgtcacaaacagtgccagggatctatcgccaacttcttcccaactgttgttcaaggtcttgggtacggacgaatcttgactcttgttctcactgcccctccgtaggtcccttcctcgtgtttgtcgattttgaatcttgactcacacgcttctttcctacagttacatctttgctggattcatgtacttcggaatctcttactactcagacgttagtagaaaacttcttccatccttcttcttgactaccatggctaatgctgaagtttttcacctatacatatagcgaaaagacactgtctacaggccgattttggtccttattgcgatcggtaagtagattatccatacatctttcactgtctcgaaaccaaccgtttcttaaccccttctctatccattcagcctgctgcatgtacatcattgccctcagcacgaccaacattggagcccgatactttgccctcatgtgccttcctttctcgtctgttggacctcagattttgtcagtctcaaacacgtttcttctcttccaagcatttgaaggaagctgacgcttacgtctgattttgcgctcataggatgtacaaggtcatcaatactcatcttgctagacctaccgctaagcgagctgcttcttccgcccttgtcaacgccatcggtggtaccgccaacatcgctatgagttacgcatacatcggatcgccccgattcaccatcgccttcggaactgtgcgttcaattttctttactatgcctctcgttttatctatctcttcttgttcatcttactgacctagcgttctctcgtcttttttttttttttttt

SEQ ID NO: 1326 - DNA, 2089 bp, Xanthophyllomyces dendrorhous
catgtttgctttcacactcactgtctaccgatggcatgtgctcaacgagaacaagaagctcgactctggcgaccctgatcagattgctcaagtcgtcaagcgaggtgttactgaggagatggttgccctcggatggaggtacgagctgttctagaccaccaagcgggtccggctatctcagtgcgcatgttaggtggaacgatccccgactttaaatgggggtcatactatagattctttggtttctcttttctatttttgaaaaagttgaagacggtcttgataaagaccatttctgggttctatttctatcggttgtttctttttatcatttcactttgtaacccctttggtagttcatccgttgtatgttcgtacatgttacagttattcaatgacttctctcatttgccgaacatatatcacgcatttagtagtgaaacagaaatgtatctcgagaagtttgcaaccaaactatcatgccttgtttttcatgcaattttctcttttagagtcctatcacttggtcttgtgtcttgtatctataagtttatagatgattgcatccacttcttacttatctgatcgcaacccattttggagtttctcaaaagcctcctatgctagagtgataccaataatttctgctcacttctaaaaagggaatgatcatatgcatatgactgaagatatgtattgagtatttcgcagtccgcagaccagagggctaaggacgagtggagccaagaataaaatatccagtctggttcagtatcagtgtctgtcaagggatctccgcccttgaagatggagaatgggtgttcttgtgtttgacttgggttttatgttatcaggatgagcttgaaggctcagaatcgcggtggattatggaagcgttgaagatagaggcactggcatagtatgagatgggaaggaaggttttcaaaacaaggagacagattccaaacttgaggaaaaagagcaaaggaaagaaaggagaagaactatggggaaaaggagagtcacaaagtacttgtatttcctcatgcctcgagcatggaagtaggacttgcaaggtgcatacaggtacagaaagcgagaaggtggaagatacatgtagccgatattgaacatatcagcaaaccctgtataccgcccggttgagtctctgacaccaagctgaatgcaatatgacagttgccgagcctttccgacttcacagtctggtacactaagtatcgttccatactttactccgacagattaagagtctgaatctcttcgagaaattaacatgtctgattgagccccctccccaacgaaacacgttaatttttagaagagattcagaccctcagtctgtcggagtaaagtacggaccgatacagtgcacaggttgtagacaagcattgcagtatatgtagtcaagttcaagtgaaacgaaaaaagaacgctatcgacataccccagcatatcagaatctgcttttgttgacaaccaagacgaaaggaggtgaagaaagaggaatatgcaatgggaatggcgagacttttatacgcaaaacactgattagtgaagccgaattatggcgaaaaagccgaaaaggtaaacataccgatacaaagatatgaattagtagagcacggtcgtctaatcatgacggcgaaggaggttaaacacttcgggctgtgttgccgagacaacgctgaccgaaggcagcacgtgagatacggcgatcggcgaaagacggtattggatatagcaatctagacaccaaccatcgagtgttgcgcgttggttgactttctatctcttcggtttctcgttcaacatgttatttcatttctattttctatatcatctttatttcacttctctctcgttttatttccgttctactttctttctaatttgcttccatctcgtttctctttcgtttgcatcttggtgatcttgtatatacagtagctactttgtttccttttcctttcttctttctggttctctcaatcaacttactcactgtgtgtgtgtgtattcttgttgagagaatcaggggatcagagaaccagtttgagagaactagtaa

SEQ ID NO: 1327 - DNA, 477 bp, Xanthophyllomyces dendrorhous
ttgacagattgataagatctgggctagattgttatgttcgctcaaccagccaacaacgataaacaaaattgagctggtttcatttgcagggcttgtaaacctcagttcactgcattcaaactatcttcgttgctgaattgttctgaagtcctttgatggtacactgccgttgtctctcctacatactaatcttcgcacgtacatacaattgtttagtcgtatacagagtgagcccttagtgatggagtcaatcttcattacgacgtagtataatttgtttgatacgtatagcgttttcgcagatgaattgtcacaggctgccatcgtgcgattttaagagtcaaaggcgataatgactgcgttaatgtaaagcagtgcaattttcatatgggctttgttcgtgattcaacaagctgtgtgatttcgatgaatgtttcttgaaaacgccatagtcctaccgtgatatgagcaacagcc

SEQ ID NO: 1328 - DNA, 417 bp, Xanthophyllomyces dendrorhous
atgtataaacaaactttttgttctttatgctgatacgtgcaaacagcttgcaaagtaaaatttggagaaacttataaaactaatcaattggaaggagatcgaaacctgatgatcacgaacttctcgtgcgccaacacatttttagaaaaacccagcgcacgctattcaatcatgctgatatcagtatatgcgataagacattcattccttattgctgctgtaaacagaagctgaacacaaacgatgacaaacctgagtacctctggcgcctgactttattgatggtaatcacataaatgtgccctctttcaccctcgactgatgctgtctcagtcaacgtcttggcagctatcttcttccatcgtggctgtttctctcagtgcttttttagcttgtttttttatctttcttctcatt

SEQ ID NO: 1329 - DNA, 676 bp, Xanthophyllomyces dendrorhous
acagcggcaagtcgacgatgtggtcaagtgagatcaaagaccaaggtcggtctggaacaggcagtgactgcagaagaccatacggccgatgccggcgaggcttcgatcgctggcagatatcactgttgagaatacttgaatatggtgcattggtttctgcttgtcatctatgtacctcagccttagctagcgcactctgccagctggcattcttctttttttcaagagattcacagtttgttcttttaagagtctccacagcaatctgtatgaaatgataccaaaacacaacactcagtatcacagattgcgtatctggtgaagactgagggaaaaggaatgagagatggagaaaagagggtttatatagacgagagaaagtgaggcatataagtcaagtaatctagaaagagagggactgagttggcccgagctggactgagttggcccgagtcagatggaccatgaaaagacataaaaggaaggagaatagaagacacaaaagagaatcaaaccaactacgctgagcaatcaaagaggttggtatgaccagaagtgttagtaggattggattgtatataatatacaaagatagggaacaatgtagtagagtgctgtagtagtagaacgctgtacttttaacacatgtttcaacatgttctgcaagatagaacag

SEQ ID NO: 1330 - DNA, 462 bp, Xanthophyllomyces dendrorhous
gctcttcgagacatgaagctctggacgatcgtcactggtgagaggccacggtcatctgccagccatccgagagcgcaggatgcatgggaccaagacgacgacacaaccatgggctggatccacaccaagatcgacatcgcggaggctaagtggctgaagccatgccggacatcggccgagtgcctggacgttctgaggtctgttcatcgactggaaggggtctcgggcgagtttctattgtatgagcgcttggaccctatagagattgattatactcatgaccttcgtgcacagctggatcagtttgtggacgtagtgaatgatataagaaatcttagagtgaaatgtgaatgcaatacaaatgaccagtcgtggagctttactcttcttcgggcccttcccagaactgcaaaaggcaaacagctcagaagaagcatcatcgcaaacgcaccgaaagacaca

SEQ ID NO: 1331 - DNA, 326 bp, Xanthophyllomyces dendrorhous
gtcaaacgcagctgccatcaacaagacacatcggatcgatctgacagacgaacacaaagcactagcaacgaccggctcgatcagcacgatctgtttctcatgccagcaacctggccacctcgcgatcaactgcccgagtatgtcgaaaaggaacggccgagcgagcgcaagaaggtactgcgagtatcacaggtcgatcactcacaacaccgcggactgcaactccaaacgtcatcacaacaatcacaacaaccacagtcatcacagcaaccatccccattcagatcggcagcagatcaacgccatcacccgagagatcgtcaagc

SEQ ID NO: 1332 - DNA, 1683 bp, Xanthophyllomyces dendrorhous
acgactcatacgacgagacgattcacgtagccaacggccagccgatgaaagtcgtcggtcgaggccagatcagcttgctcagcaagccagcgacaggtgacgaacagtgcggattcacactgaccgatgtgttccatgtgccggggatgtcgtccgacatgcttgtatctctcgtctctcagccagctttgccggatcaaaggcatcactttcagcggcgacatggatcggatcgtgttcagagacaagaacggcatctttctcaccgcttcaccacacttgcaaagcctgtggtcgctcgatgtgacggctcggccgccggcattggctgcttcggtggtgccctgcaagccggagatcgagatcgatctcgttcacagacggatgggacatctttcgagatcagctatgcatgaccttttcgcttattctcgtgtgttcaccaaacagataagcaagagtgacatcgacagtgacatcgatagatactttgacaagagcatatgcattccctgtgttggctcacgtcagcacaagactccctttcccacgtcgcagaccgtgatcgatcgtcctctgcagctcgtacatactgacatacaagggccgatgcctgtcgagtcgaacggcggcgcaagatacatgctcaccatgatagacgagcatacagactatcactgggcatgggccatcaataaaagcaaatacagtttcgtattgctgtagattagaaatacaaaacaattccaaattacagggaacaagtaagctatcgatgaacaatcagagactaagatattatgagaataactagtgaagcaacctcaacgacacagaaacggttctggtaaatgctgaggaaggagaaaaacaaaagaaaagaaagaaggagaaggaaagaagtatgccagctggcagagtgcgctagctaaggcttgttggaattagcagtctcgaaatcaaccaccgagtgtttcgagttggttgactctctatctcttcggtttctcgttcaacatgttatttcatttctattttctatatcatctttatttcacttctctctcgttttatttccattctcgtttatttccatcttgcttccatctcgtttctctttcgtttgcatcttggtgatctcgtatatacagtagctagtttcttttcttttctttcttctcctttctggttctctcaatgaacttgctcactgtgtgtgtgtacaattgtttgagagaatgagagaattagagaattataatgagaattataattaggtttatttaagaagaatcgatcgtctcaaagaaacaatcgagaggatcaagatacatcccagccttcgattttcccaccaagtgttccctattgtatttctttcttcttatccttcttctcatctaagcacgttgggttctctcacatatatctgtgctcgacgctttcgtttcctttctttttctttttctttttcccttcctcagtattcacaaagactgtttgtgtgctgaggttggtccatatctatttttctgttttctttctctcttgttttgtatcgtgttcatcgatagcttacttgtgttctggagttagaatgtatttgttctatcttgcaggtttgttattttatatcatgataagtgatcacaaaagactgtttgtgtgctgagttagaatata

SEQ ID NO: 1333 - DNA, 18906 bp, Xanthophyllomyces dendrorhous
gatcaggatagatattaatttgagagggccagagaccagaaaatatagtctgagagaagaaccggactctcgttcaaatgacttcaccgataatatatcccaaagagctccctattgtattaagaacgaaaagtccatttccccttttatttcagcgattatcttcaccaacatgtctgggttgagattgatgatggttcaaatttaatgtaaaatcaacacagatcgtatagtatagtggttagtacttccgcttgtggttcttcaattgaaacgcaaagtcgcggacgacgggtgttcaattcaccctacggtcaaattttacttttcttcaggaaattgcgcattttgaaggaacggcttggctcaaaacatgcgtaggcacacatgactatgtataaccagtaacatatgttgagtaaacttgccataatatcgagactacggccctcgcatgagattaatcacaaaaataattgggggtacgccaactatcatagaaacattgagagcatagaaaaaattggcgtagatgtcaaggtcaaaactccgaaatcatgttctgacgtatcgatgtcgaaagaaacatattctcaagaacttcatggtgttatgttttcgaaaggtgagagagcaatttttggcttagcgaccaaaacatcgttgacaaagtcagggtcagtgaaaatagtaatgagaaggaagaaaaaaagaaaagacgggaagaaagaatgagcaaagagatgagttgttcacgaagagacacaaaacgagaggtagtcaccaaaacgaagacagatgggggtatgcagctagaatgaaaagaagctgtaccaagaaatccccgccggaacacacgacgaaatccaaacgtcttgtgatgggtaatctgtcgatgtcgacctactcaatcggataactcatctgctcggtcagccgctctttgatgagatgaatgatgagtggagacaagagttaatacgatttggtcagaaaaacaagaaagagatgtaccagacgacagcggttatgcaagtcctaaggttgtggtacatgaagagaacagaaacagtggtatgcagatgtagcatcgatcggatatcgttgtcggatgcgttcgttatgaaggcgaaacaatatgcgatgaacaacttttcacaacgcccgattctacgttttggttgacgcagaggatacgagtagcttcgagcattaaccaccacgaagcaactaatatacatcagcggtgaccatcatgaaaaaagggggctgttccaatcttcgacttggcctttacgttgatgataggatatctgatcgtctagaagaagaaaagtattgaggcgatgatggtaagtgggttttatatcgatagaagcactattggctataacgctttgcacaaagacgacaagtagatttatagatgtcgatattcgtacatctagtgaagctacgagaatgttggacttctaaaaggctgtcgatcactggaccattcttccaacagtatatcgacttaaccgtcgctacattgccttgctattaccctatcaatattccatgcatctgttcgaggttccgtgctgaacactccatctcaggctctcaagagttccttgagagcatttggacaatgttcatcacaacacttgagatggttgcacaaacaagaagaaaatcaataatatgtagaatacttgaaccggaccagaattcaaccaccacgaaatggttggtctatgtgctgctcgctcgcatccttaaatgctaccaatcagctcgagtatcaacagcattgagggaaactgaggtgtttccagcgtcaatcaagacaaatcactgatataaaaaaataccgacagaaataaaggatgaactatctcacaaaattgagggtgagagatgctggagtcaggaacggcggacgatcctgatgagtgggaagcacagcagatgatagacattgatagggcaaagttccagataccagtcacttctctcgaacaacatgagaaatacaccgccaatttagatgatgatgctcaaatcgaaaattagagaagaatgattgttctttgatgtcatcagcaaaaatctgtgagtgagggtttgacacgcagcttacagaagaagagaccatgtgaatataaatcgagacacagagaacattttcttgtatataaattggagatcgttttagcgttcgaaagttccgaaccaagaggacaaccagattttgatctggaatcgtcgaccgaaattttttgaagtcttgacgcatcaatgatggaaaatgctcagatttgattgcacattctgacgattggtcgattgtttctaaagatgaggaatccattagcctctctcttctgtctattgcgcttgaataaatacctttgagccaaaagcccatccaggttgcggcgaatgacaatcttggaacagacagatttcgattggccttgaaatagttcagtaatgactgataacgaaatcagagctctttgttccggcttgttaaggaaggtcactcagacgcggttccgatcttctcgatatctagttctctaatccctccgaacagatataaaccctgtcaaaaggtgtaagtgagttgattggaagaatcggaaagagcacagggcgaaacactagctattgtttgtacgagatcacgaagatgagaagagatggaagtgatagagaaggaacggatcgattatctccttggtcacttagataacgaaaacgtagattttatgttcggattattaaattccatacctgttatacattcgccacgcttgtggtcttggttgccaaggttatgtaaacaataggctatgtattatacctcttgccttgcaaagccatccatccatctaactagttgttccactctcgtacccatttctcaaaatgttccttgccccccttctgcttgcggcttcgatatcccttgccgtcatgcctgtggccaaggccgcttccggaaaggatgacacgagtacgtatagctctgatttcgaattttcatattcatcggttgtacaccggtgtcccaattgattttttgccctggtgtggccttgtatatcaaacaggtatccttcaatacattttcagcttggaaaagtacgcacatgtcttctacgagattacagacaactctctggaggattttaaaagaacatatggtatctgacgtttttttttcgtatcgaatgcagcttccagaacgcgttttactctcaggctctcgcaaacgtcagcgcttctcaatttgatgcttcagggtatgatgactgggttcgatcgagagttgttcagagtaagaccattactcttctgcttgacttgttatatcatcagctcatgaactcgccttggatgttacttaaaagtcggtcagcaacaagccactcatatctctcagcttcagacactattgggtgatgcgtccctttccccctgtacatactccttcccctctttggatcccacatctctcctccagttcgcgtccgacatggagaacatccttttcgcctgtacactgggctcgtttgttgatctgcaggggaagaacgccagagcaatcgttgcaagcctggttggaaatgaggcaagacatgctgcctggcttgattcggccgccctaaagagatcgccatggagtggaggaaaggatactattataagagatctttcggtcggaacgagctggatcaacccctatatcatcgaatgtccatcgagtaagttaacctttcttctgaacgaccgtcgtggatggatcaagacgcctaaagtctagatgctgattttcgatgacttgttcaactccatagccaatccgtccatcgctgcaacgacttacccttcggctaccttgcagtccacagccactgctttttcaaatcttactatctcctacacctcttccaaccaggcggagtcttgtatgtttcgtccacgcttgacatttatcttgaatattggcatatcaacgcgtgctgttcgctttgctgaatcttttttttgtatccgatttgtagtgatcatctaccaaggaacctcatccacccttctctctataacctcgggatcgggcactggcacagtgactttacctgcagatctgacgggaaggtcttatggacttgtcgtcaagactagtacgtgttccgttcccttggtctttttcaccaaagtccttcgttcacgctcttttcgcttactaacatgtttttccatgacatctcatcgctcatcctcaggtgctggctcaaacatcactgattcggatgtggtggctggtccaatcattttgaacctaggggtttcttccgacagcactgacgcttgatctgtatacttttcagccagtttgcctttaatctatcatactaatctgcttttagctacccaaatgcttcaatgacttctttcattcgctcatagtgttacaaatttcgatttttgatttttctatcttcaccccagcttatcattgtttttatgtctctccttttgcaggcccgttgaaaatatatcatcagtttctaattatcgctgtgacctctcgcaaatatgctactgcccctctatcatttaggtatcacaatgttctcaaatactgagtttgcgtatgtcatttgagaaggaagcgacataacccatataagactgaggtagagtagatgaatgaggagagaggagtgaggagtgacaatcgatccgaatcaagatcaaggaaaacatagacggattttattcaatatgggaaagagaagaacaaccaaaaaagaaaaccgaacttgacccataaaactatacaaaccgccagaaaatagtacagagaatcaaacatgaagaagagaaagagtataggacaattagggatgaatatcaattggtctgagacatgcgttctctcgtcttctgagcgaaggcggcggcctcgtcccgtgtgaaaccatataccgagcctttagtagtggcgtctggctcggctatcgcaaacttatgtgatttcgaaacagagatgaatgacaggcgaatgaaggtttgagatttgatcaatctataagtttcagtcgaggacgcgcagttagggtttggaaggtctatacgaactggattgaagtctttcttagagtccaggctggcaaatgtgtgattcacgaatcgatgagtggcctcatctgctcggatggctcgcagtgtgtccaaaaaggtagcatcgggaggaagtcgcctgatgaaggtgatatttgtgagcatattgtcagtaacaatttacatgtcaagacaaatgaaactgtgcgactgaagtcaagcagaccagtaagatatagcaatctcgggagcgggaagcttttcccattcaggtacatagccgttctcgatatcactgataattcttgtgctgatgaaatacgaaaccaatcccaatcgaatgattaacaaactaaaagactactcgagcatgattgcaacgatcgatcttactaagtaacgacagcttcttcctccaggcaggcaacgaatcgatgagccaccggcggggaaattaaataagttatgaagaacaggttataaaaaaccctgcaaagcatatatgaagaccctctcagcacatggtccgtgatcgtctagagagagaaattaatattaataatgataaaaaaggctgacccttgagctcccagtatcaaagctcggaaccagagaggtggattagccatgctcatgaacgtcagaaggtggagacgttcgttttcagcttcagcaagaagcgtgtgaatccaaccaccatcccgtcgcactgaacgaatcaagatcgaatgcgtaaggactatgcttatcaacagatgatgccaaaacgatgatcaatcgagaagaaagaatgaaacgaactgagtcggagagactgaagatggcgcaagagaccgccaaccattccaggaactaggttgagtataaatatcagtatcgaagaaaaagtgggtattatcaagaatggttgtgttggtggatgaacgaactagcagctgttgtttctagaaagatgaacctctgtgaattttcagaaaaagtaacaaattagacgaaatggacgtgtgcacttgactagatgagcaatatgttgccatgaatactgacgacaagagtaagtaatactaaccgtcatccattgatcaggcgagagaagacagcccatttggcgcaattgagtgacgctgagttctttgtggtttgcgggaaagggaacatgtttgtagttgctgacaaggtcgaatccccatcggagcatcttgacaagcttggtggagacttggtcggacgtgttggtggggggacgatgaacgacctgaacagcatctaactcagtctgtcagaaagggagaaggaccggtgagctgtagctagcgcaggaataattgaagcgaagcgttcagagacgtactcgagtatagacgggattatgcatcacccaagatccgttagtgggaacagtcaaatcttgtatgacggaagctaagggatccgtatgagctaccgtcgttgcatctatggacagtaagcatgtttgatgagataaagaattgtgaataagaactaatccatattttgatacgaatatgatagaggacagaagaacggaccatgctgatgcatgccctcaccgccgatgacgccttgaaggtgcctttgtttgtcggtggtgagaggaacattgtccgcaagatgatgcgttgattgttgaccattagatgttgaaaggcgggtgttcgacgttgaatatgacctggagcagctccttgagattgttgaggagaagaagtgaactgttagaggtgtgagataggatggccgaacggtacgcgaaagtgaccgagttgatgcctggacaagacatctagcaagagacattgttggtagttgggcaatgtatatggcaggtattgtgatatagccagtatggagagaagcgtgcaatggtttgatgcaatggtcgagcaaagagtagatatgtatgtaggcaggatcagaattaagagctgttggtctcgaactatttataagtcagccaaatgataagtcatgttagtgtcagaaacctcagatcaacaggcagtacagtcagcagattcaattagacattgtgttgaattcagtaaacgcattagtagagcatgaacggaaactcgaagaagaggtgggaacggaaatctaaacggactgccgtgttgatgggtttggcgagttatccgtcgaccgagtcaagacagcaagtgaggaagagacagtcaagtcaggccaagcagtgaagccagcagggttagtaaccgaccatcgccaatgggcttccgtccgtccgcttggctttatcgtccagagattcatgcggggatgtctcgtctttcggagtaatgaacgccgtttcttctgtgtctttctgagccattttactacttgtgttcggcatacatatcatcgtagctgaatatcgcagctgaacatccaagcttgatggtcacctcggaaggtcaaccagttcgttgtcgggtgttgaacgggttatatctgcgcagcgtgcggcagtgtggcgtgtgtaaccatccatgtggtggagcatccacccacgcctgtttcctcgtgacagcggctagtccccagctggggctacaggacgactcgaaaacaaagcaactcatcttttttcgggcccaaacattgcaacgtcgccacggttttctctagtcagatatctgctcggtcgttgtcgtttcttgtctctttatttgttcttgtcctatgtctggtcaatcagcagcttcgagcccataccttcctaaccttcttcggaatggcaagtacatcgtgtttggactattgggcgtccgccattggggcgtcggagacagcctaagaagagctcttctcgaatccaacgccggtggtttgggcatgtgagtacactcctttacgtttctcttcctctcttgttattgcacatctcctggcggaaagataaagacgatccttagaagcatccatcatcactttgatcgcgagatactcaagcaaaagctcaatatgtcatgcttgccttgaccgtgtgttgtgattgaatccaccttctttagccgagcgttgcaactctccttcctattttcggccgtgaccgtcagcttgtttttgtatctggtcgtatacctgcctcggatcaagggagtcgtgcccaatgtatgtttagaaccatcgtctttactctcgctgattgcttctggttccatctcttcaccttgtcctttctcatttgacctgttgaattcccttctatctcatccaatctattcacagtactcgcgttggcaagcttcaagctcgttatccaccgtggtgccgctgctgacggtatccattatctctggctttgttcttctgatcgtcggtttgactaatgagcggtcgggtcggggtgaaaccggaggaaggctcgttagtgctatcgggggaggtcagttgctggtatccatctgacttgatgacgtcttgtacttactcactgcttactgctgcaacgcttgttttgttgatatctttcttgttcgtcactgttgattatcccagctctttctatctacgcaaccacattcggtgtcatcggcttgatccccagtccgaaacccgttcgatcccctcgagttgactgatcttcctcggtggttcgctacgtttttgtctttcctatcacttcctctctttcgaccatgatccctacctcacatcaaatttgtatctcttacttctgtctatcatttgttcttcactccgtccctccgcatcctggtgttcacctatgagtcaagattcgatatagatagacaatagttgagctttgtgatgaaacatagataacagaacgtataccacaggaccaacagacacgatcatccattgttagactcgcgaagatcaagatattttgatagattaggtctgcggacgaaaagcttctggtgtaggagagcagaaagcccacacgtatacgtatttacgacgcggagcgccaagatcgtggcaacacttctcctaacggtcctctctaaagaaacgagacacaatttgagtttcgatagccaccaagaaatggaatgagaggagtcaccgattagaaacgagcgacctcgacaaacatcagagagagatcccaagagttgaacgacatacatgcgtctcgaattttgcactctgatatacaaccaatctaccacctctcttacattcgttctgtttgaaagagggaaattttcgaaccaacgtgataacaaagtatttgacatatcaagtatcagttcactcatttgaggagcccagacgtatcgaacacaaaatacaatagaaggactgacccattcaatgcgctcgcacccaatacctccaaactacccgctctgccctccagtcctacgacctgtcgttcgtgcaaccctccacctaacgcgtccgctcctgtctctagtgtctcgttatcagctcttgccgaagctgccgttatggaagcttgtagacgagcttgagaccaccgttcgtaagactcgcgaatatctgtcgaactaagcgatcctggagcgtcctgtttattggcgagtaatagtaagggaagattcattgtttgaggagattccaacacagattctatgaagtcaagataaggatcaaagggacaagatgcattcagcttcctgttaggatattcaagagaccaagcatccgtagggatctgtaaatctgtgaaaagatacaaaccgaaaacttcccagccttcttctaatcgtgcttcgtccgcggcatctaccacgtacacgacggcatggcattcttcgtagtattttgaccagattgaccggatgtctcgctgacctccaaggtcccagaattgaagaattgtcgacgggagtgagatctttcccactaaaaaaatgcatcgcaaatgggagcccaagcacatccaaattcaatcactcagttctgagtgtaaagacttttgtttgttcctggcaaaggaaagagagacagacctccttgaccaacagtaggcgctatcttgctcacatctggactaggagtatttgggttatagtgatgctggctccacccgataaagccggcaaagttggaagtgattaggtgccaaagaaaccaggttgattaccaaaagaagtatgataatcacagacgtaccttgatctgctcaagcagtgtcgtctttcccgcattatcgagtccgattataatgacagagtaggtctcctttcgagtaagatgggtataaagccccgataagagatggtacatcgttcaaacgctgagtattgtacaagcagaagcagcgtatccttagtttggcaggagacaacgggaagatgaacgaatagaacgagttgatccaacccgggcggcgtgataattaaatatgcattgcacgtttaaactgtaatctcccatgcagactaatttatttaccgccgatcagtgtttgtttacacctctcttgtctgcaacttgcttgattgcttgcttgtcaaacgaacttcgtattgaccgtccttggttggtccttcttccctcccttccttcttttcttcaattgccgcatccagtcttacactctctcattaatcatcagtcgtggcctccttcgtttgagatgcccccttctcttttcctccttggcgcgttcgtcctcttatttggatcccaatcgttggctagcaccagcacgacaccaactggcaacacaacatgcgttgttgactctccacgagtcgaatggttcaataacgagctggccgaaaccccttgtaagtgaccatacgaaaaactgtctacctttcgtctcatgatagtatttcgacgttttacacactaaatactattggaacggcatacctgaatggcaccttcaatctcttcaaaaatcctaggtcgtatgtttgaaaagctgtacagaaactgcgatccgactttcaagatgttttcaactcatataggaaactatacgtacttcgctcaggtgggtcgttgagccgctatttttgagcaaagctcactggatctttactcaattttaccacactcttcattcgcggtggatttgagtaccctttagccggatgtagatgcttcgttcgtcgcacaagtcttttttccatcgtcatggaatcatcgaaaaaaccctcactgatatagtgcatcccgattcatcttcaaactgttaccgatggataaactcgcgtgtgtgtaatcagggatgaatgtgcttgcaactcagtcagtccaactctcactgttactgaacacgttttcaccggactgagagttgatcatcatacttcgcctttttttttgggagggatccgttaggtttcgttcgcgcttttccaagcatgtcgcgcgtaagttacagctctcttcgtattcgttcccctcctttctttgaatgctcacttaattccaacgacatggttgatcttttgatcatcagttgtcaatggggtcgaacaaattctggctcggtcgccgctcagaactacagctcgtggcttggttcatgctccgccgtctcatcaatcactataaccaacggttctcttccttcgacgatggcagctcaaaccataccaccttatgcgtttgctacaatcgatgaagtcacggatttgtggtcttacgcgtcctcttatgtgaatgcgactgccgagaagagctttgttgccgcgccagtaatcacaaacacaccaagcatcgggacgatcgtaggagccgttgtatgtttcgcctctgatatccgatcaagtttgagatactgctgttggggcaagaagttgcagaaactgaccgaggtgtaagacattgactcttaggtcggatccatcgcgggacttatcattctgtgcgttctgtacgtaaagtgcatacggtccagacctcctcggttcgttcttttgaatttcctcaatgtccttcgaatcgttatcttcttctgtagtcttttcctctttaatcaaccataggaagtcttgtccatctcgttgtacgataaacaggccaaagaaagctcctcggaataccttcaagccgctcaaagcatcagcctcagcattttacctcgctgaagcatctaccaaagcaaaccagcctgcttccgaggaggaacagcagcaccgacggagcgttcgagcaagcgtaataaacctctttagtggaggggttgatagccgaaaccaactgcacaggaaagatcaggagatggtatgtagaccgcttgtcttgtccttggtgtacaccgaagccagcgcgtaactgatcttcttcatcatgaaaaccttgcatgcaccaaagtactccatgtctccctcgacgcataatttccacccatcattccaaccctctcctctctcctcctcagctctctcttactcgtcaccaatcgttactaacccattcgcggatgcggtcgaagaggtcgctcctccgaataatgcgtacctgccgaattcgtctgagacctcatatcagcaagggtctcacacccgccagcgatcggtatctaagaaagcatttgaaacatcaacctccaaggacgctggtgtcggagattcatacatgcatactaggcaacggtcgacccaaattcatgttctaggtgaagctgatgaggaggacgaggatgaacacttttcccatgagcagagagaaaatcaccaggaacagagagaacacgtagagagttacacaactggcgttcatgacggacatggaagagcgagaagtttcggaggtggaggagttaacggcgatggaatggtttgtctctgtttttctgttttttatctctcgtgtccctgagaattgagcttatatcacactccttctctttgtcatcgtgatctcctctttcctttatcggttttgaatctcaaagtataatgtatccgtctagactgaccttttgtcccagtttcctgatcttgagttcaagcagctcgaaagtcaaaacctttctactatgaagtccagcgtgcttcgtatcaattctgtcttcttcctactcaatcgttcttgtctatttataccaaaagacacacgtctaccatctgtacagttatgttatcatatcggtctgttcttgcctctctcgtagagttttctttaactactgaattgttctagaattcactttcataatgtgagagggaaatgctctataattgctataataaactaacacatatcttgcaaacacgacgggttttctactgaagtcggctgagagaaccgacaacgaagctacctccactcccagcgacaaggccactgacaagtgagaaaacggcaattgttgaggcaagctcttgctccgaaaccttgagctgaggattcaacgatggagacgaagccaggatcatcacatttgatctgttcgaaggtttcagaaaggtcaataagaaagccagcactaaattgtgttaggaaggagagacgaacgtaatccagccattggataggcccaacaagaccagtcctgtcaagaacactccgtcgccccagggatgggttcctacaggtacttggtttccaaggggattgacgttgcagcccaggaagagaggaataaagatgaccgcacgaagaagagaggcgaccaatagttgaatgtgagatcgaatgatacagaaggatacagccaaccgccctatacaatctccaactgtgtttcgattgaggaaatttgaaatcgtgtggcagaagggatccgacgactgagttcgagcttctttgacggttcagaaaagaaaaagaattggacacgagacagacgaacaattgaagaggaaaaagcctattggaacccagacatcgaatgatttgccccatccggtccccacaggccgaaccgtgcttgtcactgcagggaacacactgagtgtgacagcgaacacaccaaagacagcaacattgagcatccagttggtcttgaacgtttcaaaagctgacgatttaggacgactagtgggaagaggaagcgagggagataacgatggcgaggagagagtattttgatgttgaaaggttgtggtcaagtgcttctggacaaaaagcgcgcctgttgatacggtgaaaaccagaaaagcaaccatcgtcagggtatcatagcatacatggcaactcgtgaatgagatcagaagctgtacttactaatcaagagaaggataccaacaaagacaaagacaacagtggaatgcttcatggaacttccttcatccgttcggttgccttttgggccgaggaacgatgtaacaacttgtacgaaggacaccgtgattgcgatcatgccgttacctaattgcgttgcaccaatctcttttggtccaaagaggctgtagagaaaaaagaaacagatagacatgagcgtggtcgattctaggctaatgagttgatcacgaagcttgtaaaaacatgaaacaatacggacctggaataagacattacgttggtttggagataggacactagaatcatggatcccactgtccaaattcctagtccagacagaataccccagccggtgcctccaggacgtacaagcaagacggccaggaggaagagtacatgtaagagtagaagcccaactaagctgatctggatggcgcgtgcttgagtgcgcgcttgatctttcggagggagaagtgtaatcgatggtgagggcagagaggtggttgaggcggtagccgcccgataagtcaaccagccgagggcgaagaggtttgtcagagtagacactaggctaagagttggtatgagtgaggtaagcaaaggggacgatggagagaggagggagattgcgtatgggaaactagaaataagaatcgaccatggaagcaagattgacgatcctaagatggcaaagggaatcgattgagaaggcagagaggtcaagacagaaggcgagagagaatcgttatcctctgaggaaagggagctgtagtgagtagaggaggagacgactcccgatgtcgaggccatggctttgctcaatataatgagatggaacgaggtggttagaagacgaaagcaatatgtttgaggacgcgttgggattcgatggactggctgaatttacttcacatccatccgttgaccaatgtcttggtcggaagcgttgagagcgtacgctctcgtcaagaatccatcggttgatattccaaagaatgtctacatatcatccaccgagagattgttcgtgtgattcaacacaccatgcaaagcacataggtcgaaagaactgacatgacagtcttggccctcgattgtcacacagcattgtcatcaaggatgggtatccaaaatcaaccttccactatcttattttgcccaggataccgttctccgcccatgtttcaacatccgaggtcacattaggagctgaggagttaaattctctccgatcaacacttcaactagacaaagaaattgtgttggatctactggacggaatggaagatgttgttcgagacttggaagcctcgatccagacagacatgaggaggaccaaaggccatgagtgggacattctggctggcttccatgcggtgccatcaatgaagtgtgtccctttcttcacttccatgaacgatttactctagttttatactcatgtatgaatcggcactgaatcgaacagacatctgcatctacatgtgttttctaaagatctatgctcggacatgctaaaaaataaaaagcactactggtcgttccatccggaaggagggttcttcctgaatttagaaaccgttcgaggttgggttgaaggtagtttgtatcatctttcaagcgcaacactgatgcacaaatccactgacagtcatcattgcttgatctggctgcatctttagaacaagacaaggaggtgaggcacatgccattgtaaagctttgtaaacttatcgattcgagtgctgagacaatatctctttattcctggactgctccaggttatggcacttcctgcttccaagtacgagcctattctgaaacaaccgctcagaagcttttggacgggtgaagagttcaagacgattccgaagctcaaggctcacttggaaagtaaattaaaagcgatcaagggagaaaaacggacggatacatgacccttcgtcgtgactcttgtggttcccagtcttgagatttcctgttcaacatattgtatatttaagcctgccagttctttcatgcctgctttcatcttaactagatagctcgtttggatcatccttgaccttttgcctgttttgttccgcttctaatggaggtgattgaattaacgctacacacgcgtcataccaaagattcacgggtgaagcctagcacagctctttacaaccctaactgcaaatgagttgaacctctcacctaatctttggaagccgtatgccatcagttgtttttctatgcgatctctaccttgcaccttcctgtgaatacagcgtgacgatgagctacgagcttctctcttctgacccggcgaaacattcatcagaccttcaacagctcgaatttgagccctctgatcctcctgggcgggctttacaccgaagatctaactcgaccctaaacgctttctcattcgacccaggtttcttgcctctgagtctgagtgctagcacagaggagagcaatcttgaaaggggaacaaaccaaagacaccttggattcttcagtggtacgtgtatataataagagctgaaacttcactcctggtctgtggctgacaagtcatgaattgcgttcatacgatctcatattgatgtgacgctcgggatatgttcatctgtcgaaacatcttaggtgtcgctttggtcgttggtcttcaggtcgggtcagggatattctcctcccctgtaagtagaaccgcctaatacactagctgtgatggaagaaaggggtggggggattttgatcgataaaatcgttttctgcggaattagggagtgatcgtccacagagtagatagcgcaggcgccagtctagttgtttgggtcgttgctggtctcctcgcttggaccggggccagttcttttgcagagattggatcagccatagttcgtcataattctttgttttactctcttaatgtattatcagaatggcgtcaagcttatctgtctggggattaatttatattgtcatggtagcctgtcaatggaggtgagtcgttgtacccttcatacgtgcagttccaaattcttgacttcaatcgaaaacgatatattcacagccctggtagttagatttgatcagtagactgatcaggatttcttctcttcccttctcttgaacaacctgattaggtgctcaagcgtatctagcatgtgtgtcatctatcatacaaaactatggtcaatccgtattgactttttcgtccgcgacattcctttgaacccatccgtcatccctttttcgtcagatgcatacggaccgatgatgtcgtatctgtactcttggacagccttgagtttgctaaaaccaggcagtgcagcaattatcgctctcatctttgggtaagctcctcttcccttcctgtccttttcttgaattcttatgctgatactcaacctaattttgaatgacgtacagagagtatatttgcagactattgttccatgtttcagtagttaatacatcttcgagtacgacgaaagctacgtctcaagaagatgtgcctgatattccggaatgggccgtcaaagcggcagccattggtgcattagcactggtcactatagtcaatatctcaaatgccaaagcaggatcgaacgtgcagatcgtgttgacggcaataaaagttagtggatttgttgagtatatgtagagatcatgggacgtgttccattctgaccttcttaatggccttgatcgcacaaaaatcaccttcaacacgcgcgcacaatcttcttccttagatatgcaccctactctttgttcttctcctaggatttctagtcttactctccccttcatcagaatcccacttgacggtatcgactttcttcatgggcacatctactaacatgggtgactgggcaatcgctatatattcgtctttgtggggttatgatggctgggaccagttaaactttgtcgctggtgagatggtggatccggcgcgggacttacctagagttattcatagctcaatggcgcttgtaataggactgtttactgtgcgtctgccctcacactttgtgatgtgttttcacgtaaaagaacgtacagaagcattgaaggactgaccccctgtctggatggtttcaaatcaaaaggcagcaaacgtctcttacttggtgacgttatccaaggaggtcgtagcatccagtaatactgtggctcttgtaagccttttgtatcttgttgattcctactgctcttcaatcagccgtctcatcatgtctttcacgccttaaatacaggattttggattagctaccctcggaccggctggggcaactgttttttctgtccgttttgtctcgttttcagccagaattctttaatatctacgataagtaacctaacgactggaaaaagtatttgccaaacaggttttggtggcaacctctacaataggagccttgaacggctcgtccttcacgtctgctcgactggttcaaggtatttttctatcataagaaacagcatcaagcgttgagatgccaaattcgttaaacatagaatactgatcacctgttcttgaaacactcactcctatgtttcttcagaggccgctcgggaaaaattcttaccaggtttcttcggaagcagtcat

SEQ ID NO: 1334 - DNA, 2056 bp, Xanthophyllomyces dendrorhous
cctatgtcatctgtgttgtacacatgatgcatatattatattaatcgaactctttatctccgaacacgcctaggccgacgaggaaaatatggcaactacagatatttcaaaaatgaagacctgatatacatctgatgaccgagcgaggcagatgatgcaatcaacatgttgatgctcacacctttgtccggagatagagtctggagatgttgtctacataattagacatagttatagaggataagaaggagaaaaaagagtaggagaaagagaaagaaaaataactaagctgcgtcctcaataacgaaagtaaagttcaaaactacgttctaggcaacgacgagatcttttccagctcctcgacggattcgaacgatgtcctctcgggaaagatgcgccttatcacactgtggtgatcaaaagaatcaagatgttcagtaccggtctatcggatcatcgtatatggagagtgagacgagcatcgatgagagcaaaggacaaagtaacgcaccatgcctcggaagatagaatccgttcggtcgaacaaagtaagtggagcatcgaattctgctacttgtccttggtccatctttcatatcaacattcaaaagaagaaggtcagtcattggtctgcttcagtacaagtctagaatgagaatgagcacgcacaacaatgactcgatcgcttcatgattagatatatcgaggggaaatattagcagctatatgcgttactggttcttactgactagtttatgttcgacgtactagaaagcaattgtagccaatcgatgggcgatggacaacagagaagattgcgagaactcggattgaattgctcgttgaacggtctggtcagtctcagcatcaactacggaaatgaaacacgactcagctgattaactctcgacaacagatatctcgttaaagaaaaaaaaacacaccggaagacgtcgattcatccaatacgatgactttagcgttcttgacaagcgcacgagacaaagcgatcaattgtcgttcgcctgtgaaagccaaaataatgcgttgagatcccgaagcaagaggaggtttttagacgtcgcgaatgtacttaccgcctgaaaagttggatccctcgctgatgatggcatggtttcttttagtatgtagcttttgagtaaccatgtggagtggaaatcaactcactcattgactacggaatccaatttaaacttagagaagcgttcaacgacctcatcagaaacgtcattaggagccgtaagtcctgccttcttcaaagccatgttgagaactggatcctcaattgtttcagttggatccagattctgtgtgaccaaaggatggtacataagtcagaagatacatataattaaatcaagtataaaaagcgcaaagagacaattcaacatacctgacgaacagtccccgcgtagagcaaagcatctgtaagaatgagagtttcagtcagacatatcagtatgaagacatgtggatgatgtaccataaacgcgcgtgaaaacattacatgccttgaggaacgacagctaagccttgccgaagagcgtcaagtccaatttcgctaatatctcgaccatcgacctcaatgctacctccagagagctcgacgatacggaatagagcttgcacgatggaacttttaccagcacctatcaaatgcgaacacgaatttagagtaaacaaactatccactttcgaggtgaaaggcagatgattggagctcttaccagttcgcccaacctggagcataatgccaagagaagtcgtcagtgtatgcctcggaaatcgataggtttcaactatacggatgatactgacaattccaaccttctcgccaggtcgagttttgaaggaaacccccttaagtatttctggaagtccctctcgatatcctgattttcgatcggatttgattaagcatcttcagaaatttcaataacgccatcaagaatagctacgtactcattcggacgttcttgaattcaacaactccttgctctggccaggccttgggaggatcattggaggtctgcac

SEQ ID NO: 1335 - DNA, 1559 bp, Xanthophyllomyces dendrorhous
gtctgcacagctccttctgggctgaggtgggcataatgagacactctttcggcagtattcatatcctgctcgacagtggcaaagatggtgacaagttgagaaaacacctgcgtgactgagagagaataggtaagaacaactccaagtttggaagggctgatagtctacgccatgaacaatttggagaataatcggaaatcgttagaacgcattcattcgagattattgacagaaaggaataggcctacctctcggaagccgacaccgaagagcccgattcctagaacgaggatatttcctaggaagtccagtcttacaccgagccaccgttgcagtgtgatcgtcatgaagtttgctcgattttggtctgttttggtcagatatcaatacagaactgactcagatgaggagcctcattgcagttgacgatgatagagtgtatactaacagtcaatcgcctcttctgtcttcttagtaaacactttctgttgtctgtaagcccggacactagccagacctccgagcatttcaccataacttgtataaacgtgactacgcaagttagaatctagtcgcttcacctgtaaaatgccagtcatttgtagtgagtaacacaagacagacgaggaaagcttgaccagttattaaaatactgacctctcgagaacttcttcgatagaaatcagcgaagatgtagtagagtacagccataggtgcaaagatgatgccaagataagggaacgtgtagaacaccagtccaattgttccgaagacagagaataccaaattgagaagctgattcaactgctgaggcagctgattatcaagggtcgtgactagaagagacaagcaaccagactcagcattggtcggggcagtaagaaaaccttagagtgtacgtactatctttagagagccgattgacgattcgaccctgatgccaatacgagacatagatcgatcaacttcagccatcacagacgtcagtggagtccaggtttcgacttacgattggcgtggtatcaaagaatgaaattcgactccgcatcctatatacggtgaattatgagaaaatcagtcttgtcgtaaaaccaggtcaaagtagattcagaatagactcacactccatgaagggcctcattgaagagattatacgaagcagtgattcctcgaagatacagcaagaaggtgccggcgaacatcaaaatccccgaggccaaaccaaaagatgcgtatacagcctgttgagaaagacaatgagaataatcgaggtatcttcagttcaagttgaagcgttgatcgaaatctatctgaacataccatataatctccctcactaaatcccccgatactctgcgcggaccagaacccaagaaagatattgtttccaactagagaatcaccaaatgctcagataaaatcagcctcacaccgttagcagtggatcattgaattacccgagaacgaacctgtagcgacttgcgccatagcgaagaaggacaacaagattggtgcccaccaaacggatcccatcgactcagcgtaatgctaaacacagg

SEQ ID NO: 1336 - DNA, 3206 bp, Xanthophyllomyces dendrorhous
catatgcaatgagcgataaccaaatcttaccaagctttgtcagctcaccgcgacaaaccgaatttttgacccaagaagaattgacgaaaggaagaaaggggaaacgataacagacccgaaagattgatgcctttctctccaatctcggtgttcagaccactaggtaagacctgaatatccgattccaggcagcacgcatgaatgacgtcctcaaacttctcttcctcgtagtcttttccgaagagaatattgtcttggagtgatgcattctgaatgtaagttgtcatatgaaacatattgatttagcaaaagaaacacgataagaaaaagacgcctaactgtggcctggcatgcacgaatcttacctgaacccacggagcttgacttgcgtaagcaactgaaccaccaaacaaaacgtttccttctatctttttcatctcgccaatcagtgcttgaagcagagaagactgttgtcccgacaaaagcgcagaaagagcgatgtccacaaagtaaagaatttgtgaatgacctttcaaaaccctagatgataagatgacacttcgacatacctttccacttccaacacttccaacgatacaaaccaaatctcctgaacgaattttgatatcaatatccaccagctcgaacggaggtttctcttcgttgattttgtccagtaccggcaaatcctctagagcagaactgccgttctgcttcttcagcttggcctcctttttcgccttcttggcatttgctttcttctccttttccccagcaaaattcctaccacctctaccaccgctattcatgactgctccttgagggccagaagtctcccagcggaaccttccataagcccgaacggcatctggagcatcagaatctacttgaagatcatcagatagctcttcggctagcatagtggtagcgattcgcttgagagcgaccatggcatcggtacaaatctgcacattcaaagagagaacagaacgaagaaggaagatatgtcaacagtcgttcaagttaaagagacagaggagaggacatacagtaaatgccatcttatatcgatcatgtttgagagttagacatcgttaaacataagattgtcaacttttgagagattgacggaataaaaacgtacaggaagcatcatcaatggttgtcgaataacattgaacagttgaagagagctataaacaaaaagggtaaaagaacgatcaagtgtgattcaacggacaagtcctgcgttggccacaaaccaatagggaataacgcacgaaaagataacagcagcattcaactcatgacctgaaagattataagtgatgaaggtcaatacagcagcggccacaggaacaaaggacatgcttgcctaaattactccataatcacatatgttcgccgataagaaaaatcagctcatccgacgtgaagcaggatataaaggaaagagaggaaagtagtgggggagctagacgaacagacattcccgctcttgtccgcgcgattgttttgagtttggccatttcttggccccgaagttctagcactcgtcctttaaagaaggcttcgtaagcgtataacttgacaacccggattccgttgagaactgataaataacaacatgaaagagtgtcagacaacggtcttcaatcatgtatagagctgagaacatgacctcaaccaaccctcggacaggagtctgacacgctgatcgacgatcttgagctgtccttgtcgagtcgagaacatggtcttgacaaagaacgtttgaataggtgtgttcaaaaccagaatctgtgaagtagtggagaatcatagaaggagacaaacttgctcagtaagaatacaaacccagataatcaaaactgattgtgtcaacgacatgaacgacaacgtacagcaactcctactaaagcggaatatcctagattgactatcaagaggatgacaccaatgacgatttgaatcgggaagacctaaagatcaaagacagtcatgagctgctcttgtgccaggaagcttctctcatgcggccgacttacccaaagtgcgtgaacaagaaacgaagcccactccataaaacttgtatcactgcatacgaacgtgttccacataataagatatttagttttgatcaaccgtcgcttgattgaagatttatttctgtaaaagacgaacctggcaacgagcgtgattagatgtccattagaatgtttggctctagaagcacccgaaagtctcagagacttccgagagatgttggcgatgagagaacttcttgcttctgagaaaaagaggatcaaaatgggtcaacactcataccatcatgaaaaaggaaagactacttctccctcattgagtagaagagaagaaggaaaaagacgaacgaagtcccaggacttgaccccgctgcatatattgattttctgtgcgtttgaaggaaataggtatagcgtatgagaaactcatgcgcttgtttatgggcgatttcctcttggtcacggaatagtacgaggtaagaacatacggcaaagactagcaacctcttgcatgacgaacaaggcaatggtaagaccgataccatgcccgattgcacggggagcgacgagagatgctttggtggcctcggaagccttggcccattcatagctggaggtgatataactcaacagttgtttggtcactagcggtgatgtcgtctgtagtaaggctgagataatgaagaataccgcagctaacgtagatcggggaagaagatgggttagctagagttttatcgaggcaagggtactcgaccgaaatgtcgatactaacaaagccaaaagtcccaactaaaagttttgagcagcgctcgaatcatgctttggtcgtaaacctttccatctagtcctttaaccttgccgccctccttattccccgtcagcttcttttcctttttagatgtctttttattggtggaagctgttgctgggctgggaagggtggcaggtgttgacggcttgtccgcattcttttccttattgtctgactcgacaagcgttgttataggggactgtttctgaggagctttgtatccctttggtcgaaggaatcgaggccggctttctattgggactcgatcatagaagttctgatcaagaggagaagaccgaaaggaagatataagcatgtggatagatattcgcatgtccgaacagaat

SEQ ID NO: 1337 - DNA, 4641 bp, Xanthophyllomyces dendrorhous
tccgaacagaatacatcaacttacgttctccagcgcacttcccgtattggtactcagacgagtctcatccagcttccagagatcttgatgagagatattttgggatacggagcaacgatgacagatacaaacaagcagtgcaggtcagcatgtgcacagtacaatcaagccacccgatcgatgtggtctaagcaatctccagattgataagtttcgcctctgttcgaaacgcgtgtgcgtcctcggcttgatccgagataacgtacaacgtcgtaaacaccacatgtaggccaaatttaacgatgatctctttcgttaccagagatcctgtgggaacaagtactcatgaagtatacccttcaacagaggatgatcgaatgaggtagagaagcacagagaattggggaaatctcgaatggaagcgacacagaataaacatagaagaaacgtattccttacctccagcctccaaaggtcgggtgtagccaatcttgagaatcgggaaacaccaactgaacagccatcgagatacaatatttgccgtgacatctggcatcaccttagcctccacctttgggtcaggcaatgaggctggctttggcttgagaaatttcatatgtggatgtgtgaatatgtgtgtcgtatattcaagaagagtgttgaatgtggaatcggcaggtttcgattggttcgtggcgatgtccgatgagatcgataatgacgcgtcaaacgagaaaaccctgaaagaatatcctttgggcttccttatgagttgatagatgaagactggattgcaagaagtaacacaccctcccgagatctatttaacacaccgaacaagaggaaaggccggacaaggtatggatcaaatcgaccacctggttcggtcatggccgaagacctggatcgctcggtcatacgattcggccatagaccgggctgagaattcgattcggccatagatcacggacgtagtagaatctatcgtctggactagatggagactacttcagattcagtcaagtcaagtcaacctccttgatctgttctttctttaattgccctttcttcatggctcggttccgatatctcagtcattagatgtctcatttaactttcagaccggtcttagctgatgttcatatattttacattgtcaaaccggttgatttcatattgtcaatatagtgaatactcgagtcatctgcggacgagtcataaaagagatcataacaaagggcagtgaccgtcagttggtatacaggtcggcactggcacagcaacgaacggtcgaagagtggaagaagacacagactttatcggtatggttcgtgagtatgatatggtcctcgtccaacatcactccgtcacacctcgagccaaggtttccactgacgacggcctcgttgaaggctaggccactggcaacatcatcagcaaacaccgcgtgcgaaccttctccgcattctgtcagcccaaatgttgcatcagtcacaaaagggctcggctcgatcggtctgttcttaaattctcccgattccaaatcttcatgacttggttctgcctcgatctcagtctggaaccccacacgagcagggttgaaatcaagcaactggacttcgtaagtggctgctgggagaaagccatgcgccagtcgagcaggactccgcacgaagattgcccgataaccatgaacaaaggtaacctggtgaattggaaagtaaagacatctcaatactcagtctcgtcccgatacatatacggaagcgatgaggagagagaaaagtaagacctacccagtgacgacgaagggtcacctcgataatccgacattgatccagcccccattcactccattggataggatctgggcgtttattcacatgtgaacatttcaacctagaaacgggttaatatcgaccgatcatcagtcgcagagctttcgggatatagtatacgttattcagccagttgagatgattgaacgactcggactgacagatcgttcacaaacatctctttgagtgtatatatctgaaagcctcgtctggcagcaatcatgtccaccacaagtacacctttagacgggtcggtagaaaagtatctcccttttcgccaaccagacggaccatgaagaattgaaccacttgacgatggtggatcaggtcggatgtccattgagactggaatcgcatcctcgtcgtttgcgagctcgggcaagttgtagacagataccagttgaggtggcaacagacctgaccgaaaccgataggtagttaacgttggactttgggagtgcatcggtagggatgagatcaagtatccatcaggcgtcaggagggtgaatgagatgattatcctcgacattggcacttgactttgctgtataagtccgaaaggccatccgtgtacgatcaaaggacgatcagaataccgacaggataattctattccaataaatgttgatatctgaaattagtcaaacgtggacgtacacaaagaatttctcctgtgaggatatcccatgccaaaatcaagtcttcctcgccctcctgagcatcgatcagaacaactgccaatgtagattccatgatctggatcagaaaccttgctggagagatcatttccctatcaatttccgtattcatccattccggttgagcagagcgaatttcaaatacgttgcgtgcgagaccagttttcggagttccgtccattgataatagatgaacctcgtatgtcaacaaggtgcttgatatagatgtatgacgccgctctttgtttaaagggagagaaaatggtaagtcatgcgcaaggaaagcgcagatcttaaattcatggtttgagagaactcactttgaggacgtggtcgacggatgactgcgatcagatcttgcgcagggtcgagtgtcagatcgaggtagggccctatattgaaatctacagtttgcttagtagcaggtttcggctgagaaatcgatgggaaaggatgaaaatcaagacatgttggttttggtgtttgcaacgtatccgaatagttggctcctcggacaaataacccgttctgaagctcgtatattgagctataggaagagcaaccaagcaacaggagaagaccgatatcaatactcagtttcagcgtaccagtataaacttggagaaggatgcctcgaacctgtcgcctttgacttctatctcagaccaggatccgtctctgagttcccagtttcgctccctttgtcgaagtcgctctagcttgatcgcggttggtgttccgtcgttcgacggaccggtacaatcgattacgccatgtttccaacattcgatcgagtactgaagctgctggttctcgcttatcgcagtgttaaagagtttgcaaacaagtcgtagcggaatcagggtttgagccggaatatacgtgaggacctgtgtgcgtcacgagaacaaagcaaatatggttagacgtgcttataacgttcgaagcttagaaagtaagaatgccttcatatataatctgtatcatactcaagatgaaggtatcaacacaaacctttgtgacaatctcaggtggtagatccagcagctctagcatttcaaacatgattgagggaaacctaatgacaactatcacaacagggcaatgccagaatgagaagtgaaggatgacgagaatgatgatgatgccgctactgcttctattggaatgtgttgaagaatggtgaggaagatcgaaccaactcttgtaaccacggttactctcaattctcgactgacgaataacgactaatagccatcggccaccacactttctattgtgaagcactcacactcatacacccacacgatccttttctctctcctcgtttatccttctctcgtttgaattcgtcaatagaagagattcaaaaagatgcttggaagagtttcagtagcctgcaggagtgagttttcatgactttaaagagcttgttttcatatgtgcattctaactgttcatctgctcgcctgtcctctccaattctacttctccttcgtctcttctttctgactgctttcgattctccttttttaatctctttcttctctggatgtatcgctcgcggaaccttaacgatttgctgccatccttgttcatcttttggattccacaggatctggccgatcgctcttcaacatagctcatccgtctcctgccttccatgtccatgcatgccaaacccctttttctcgattcgcatcttccacttcgcccgttgatgtcgcgtcatcaacttctctcaatgtccctttgccttcctcacctccaaaatcccgaaccgtagacgaaaccgaatgtgtttctgcatcccttcatcctgcctccgccgagactaagccagagccaaacacccgaatcttgaaatctccaccggtgatatcgaaccgaaggctaaaagccttaaagtaccgtcttaaaattccagagccactcatttttctcaatctgactggtttcagacgggtcgtcattcctcaagcagtcgccgttcgagaccaactagctaagaaggcaaaaaaaggttcaatcgacccagcggaattcatagacgagatgaacaaacttgagaccgaaaggattctcaagatccctcaagacataca
